United States Patent Application Publication US 2006/0150283 A1 - sequence listing, part 24

SEQ ID NO: 90069 - DNA, 1913 bp, Arabidopsis thaliana
  misc_feature (1)..(1913): Ceres Seq. ID no. 12722077
  misc_feature (1)..(1913): Ortholog of  Ceres SEQ ID NO 13597865 as cited in SEQ ID NO 64954
gtcaaatcaagttttatggatctgagaatttttgttctgtttgagttggttgtaaaccccacaaacacaacaattttgataatttgtttgacaccaaaaaagtagaaagctttttcctttagggtttcctttttcgatcgaatggcacatcgtcaattgtatagctacgcccttcaaccttcttatgctgctgctgcctccaccgtatctccagctcctcctccgccgcaacaaccactgccgccaaaaaccggtctttcttctctctacggttcttctgctgaccattactttccggataccacgtatcgtttcttagctcgtgatggatccgaagctttgagcaactattcagggactcttgcatcgtcttcctctatgtaccatcatttgcctaacacgacggcatcgcatttggcgtatcctcagctgcttcagcatcaggaagttgcttggccacctggtgtggaggttcccggtgctgcttccgccgtcgagccacttcctcctggtgtcaaacgcacctctgaagcgctctactatccgactctgttgggtgcccataatacaattggtcaaaccgaagcttggtatactacagactattttaccaagcgccctaagttggagagtacaagccatttgcctatatatccacagagggcaggagagaaagattgtacccactatatgcaaacaagaacatgtaaatttggagaaagctgcaggtttgatcatcctatttgggttcctgagggcggaatcccagattggaaagaggcaccagttgttccaaatgaagagtatcctgagagaccaggagaaccagattgtccttactatataaaaacacaacgctgcaaatatggttcaaagtgcaaatttaatcatccaagagaagaggctgcagttagtgttgaaactcaagattcattgcctgagaggccttctgaacctatgtgcacattctacatgaagactggaaaatgtaaatttggtttgtcatgcaaattccaccatccaaaggatatccagctaccatcatcgagtcaagatattggtagcagtgtggggttaaccagtgagcctgatgccacaaacaatccgcatgtcacatttaccccagcattgtatcacaactcaaaaggactacctgttagatcgggtgaagtggactgcccattctatctcaaaacgggaagctgcaagtatggagccacttgtcgctacaatcatcctgagaggactgcattcattccccaagctgctggggtaaactattctctagtttcatcgaacactgcgaatttgaaccttgggctggttacaccagctacctctttctatcagactcttactcaacccacgcttggagtgatttcagcaacttatccccaaagacctggacaatcagaatgtgactactacatgaagacaggggagtgcaagtttggagagagatgcaaattccatcacccagcagataggttaagtgcaatgaccaaacaagctcctcaacaaccaaatgtaaagctgagtcttgcagggtatcccagaagagagggtgcgcttaattgcccttattacatgaagacaggaacttgcaaatacggggcaacatgcaagtttgaccatcctcctccaggtgaggtgatggctaagaccacttcagaagccgatgctgctggagcaaccaacaccgacactactcaatgagtttcccagctttgtgtaacataagatgatatcttgttgtaatcctagtttacttcctatgtactgcatctgtttcgtttcgaaatgcttatcgctcgtgagttctctacttctctttatcatcctaaaacaaaaaagatatcgttgagtgagtcttcttttactcagttgagctcataaaagcaaaattgttcatc

SEQ ID NO: 90070 - protein, 524 aa, Arabidopsis thaliana
  peptide (1)..(524): Ceres Seq. ID no. 12722078
MAHRQLYSYALQPSYAAAASTVSPAPPPPQQPLPPKTGLSSLYGSSADHYFPDTTYRFLARDGSEALSNYSGTLASSSSMYHHLPNTTASHLAYPQLLQHQEVAWPPGVEVPGAASAVEPLPPGVKRTSEALYYPTLLGAHNTIGQTEAWYTTDYFTKRPKLESTSHLPIYPQRAGEKDCTHYMQTRTCKFGESCRFDHPIWVPEGGIPDWKEAPVVPNEEYPERPGEPDCPYYIKTQRCKYGSKCKFNHPREEAAVSVETQDSLPERPSEPMCTFYMKTGKCKFGLSCKFHHPKDIQLPSSSQDIGSSVGLTSEPDATNNPHVTFTPALYHNSKGLPVRSGEVDCPFYLKTGSCKYGATCRYNHPERTAFIPQAAGVNYSLVSSNTANLNLGLVTPATSFYQTLTQPTLGVISATYPQRPGQSECDYYMKTGECKFGERCKFHHPADRLSAMTKQAPQQPNVKLSLAGYPRREGALNCPYYMKTGTCKYGATCKFDHPPPGEVMAKTTSEADAAGATNTDTTQ

SEQ ID NO: 90071 - protein, 445 aa, Arabidopsis thaliana
  peptide (1)..(445): Ceres Seq. ID no. 12722079
MYHHLPNTTASHLAYPQLLQHQEVAWPPGVEVPGAASAVEPLPPGVKRTSEALYYPTLLGAHNTIGQTEAWYTTDYFTKRPKLESTSHLPIYPQRAGEKDCTHYMQTRTCKFGESCRFDHPIWVPEGGIPDWKEAPVVPNEEYPERPGEPDCPYYIKTQRCKYGSKCKFNHPREEAAVSVETQDSLPERPSEPMCTFYMKTGKCKFGLSCKFHHPKDIQLPSSSQDIGSSVGLTSEPDATNNPHVTFTPALYHNSKGLPVRSGEVDCPFYLKTGSCKYGATCRYNHPERTAFIPQAAGVNYSLVSSNTANLNLGLVTPATSFYQTLTQPTLGVISATYPQRPGQSECDYYMKTGECKFGERCKFHHPADRLSAMTKQAPQQPNVKLSLAGYPRREGALNCPYYMKTGTCKYGATCKFDHPPPGEVMAKTTSEADAAGATNTDTTQ

SEQ ID NO: 90072 - protein, 341 aa, Arabidopsis thaliana
  peptide (1)..(341): Ceres Seq. ID no. 12722080
MQTRTCKFGESCRFDHPIWVPEGGIPDWKEAPVVPNEEYPERPGEPDCPYYIKTQRCKYGSKCKFNHPREEAAVSVETQDSLPERPSEPMCTFYMKTGKCKFGLSCKFHHPKDIQLPSSSQDIGSSVGLTSEPDATNNPHVTFTPALYHNSKGLPVRSGEVDCPFYLKTGSCKYGATCRYNHPERTAFIPQAAGVNYSLVSSNTANLNLGLVTPATSFYQTLTQPTLGVISATYPQRPGQSECDYYMKTGECKFGERCKFHHPADRLSAMTKQAPQQPNVKLSLAGYPRREGALNCPYYMKTGTCKYGATCKFDHPPPGEVMAKTTSEADAAGATNTDTTQ

SEQ ID NO: 90073 - DNA, 798 bp, Arabidopsis thaliana
  misc_feature (1)..(798): Ceres Seq. ID no. 12722081
  misc_feature (1)..(798): Ortholog of  Ceres SEQ ID NO 14305871 as cited in SEQ ID NO 57224
gacataacagagcgtcagaaccattggttccaaatttctcgctgccttattcttatcgtcatcctccgaccaaagttccatcttctgcacagagatgttgatgaagcactgttttgtgtctcataacgccaatgatctctgtttctctttctccaactccaaattcaatcttgcaagctgcccaaagaagccacctcgtctcacctgcgttgtcaatgttggattccaagatatcgctgaggtcatccacaacaaggtactcatagctgctgggacttctgctgtgattgggcagctctcaaagccattcacttctgtcgttttgtatgggaaaaatctggactttagaagtgtctttcaagctggaggtttcccttcaacacattcttcttctgttgtggctgcagcaactgctattgcttttgaaaggggatttgctgactccatttttggtctaactgtggtttatgctggccttatcatgtatgatgcccagggggtgaggagagaagttggaaaacatgccaaagtgttgaacaaactaacagctaatgctcgtagaagtgaagtaatgagtttaaagggcaacgaatctaacaaagctttgacatcagaagagatcagtgaggagattgctcctccattgaaagaatcaataggacacactgaagttgaagtcatagcaggggctttgttcggtttcttagttaccctcagtgtttattccctgatgtaaaaaagctcccaactttataaaaactatatattttttgtgttgataagaaagaaagagaattt

SEQ ID NO: 90074 - protein, 213 aa, Arabidopsis thaliana
  peptide (1)..(213): Ceres Seq. ID no. 12722082
MLMKHCFVSHNANDLCFSFSNSKFNLASCPKKPPRLTCVVNVGFQDIAEVIHNKVLIAAGTSAVIGQLSKPFTSVVLYGKNLDFRSVFQAGGFPSTHSSSVVAAATAIAFERGFADSIFGLTVVYAGLIMYDAQGVRREVGKHAKVLNKLTANARRSEVMSLKGNESNKALTSEEISEEIAPPLKESIGHTEVEVIAGALFGFLVTLSVYSLM

SEQ ID NO: 90075 - protein, 211 aa, Arabidopsis thaliana
  peptide (1)..(211): Ceres Seq. ID no. 12722083
MKHCFVSHNANDLCFSFSNSKFNLASCPKKPPRLTCVVNVGFQDIAEVIHNKVLIAAGTSAVIGQLSKPFTSVVLYGKNLDFRSVFQAGGFPSTHSSSVVAAATAIAFERGFADSIFGLTVVYAGLIMYDAQGVRREVGKHAKVLNKLTANARRSEVMSLKGNESNKALTSEEISEEIAPPLKESIGHTEVEVIAGALFGFLVTLSVYSLM

SEQ ID NO: 90076 - DNA, 680 bp, Arabidopsis thaliana
  misc_feature (1)..(680): Ceres Seq. ID no. 12722096
  misc_feature (1)..(680): Ortholog of  Ceres SEQ ID NO 14314807 as cited in SEQ ID NO 52563
catcactaccttttctctgctaatttctactatttgtgttggagggatatattataataaaaagaaccaatggcggaccaaacaagaacccatcacgagatgataagccgagacagtacccaagaggcccatccgaaggccaggcagatggtgaaggcagcaaccgctgtcacagccggtggatccctacttgtcctctccggcttaacactcgctggaacagtcatcgcactcacggtggctactcctctcctcgtcatcttcagccccgtcttggttccagcagtggtaaccgttgctctcatcattaccggattccttgcatccggtggctttggaatagccgccattaccgccttctcttggctctacaggcacatgacgggatctggatcggataagatagagaatgctcggatgaaggttggaagcagagtgcaggatactaagtatgggcagcacaacattggagtccaacaccaacaagtttcttaaaattcaaaggctaaaaacgatttccacattaaattgtcatccatcgttagatctcttctctttgtttttattttcaacgtttatgttgtaatgtgtgatatataataacatgcaatgtatgatgtaatcttgttgttgttgtatgagtaatgttttgatccttctatgcgagcggaaatcttcat

SEQ ID NO: 90077 - protein, 141 aa, Arabidopsis thaliana
  peptide (1)..(141): Ceres Seq. ID no. 12722097
MADQTRTHHEMISRDSTQEAHPKARQMVKAATAVTAGGSLLVLSGLTLAGTVIALTVATPLLVIFSPVLVPAVVTVALIITGFLASGGFGIAAITAFSWLYRHMTGSGSDKIENARMKVGSRVQDTKYGQHNIGVQHQQVS

SEQ ID NO: 90078 - protein, 131 aa, Arabidopsis thaliana
  peptide (1)..(131): Ceres Seq. ID no. 12722098
MISRDSTQEAHPKARQMVKAATAVTAGGSLLVLSGLTLAGTVIALTVATPLLVIFSPVLVPAVVTVALIITGFLASGGFGIAAITAFSWLYRHMTGSGSDKIENARMKVGSRVQDTKYGQHNIGVQHQQVS

SEQ ID NO: 90079 - protein, 115 aa, Arabidopsis thaliana
  peptide (1)..(115): Ceres Seq. ID no. 12722099
MVKAATAVTAGGSLLVLSGLTLAGTVIALTVATPLLVIFSPVLVPAVVTVALIITGFLASGGFGIAAITAFSWLYRHMTGSGSDKIENARMKVGSRVQDTKYGQHNIGVQHQQVS

SEQ ID NO: 90080 - DNA, 2460 bp, Arabidopsis thaliana
  misc_feature (1)..(2460): Ceres Seq. ID no. 12722108
  misc_feature (1)..(2460): Ortholog of  Ceres SEQ ID NO 13654989 as cited in SEQ ID NO 63117
  misc_feature (1)..(2460): Ortholog of  Ceres SEQ ID NO 13584744 as cited in SEQ ID NO 69137
atggactcttttttcaaaaactcatatctggacccaaaggctgtgcgtgcccagcttcctaagagggctgatcttgcggctccttctgaaccgatgaccgttgcgttagctattagtgggagcattaaaagcaagaatgtaattaagtgggcgctcaacaagtttggttctgacaaaaatgtcactttcaagctgattcacatccatccaaagattactactctacctacagcttcggggaacatagtctctatatccgaggaactagaggaagtagcggctgcttatagacaaaaagtgatgcaggagacaaaagaaactcttcttaaacctttcaagaaaatgtgcgagcggaaaaagctaaagatcgatgaaactcgttttgaatcttctttgacaaaggttgcagtagaacttcaagtgcttgaatcaaatagtgttgcagtggcgataaccaaagaggttaatcagcatttgatcagcaatcttatcattggacgctcatctcaagctgcctcctcgaggaattatgatattacagcgtcgatatcagcatctgtgtcaaacttgtgcacagtctatgttgtctcaaacggaggagtccatattcttgcaaaagacacgtcagacacggagaggaatgacacttcaatagaatctggttttgagagaacttcctccagctgttcttctggttcaggagctaactcagatgttatgtcgaatgcactcaaatctaaccctcacactctgtccaataagagaatgcaaaatctcccgacaatagtaagaggggtttctgttcctatggaaactagttctactgagtcagatgaaactaaaaagaggtcttcggatgctgcagaggaagcaagcaagagaagtagccctgaaacatcacgtagtgtttcttggaatcctcagtttagagattttgacgagagaaaagacgctatgagttccatgtctagcaactttgaatacggaaatgttgttactccccttggacactatttcacagacaaccaggacacgcttaatgaaatttcgaagttgagagctgagcttagacacgctcatgaaatgtatgcagtggctcaagttgaaacgttggatgcttctcgtaagctaaacgagcttaagtttgaagagctaacgcttctggagcacgaaacgaaggggatagcaaaaaaggaaacagagaagtttgagcagaagagaagggaagagagagaagctgcacaaagaagagaagctgagatgaaagcaacccatgaagccaaagagaaggagaagcttgaagaaagttcccttgtggctcctaagctgcaataccaagagttcacgtgggaagaaattattaacgcaacttcatcattctctgaagatttaaagatcggaatgggagcttacggggatgtttacaaatgcaatctgcatcatacaatcgccgctgtcaaagttttgcattctgctgaaagtagtctatccaagcaattcgatcaagagctcgaaatcttgagcaagatcaggcacccgcacttggttcttcttctaggagcatgtcctgatcatggcgctctagtgtatgagtacatggaaaacggtagcttggaagatagactgttccaagtcaacgatagtcaaccaatcccgtggttcgtgcggttaagaatcgcttgggaagtcgcatcagcgcttgttttcctccacaaatcaaaaccgacaccaatcatccaccgcgatcttaagcctgctaacatcttgcttaatcacaactttgtcagcaaagtaggagatgttggtctttccacaatgatccaagctgccgacccattgtcaaccaaattcacaatgtacaagcagacaagccccgtgggaacgttatgctatatcgatcccgaatatcaacgaaccggaaggatatctccaaaatcagacgtgtatgctttcggaatgatcattctgcagcttctcactggtcaacaggctatggcactgacatatacagtagaaacagccatggagaacaacaacgacgatgagttaatacagattcttgatgaaaaagcaggtaactggccaatcgaagaaactaggcaattagctgctttagcactccagtgtacagagctccgttctaaagacaggcctgatttggaagatcagattcttccagtattggaaagcttgaagaaagtagctgataaagcaagaaactcgctttccgctgcgccaagtcaacctccaagccatttcttctgtccattacttaaggatgtgatgaaggagccatgtattgcggctgatgggtacacttatgaccggagagccatagaggagtggatggagaaccaccggacgtctccggttactaattcgccgttacaaaacgtgaaccttttgcccaatcacactctttacgcagccatcgtcgaatggagaaatagaaatcagtga

SEQ ID NO: 90081 - protein, 819 aa, Arabidopsis thaliana
  peptide (1)..(819): Ceres Seq. ID no. 12722109
MDSFFKNSYLDPKAVRAQLPKRADLAAPSEPMTVALAISGSIKSKNVIKWALNKFGSDKNVTFKLIHIHPKITTLPTASGNIVSISEELEEVAAAYRQKVMQETKETLLKPFKKMCERKKLKIDETRFESSLTKVAVELQVLESNSVAVAITKEVNQHLISNLIIGRSSQAASSRNYDITASISASVSNLCTVYVVSNGGVHILAKDTSDTERNDTSIESGFERTSSSCSSGSGANSDVMSNALKSNPHTLSNKRMQNLPTIVRGVSVPMETSSTESDETKKRSSDAAEEASKRSSPETSRSVSWNPQFRDFDERKDAMSSMSSNFEYGNVVTPLGHYFTDNQDTLNEISKLRAELRHAHEMYAVAQVETLDASRKLNELKFEELTLLEHETKGIAKKETEKFEQKRREEREAAQRREAEMKATHEAKEKEKLEESSLVAPKLQYQEFTWEEIINATSSFSEDLKIGMGAYGDVYKCNLHHTIAAVKVLHSAESSLSKQFDQELEILSKIRHPHLVLLLGACPDHGALVYEYMENGSLEDRLFQVNDSQPIPWFVRLRIAWEVASALVFLHKSKPTPIIHRDLKPANILLNHNFVSKVGDVGLSTMIQAADPLSTKFTMYKQTSPVGTLCYIDPEYQRTGRISPKSDVYAFGMIILQLLTGQQAMALTYTVETAMENNNDDELIQILDEKAGNWPIEETRQLAALALQCTELRSKDRPDLEDQILPVLESLKKVADKARNSLSAAPSQPPSHFFCPLLKDVMKEPCIAADGYTYDRRAIEEWMENHRTSPVTNSPLQNVNLLPNHTLYAAIVEWRNRNQ

SEQ ID NO: 90082 - protein, 788 aa, Arabidopsis thaliana
  peptide (1)..(788): Ceres Seq. ID no. 12722110
MTVALAISGSIKSKNVIKWALNKFGSDKNVTFKLIHIHPKITTLPTASGNIVSISEELEEVAAAYRQKVMQETKETLLKPFKKMCERKKLKIDETRFESSLTKVAVELQVLESNSVAVAITKEVNQHLISNLIIGRSSQAASSRNYDITASISASVSNLCTVYVVSNGGVHILAKDTSDTERNDTSIESGFERTSSSCSSGSGANSDVMSNALKSNPHTLSNKRMQNLPTIVRGVSVPMETSSTESDETKKRSSDAAEEASKRSSPETSRSVSWNPQFRDFDERKDAMSSMSSNFEYGNVVTPLGHYFTDNQDTLNEISKLRAELRHAHEMYAVAQVETLDASRKLNELKFEELTLLEHETKGIAKKETEKFEQKRREEREAAQRREAEMKATHEAKEKEKLEESSLVAPKLQYQEFTWEEIINATSSFSEDLKIGMGAYGDVYKCNLHHTIAAVKVLHSAESSLSKQFDQELEILSKIRHPHLVLLLGACPDHGALVYEYMENGSLEDRLFQVNDSQPIPWFVRLRIAWEVASALVFLHKSKPTPIIHRDLKPANILLNHNFVSKVGDVGLSTMIQAADPLSTKFTMYKQTSPVGTLCYIDPEYQRTGRISPKSDVYAFGMIILQLLTGQQAMALTYTVETAMENNNDDELIQILDEKAGNWPIEETRQLAALALQCTELRSKDRPDLEDQILPVLESLKKVADKARNSLSAAPSQPPSHFFCPLLKDVMKEPCIAADGYTYDRRAIEEWMENHRTSPVTNSPLQNVNLLPNHTLYAAIVEWRNRNQ

SEQ ID NO: 90083 - protein, 719 aa, Arabidopsis thaliana
  peptide (1)..(719): Ceres Seq. ID no. 12722111
MQETKETLLKPFKKMCERKKLKIDETRFESSLTKVAVELQVLESNSVAVAITKEVNQHLISNLIIGRSSQAASSRNYDITASISASVSNLCTVYVVSNGGVHILAKDTSDTERNDTSIESGFERTSSSCSSGSGANSDVMSNALKSNPHTLSNKRMQNLPTIVRGVSVPMETSSTESDETKKRSSDAAEEASKRSSPETSRSVSWNPQFRDFDERKDAMSSMSSNFEYGNVVTPLGHYFTDNQDTLNEISKLRAELRHAHEMYAVAQVETLDASRKLNELKFEELTLLEHETKGIAKKETEKFEQKRREEREAAQRREAEMKATHEAKEKEKLEESSLVAPKLQYQEFTWEEIINATSSFSEDLKIGMGAYGDVYKCNLHHTIAAVKVLHSAESSLSKQFDQELEILSKIRHPHLVLLLGACPDHGALVYEYMENGSLEDRLFQVNDSQPIPWFVRLRIAWEVASALVFLHKSKPTPIIHRDLKPANILLNHNFVSKVGDVGLSTMIQAADPLSTKFTMYKQTSPVGTLCYIDPEYQRTGRISPKSDVYAFGMIILQLLTGQQAMALTYTVETAMENNNDDELIQILDEKAGNWPIEETRQLAALALQCTELRSKDRPDLEDQILPVLESLKKVADKARNSLSAAPSQPPSHFFCPLLKDVMKEPCIAADGYTYDRRAIEEWMENHRTSPVTNSPLQNVNLLPNHTLYAAIVEWRNRNQ

SEQ ID NO: 90084 - DNA, 1308 bp, Arabidopsis thaliana
  misc_feature (1)..(1308): Ceres Seq. ID no. 12722125
  misc_feature (1)..(1308): Ortholog of  Ceres SEQ ID NO 14302462 as cited in SEQ ID NO 65678
atggaggaagaactcaagaacttgatcaaggtttcggtttctgtaataatctccatatcttactgttactacgtaccaaccagaatcaaacctggtatctttagatttctctctgttcttccaatttgtgctctgtttcgtgttcttcctctgtttttcgcctctgttcacctctctggttacacagcgcttttcatctcatggctcgccaatttcaaactcatactcttctccttcaatcaaggcccactttttccacttccctcaaatctcacccgattcatctgcttcgcttgcttccccatcaagcttcaacaaaaccctaagcgccgagactatttcttccaatgggaataccccattgaagttttgtttagtaaccaattcgtgactaaagttgtaatcttgagtgtagtgttacatatgtataatcacatacaacatatatatcccattgtgctatttgttctctatccactccatctatacttggtacttgagattctcttaaagctcttcaacgctttcttctctatagctcttgattgcgaactcgagccacagctgaatgaaccatacttggcctattctcttcgagacttctggggtcactggtggacactcatgctcccgacgatcctcctgccagacgtctacgctaggatgcggcgaatcactgaagggaaaatgaactccgagaatgctctgtacttgggagtttttgtcacattccttgtctccggtgcacttcacgagtttctcttcttctatataactcgtgagcggcctactggagaggttactctgttcttcgtgttacatggggtttgcattgtggcgtacgacgccaggttaaagaagaagattgcgcggtggatagggtttgaattttgcccgtgtttgatattacaagtgatggttatggggtttgtcgttgtgactgctggttggttgtttttccctcctcttgtcaggaccggcaagattcagagattcgctaacgaagccttgctcttcattggtttcgtgcgcaacttgtttaacgaatccttgttcttcatgcgtaagttttttaacgaagccttgttcttcactggtttcgtcatgcgcaagttgtttaacggagccttgtttttcattggtttcgtcaagctcaagttgtttaacgaatcctccttgttcttcatcatgcgcaagttgtttaacgaagccatgttcttcattggtttcgtcatacgcaagttgtttaacgaagccatgttcttcattggtttcgtcaagctcaagttgtttacttttggctggtga

SEQ ID NO: 90085 - protein, 435 aa, Arabidopsis thaliana
  peptide (1)..(435): Ceres Seq. ID no. 12722126
MEEELKNLIKVSVSVIISISYCYYVPTRIKPGIFRFLSVLPICALFRVLPLFFASVHLSGYTALFISWLANFKLILFSFNQGPLFPLPSNLTRFICFACFPIKLQQNPKRRDYFFQWEYPIEVLFSNQFVTKVVILSVVLHMYNHIQHIYPIVLFVLYPLHLYLVLEILLKLFNAFFSIALDCELEPQLNEPYLAYSLRDFWGHWWTLMLPTILLPDVYARMRRITEGKMNSENALYLGVFVTFLVSGALHEFLFFYITRERPTGEVTLFFVLHGVCIVAYDARLKKKIARWIGFEFCPCLILQVMVMGFVVVTAGWLFFPPLVRTGKIQRFANEALLFIGFVRNLFNESLFFMRKFFNEALFFTGFVMRKLFNGALFFIGFVKLKLFNESSLFFIMRKLFNEAMFFIGFVIRKLFNEAMFFIGFVKLKLFTFGW

SEQ ID NO: 90086 - protein, 294 aa, Arabidopsis thaliana
  peptide (1)..(294): Ceres Seq. ID no. 12722127
MYNHIQHIYPIVLFVLYPLHLYLVLEILLKLFNAFFSIALDCELEPQLNEPYLAYSLRDFWGHWWTLMLPTILLPDVYARMRRITEGKMNSENALYLGVFVTFLVSGALHEFLFFYITRERPTGEVTLFFVLHGVCIVAYDARLKKKIARWIGFEFCPCLILQVMVMGFVVVTAGWLFFPPLVRTGKIQRFANEALLFIGFVRNLFNESLFFMRKFFNEALFFTGFVMRKLFNGALFFIGFVKLKLFNESSLFFIMRKLFNEAMFFIGFVIRKLFNEAMFFIGFVKLKLFTFGW

SEQ ID NO: 90087 - protein, 227 aa, Arabidopsis thaliana
  peptide (1)..(227): Ceres Seq. ID no. 12722128
MLPTILLPDVYARMRRITEGKMNSENALYLGVFVTFLVSGALHEFLFFYITRERPTGEVTLFFVLHGVCIVAYDARLKKKIARWIGFEFCPCLILQVMVMGFVVVTAGWLFFPPLVRTGKIQRFANEALLFIGFVRNLFNESLFFMRKFFNEALFFTGFVMRKLFNGALFFIGFVKLKLFNESSLFFIMRKLFNEAMFFIGFVIRKLFNEAMFFIGFVKLKLFTFGW

SEQ ID NO: 90088 - DNA, 1611 bp, Arabidopsis thaliana
  misc_feature (1)..(1611): Ceres Seq. ID no. 12722145
  misc_feature (1)..(1611): Ortholog of  Ceres SEQ ID NO 13594037 as cited in SEQ ID NO 55666
  misc_feature (1)..(1611): Ortholog of  Ceres SEQ ID NO 13657707 as cited in SEQ ID NO 66407
atgaatatgatgatgcaaaaactctctattctatttctacatttaatattactagtactactctgcgtccatcctctcaccaccgtagccgaccgcaattccaccgattggtgcgacaaaactccataccctgatccatgcaaatgctacttcaagaaccacaacggatttcaacagccgacacaattatccgagttccgagtaatgctggtggaagcagccatggatcgggccatatccgcccgtgccgagttgactaattccggcaagaactgcacggatagcaagaaacaagcagttttggcggattgcattgacctctatggagacacgatcatgcagttaaaccggacattgcatggcgtgtctcctaaagccggtgccgcgaaaagttgcactgacttcgacgctcaaacgtggctgagcaccgcgcttacaaacaccgagacctgccgacgtggctcatccgatttaaacgtcacagacttcatcacacccatcgtttcaaacaccaaaatctcccacctcattagcaactgcttagccgtcaacggagccctcttgaccgctggaaacaaaggcaacaccactgctaatcaaaagggctttccgacgtggctttcccgtaaagataagagactcctgcgtgccgttcgagccaacctcgtggtggccaaggacggatcaggacatttcaacacggtacaagcggctattgacgtggcgggacggagaaaggtgacgtcagggaggttcgttatatacgtaaaaagaggtatatatcaagaaaacattaacgtacgtctaaataatgatgacataatgttggtcggagatggaatgagatccaccattatcaccggcggtcgaagtgtccaaggaggttacaccacgtacaattccgctactgccggtatcgagggacttcacttcattgccaaaggcataacgtttaggaacacagctggtccagccaagggccaggccgtggcacttcgttcatcgtctgacctctcaatcttctacaaatgctcaatcgaaggataccaagatacactgatggtccattctcaacgccagttttaccgtgagtgttacatctatggaaccgtcgatttcatattcggtaacgcggctgctgttttccaaaactgtctcatcctccctcgccggccactcaaaggtcaagccaatgtaattaccgcacaaggtcgtgctgatccgtttcagaacacagggatctctatccataactcaagaatcctaccggctcctgatctaaaaccagtggtcggtaccgttaagacgtacatgggccggccttggatgaagttctcacgaaccgtggttcttcagacgtatttggataatgttgtgagtccagtcgggtggtctccgtggattgaaggttcggtgtttggtctggacactctcttctatgcagaatataagaatactggaccagcttcatccacgaggtggcgtgtcagttggaaagggtttcatgtgttgggtagagcttccgatgcatctgctttcactgttggaaagtttatcgctggtacagcatggctcccacgcaccggcatacccttcacttctggactctaa

SEQ ID NO: 90089 - protein, 536 aa, Arabidopsis thaliana
  peptide (1)..(536): Ceres Seq. ID no. 12722146
MNMMMQKLSILFLHLILLVLLCVHPLTTVADRNSTDWCDKTPYPDPCKCYFKNHNGFQQPTQLSEFRVMLVEAAMDRAISARAELTNSGKNCTDSKKQAVLADCIDLYGDTIMQLNRTLHGVSPKAGAAKSCTDFDAQTWLSTALTNTETCRRGSSDLNVTDFITPIVSNTKISHLISNCLAVNGALLTAGNKGNTTANQKGFPTWLSRKDKRLLRAVRANLVVAKDGSGHFNTVQAAIDVAGRRKVTSGRFVIYVKRGIYQENINVRLNNDDIMLVGDGMRSTIITGGRSVQGGYTTYNSATAGIEGLHFIAKGITFRNTAGPAKGQAVALRSSSDLSIFYKCSIEGYQDTLMVHSQRQFYRECYIYGTVDFIFGNAAAVFQNCLILPRRPLKGQANVITAQGRADPFQNTGISIHNSRILPAPDLKPVVGTVKTYMGRPWMKFSRTVVLQTYLDNVVSPVGWSPWIEGSVFGLDTLFYAEYKNTGPASSTRWRVSWKGFHVLGRASDASAFTVGKFIAGTAWLPRTGIPFTSGL

SEQ ID NO: 90090 - protein, 534 aa, Arabidopsis thaliana
  peptide (1)..(534): Ceres Seq. ID no. 12722147
MMMQKLSILFLHLILLVLLCVHPLTTVADRNSTDWCDKTPYPDPCKCYFKNHNGFQQPTQLSEFRVMLVEAAMDRAISARAELTNSGKNCTDSKKQAVLADCIDLYGDTIMQLNRTLHGVSPKAGAAKSCTDFDAQTWLSTALTNTETCRRGSSDLNVTDFITPIVSNTKISHLISNCLAVNGALLTAGNKGNTTANQKGFPTWLSRKDKRLLRAVRANLVVAKDGSGHFNTVQAAIDVAGRRKVTSGRFVIYVKRGIYQENINVRLNNDDIMLVGDGMRSTIITGGRSVQGGYTTYNSATAGIEGLHFIAKGITFRNTAGPAKGQAVALRSSSDLSIFYKCSIEGYQDTLMVHSQRQFYRECYIYGTVDFIFGNAAAVFQNCLILPRRPLKGQANVITAQGRADPFQNTGISIHNSRILPAPDLKPVVGTVKTYMGRPWMKFSRTVVLQTYLDNVVSPVGWSPWIEGSVFGLDTLFYAEYKNTGPASSTRWRVSWKGFHVLGRASDASAFTVGKFIAGTAWLPRTGIPFTSGL

SEQ ID NO: 90091 - protein, 533 aa, Arabidopsis thaliana
  peptide (1)..(533): Ceres Seq. ID no. 12722148
MMQKLSILFLHLILLVLLCVHPLTTVADRNSTDWCDKTPYPDPCKCYFKNHNGFQQPTQLSEFRVMLVEAAMDRAISARAELTNSGKNCTDSKKQAVLADCIDLYGDTIMQLNRTLHGVSPKAGAAKSCTDFDAQTWLSTALTNTETCRRGSSDLNVTDFITPIVSNTKISHLISNCLAVNGALLTAGNKGNTTANQKGFPTWLSRKDKRLLRAVRANLVVAKDGSGHFNTVQAAIDVAGRRKVTSGRFVIYVKRGIYQENINVRLNNDDIMLVGDGMRSTIITGGRSVQGGYTTYNSATAGIEGLHFIAKGITFRNTAGPAKGQAVALRSSSDLSIFYKCSIEGYQDTLMVHSQRQFYRECYIYGTVDFIFGNAAAVFQNCLILPRRPLKGQANVITAQGRADPFQNTGISIHNSRILPAPDLKPVVGTVKTYMGRPWMKFSRTVVLQTYLDNVVSPVGWSPWIEGSVFGLDTLFYAEYKNTGPASSTRWRVSWKGFHVLGRASDASAFTVGKFIAGTAWLPRTGIPFTSGL

SEQ ID NO: 90092 - DNA, 1623 bp, Arabidopsis thaliana
  misc_feature (1)..(1623): Ceres Seq. ID no. 12722149
  misc_feature (1)..(1623): Ortholog of  Ceres SEQ ID NO 13594037 as cited in SEQ ID NO 55666
  misc_feature (1)..(1623): Ortholog of  Ceres SEQ ID NO 13657707 as cited in SEQ ID NO 66407
atgaatatcatgatggtgcaaaatatctcttttctatctctacatttactattaatattactactctgcctccgtcctcttaccaccgtagccgacggcaattctaccaacattgacgggtggtgcgacaaaactccatacccatatccatgcaaacgctacttcataaaacacagcggttttcgactgccaacacaaatatccgagttccgagtacttctcgtggaagcagccatggatcgggccgtatccgcttgggacaaattgaccaattcaagcaagaactgcacagatttcaagaaacaagcagttttggcggattgcattaacctctatggagacactgtcatgcagctaaacagaacgctgcagggcgtgtcttcaaaaaccgggagaaggtgtactgacttcgacgctcaaacgtggctaagcaccgcgcttacaaacactgagacttgccgacgcggctcctccgatctcaacgtctcagatttcactacacctattgtttcaaacacaaaaatctctcacctcatcagcaactgcttagccgtcaacggagcccttttgaccgccggaaaaaatgacagcaccaccggtgattccaagggttttccaacgtgggtttcccgtaaagagaggagacttttgcaattgcaatcagtgcgtgcgaatcttgtagtggccaaagacggatcgggacatttcaagacggtgcaagcggctattgacgtggcgggacggagaaaggtgacgtcagggaggttcgttatatacgtaaaaagagggatatatcaagaaaaccttaacgtacgtctaaataatgataacataatgttggtcggagatggaatgagatataccattatcaccggtggtcgaagtgttaaaggaggttacaccacgtacagttctgccactgccggtatagagggacttcacttcatagcaaaaggcatagcgttccagaacacggcaggtccggcaaaaggccaggcagtggcactacggtcatcctcggacctctcaatcttctatagatgctccatcgaaggataccaagacacattgatggtccattcacaacgccagttttatcgcgagtgctacatctatggaactgtcgatttcatcttcggaaacgcggccgttgttttccaaaactgtatcatcctgcctcgcctgccactcaaaggtcaagccaatgtaataaccgcacaaggtcgtactgatctatttcagaacacagggatctctattcataactcaataatcatacccgctcctgacttaaaaccggtggtccgtagtgttaagacatatatgggtcgaccctggatgatgtactcccgcaccgtggttcttaagacgtacatcgatagtgttgtgagtcctgtcgggtggtctccgtggactaaaggttcgacgtatggtctcgacacgctgttctatgcggaatataagaatatcggaccggcttcatccacgaggtggcgtgtccgttggaaagggtttcatgtgttgagtaaagcttccgatgcatctgctttctctgttggaaaattcatcgctggtactgcgtggctcccaggctctggcatacccttcacttcagaactctaa

SEQ ID NO: 90093 - protein, 540 aa, Arabidopsis thaliana
  peptide (1)..(540): Ceres Seq. ID no. 12722150
MNIMMVQNISFLSLHLLLILLLCLRPLTTVADGNSTNIDGWCDKTPYPYPCKRYFIKHSGFRLPTQISEFRVLLVEAAMDRAVSAWDKLTNSSKNCTDFKKQAVLADCINLYGDTVMQLNRTLQGVSSKTGRRCTDFDAQTWLSTALTNTETCRRGSSDLNVSDFTTPIVSNTKISHLISNCLAVNGALLTAGKNDSTTGDSKGFPTWVSRKERRLLQLQSVRANLVVAKDGSGHFKTVQAAIDVAGRRKVTSGRFVIYVKRGIYQENLNVRLNNDNIMLVGDGMRYTIITGGRSVKGGYTTYSSATAGIEGLHFIAKGIAFQNTAGPAKGQAVALRSSSDLSIFYRCSIEGYQDTLMVHSQRQFYRECYIYGTVDFIFGNAAVVFQNCIILPRLPLKGQANVITAQGRTDLFQNTGISIHNSIIIPAPDLKPVVRSVKTYMGRPWMMYSRTVVLKTYIDSVVSPVGWSPWTKGSTYGLDTLFYAEYKNIGPASSTRWRVRWKGFHVLSKASDASAFSVGKFIAGTAWLPGSGIPFTSEL

SEQ ID NO: 90094 - protein, 537 aa, Arabidopsis thaliana
  peptide (1)..(537): Ceres Seq. ID no. 12722151
MMVQNISFLSLHLLLILLLCLRPLTTVADGNSTNIDGWCDKTPYPYPCKRYFIKHSGFRLPTQISEFRVLLVEAAMDRAVSAWDKLTNSSKNCTDFKKQAVLADCINLYGDTVMQLNRTLQGVSSKTGRRCTDFDAQTWLSTALTNTETCRRGSSDLNVSDFTTPIVSNTKISHLISNCLAVNGALLTAGKNDSTTGDSKGFPTWVSRKERRLLQLQSVRANLVVAKDGSGHFKTVQAAIDVAGRRKVTSGRFVIYVKRGIYQENLNVRLNNDNIMLVGDGMRYTIITGGRSVKGGYTTYSSATAGIEGLHFIAKGIAFQNTAGPAKGQAVALRSSSDLSIFYRCSIEGYQDTLMVHSQRQFYRECYIYGTVDFIFGNAAVVFQNCIILPRLPLKGQANVITAQGRTDLFQNTGISIHNSIIIPAPDLKPVVRSVKTYMGRPWMMYSRTVVLKTYIDSVVSPVGWSPWTKGSTYGLDTLFYAEYKNIGPASSTRWRVRWKGFHVLSKASDASAFSVGKFIAGTAWLPGSGIPFTSEL

SEQ ID NO: 90095 - protein, 536 aa, Arabidopsis thaliana
  peptide (1)..(536): Ceres Seq. ID no. 12722152
MVQNISFLSLHLLLILLLCLRPLTTVADGNSTNIDGWCDKTPYPYPCKRYFIKHSGFRLPTQISEFRVLLVEAAMDRAVSAWDKLTNSSKNCTDFKKQAVLADCINLYGDTVMQLNRTLQGVSSKTGRRCTDFDAQTWLSTALTNTETCRRGSSDLNVSDFTTPIVSNTKISHLISNCLAVNGALLTAGKNDSTTGDSKGFPTWVSRKERRLLQLQSVRANLVVAKDGSGHFKTVQAAIDVAGRRKVTSGRFVIYVKRGIYQENLNVRLNNDNIMLVGDGMRYTIITGGRSVKGGYTTYSSATAGIEGLHFIAKGIAFQNTAGPAKGQAVALRSSSDLSIFYRCSIEGYQDTLMVHSQRQFYRECYIYGTVDFIFGNAAVVFQNCIILPRLPLKGQANVITAQGRTDLFQNTGISIHNSIIIPAPDLKPVVRSVKTYMGRPWMMYSRTVVLKTYIDSVVSPVGWSPWTKGSTYGLDTLFYAEYKNIGPASSTRWRVRWKGFHVLSKASDASAFSVGKFIAGTAWLPGSGIPFTSEL

SEQ ID NO: 90096 - DNA, 1260 bp, Arabidopsis thaliana
  misc_feature (1)..(1260): Ceres Seq. ID no. 12722158
  misc_feature (1)..(1260): Ortholog of  Ceres SEQ ID NO 13595437 as cited in SEQ ID NO 56562
  misc_feature (1)..(1260): Ortholog of  Ceres SEQ ID NO 14315985 as cited in SEQ ID NO 57720
atggaggagagagaaggaactaacatcaacaacatcccaaccagttttggtctgaaacaacatgaaactcctcttcctcctcctggttacccaccacggtctgaaaaccctaatctttttccggtgggtcaatccagcacttcctccgccgccgccgcggtgaaaccttctgagaatgttgctcctccttttagcttaacaatgccggtggagaattcttcttctgagttgaagaagaagagagggagaccaagaaagtataaccctgacggctcactcgctgtgactctctctcctatgcctatctcatcctccgttccgttgacgtcggagtttggttctcggaaacgaggaagaggtcgaggaagaggcagaggaagaggacgaggacgtggacaaggacaaggaagcagagagcccaataacaacaacaacgacaacaattggctcaagaatcctcagatgttcgaatttaacaacaacactcctacttctggtggaggaggacctgctgaaattgtcagtccaagttttacacctcatgtgctcacagtaaatgccggtgaggatgtgacaatgaagataatgacattctctcaacaaggctcgcgtgctatttgtattctttcagcgaacggtcccatatccaatgttacacttcgtcaatctatgacatctggtggtactctcacttatgagggtcattttgagattctttctttgacgggttcgtttataccaagcgagagtggaggaacccgaagcagagctggtgggatgagtgtctctcttgcaggacaagatggtcgtgtctttggtggtggacttgctggtctctttattgccgctggtcctgttcaggtaatggtagggagttttatagcgggtcaggaggaatcgcagcagcagcagcagcagataaagaagcaaagaagggaaagactcgggatcccgacaacaacacaagcttctaatatctcattcggtggctcagcggaagatcctaaggctagatacgggctcaacaagcctgttgttattcagccaccaccggtgtctgcaccacctgtgtccttttcgcatgaaccaagtactaacaccgtccatggttactatgcaaataacacagctaaccatatcaaggatctcttctcttccctccctggagaagatagggaagaagatgaggatgatttagaaggtgaagatgatgaagaattcggaggccatagcgaatctgacaccgaggttccaagctga

SEQ ID NO: 90097 - protein, 419 aa, Arabidopsis thaliana
  peptide (1)..(419): Ceres Seq. ID no. 12722159
MEEREGTNINNIPTSFGLKQHETPLPPPGYPPRSENPNLFPVGQSSTSSAAAAVKPSENVAPPFSLTMPVENSSSELKKKRGRPRKYNPDGSLAVTLSPMPISSSVPLTSEFGSRKRGRGRGRGRGRGRGRGQGQGSREPNNNNNDNNWLKNPQMFEFNNNTPTSGGGGPAEIVSPSFTPHVLTVNAGEDVTMKIMTFSQQGSRAICILSANGPISNVTLRQSMTSGGTLTYEGHFEILSLTGSFIPSESGGTRSRAGGMSVSLAGQDGRVFGGGLAGLFIAAGPVQVMVGSFIAGQEESQQQQQQIKKQRRERLGIPTTTQASNISFGGSAEDPKARYGLNKPVVIQPPPVSAPPVSFSHEPSTNTVHGYYANNTANHIKDLFSSLPGEDREEDEDDLEGEDDEEFGGHSESDTEVPS

SEQ ID NO: 90098 - protein, 352 aa, Arabidopsis thaliana
  peptide (1)..(352): Ceres Seq. ID no. 12722160
MPVENSSSELKKKRGRPRKYNPDGSLAVTLSPMPISSSVPLTSEFGSRKRGRGRGRGRGRGRGRGQGQGSREPNNNNNDNNWLKNPQMFEFNNNTPTSGGGGPAEIVSPSFTPHVLTVNAGEDVTMKIMTFSQQGSRAICILSANGPISNVTLRQSMTSGGTLTYEGHFEILSLTGSFIPSESGGTRSRAGGMSVSLAGQDGRVFGGGLAGLFIAAGPVQVMVGSFIAGQEESQQQQQQIKKQRRERLGIPTTTQASNISFGGSAEDPKARYGLNKPVVIQPPPVSAPPVSFSHEPSTNTVHGYYANNTANHIKDLFSSLPGEDREEDEDDLEGEDDEEFGGHSESDTEVPS

SEQ ID NO: 90099 - protein, 320 aa, Arabidopsis thaliana
  peptide (1)..(320): Ceres Seq. ID no. 12722161
MPISSSVPLTSEFGSRKRGRGRGRGRGRGRGRGQGQGSREPNNNNNDNNWLKNPQMFEFNNNTPTSGGGGPAEIVSPSFTPHVLTVNAGEDVTMKIMTFSQQGSRAICILSANGPISNVTLRQSMTSGGTLTYEGHFEILSLTGSFIPSESGGTRSRAGGMSVSLAGQDGRVFGGGLAGLFIAAGPVQVMVGSFIAGQEESQQQQQQIKKQRRERLGIPTTTQASNISFGGSAEDPKARYGLNKPVVIQPPPVSAPPVSFSHEPSTNTVHGYYANNTANHIKDLFSSLPGEDREEDEDDLEGEDDEEFGGHSESDTEVPS

SEQ ID NO: 90100 - DNA, 1828 bp, Arabidopsis thaliana
  misc_feature (1)..(1828): Ceres Seq. ID no. 12722162
  misc_feature (1)..(1828): Ortholog of  Ceres SEQ ID NO 13659033 as cited in SEQ ID NO 66372
  misc_feature (1)..(1828): Ortholog of  Ceres SEQ ID NO 13655724 as cited in SEQ ID NO 68973
aaactcccagatcttgtcgatttatttattcctctccaaagcaaaagcttcttcgatcgtccttgtctcgttttcaattctaaatgttttgtgcagaaaaatcatgactttggcttctccacgagtttcaaattcaaagacgactgtgttgttgtttcctcgaaaagtttcttcaattgcatttgctattggtggattaacttctttcgtcatcttcgcttctctgcttcttttcacgtatcccattggttcctctgttactgactatttctacagaacagagaccactcaaaacgtccagtttcaccatagtatccatgatcctgatcgtaacccatctcctgtttctagctcagagtcaccaccagtattgacacaagatagtgatgataaagtgcttcccaagggatctcatgattcgaatgatgttagattaggtgaagaaacaaactcagggaagtcttcaaatgtttccattgatgaagaagctacacaagatcatgtagaaacagaatgtgatttatatcatggtaactggttttatgatccgatgggaccgttgtatacaaacaactcttgtcctcttttgacacagatgcaaaactgtcagggcaatggaagacctgacaaggggtatgaaaactggagatggaaaccgtctcagtgtgatcttccgcgttttgatgctaagaaatttcttgagctaatgagaggcaagacactagcttttataggcgattcagtagctcgtaatcagatggagtccatgatgtgtcttctttggcaggtagaaactccggttaaccgtgggaacaggaagatgcagagatggtatttcaggtcatcatcggtgatgatagctcggatgtggtcatcttggctggtccatcagttcaatgaaccgtttggttttgctacagatggtgtaactaaactcaagcttgaccaacccgatgagcgcataattgaagctcttccgaatttcgatgtggttgtactttcatcaggtcactggtttgcaaaacagtctgtctatattttaaatgaccagattgtgggaggccagttatggtggccagacaaatcaaaacccgaaaagattaacaacgtcgaagcatttgggatctctgtagaaacaatcataaaggcaatggctaaacacccaaactacacgggtctgaccatcttacgtacttggtcgcctgatcattatgaaggcggtgcgtggaacactggtggatcatgcacaggtaaagtagagccgcttcctcctgggaatttagttacaaacgggttcacagagataatgcacgagaagcaagcaacagggtttcaccgtgctgtcgcggatgataagctcgggaatagatcgaagaagctgaagctaatggatatcactgaggctttcgggtatcgccacgacggtcatcctggtccatacaggagtcctgacccgaaaaagatcacaaaacgtggaccagacggtcagcctcctccacaagactgtttgcattggtgcatgccagggccagtggacacatggaacgagatggttctggagattattaggagagattttgaaggcagacaaagttcaccatcatcttgatctaggagcaaaagatatatttatatatacgtacaagatcatttattcataccacggattagttgatttaaggatttctaaagtatattcattacacaatacacacacttgtaggtctctctttttttacgtacaatgtaacttaaagcaaacataagagttctattagattagttactcttttagatgaaagaatctttataatcataatttttgttt

SEQ ID NO: 90101 - protein, 535 aa, Arabidopsis thaliana
  peptide (1)..(535): Ceres Seq. ID no. 12722163
NSQILSIYLFLSKAKASSIVLVSFSILNVLCRKIMTLASPRVSNSKTTVLLFPRKVSSIAFAIGGLTSFVIFASLLLFTYPIGSSVTDYFYRTETTQNVQFHHSIHDPDRNPSPVSSSESPPVLTQDSDDKVLPKGSHDSNDVRLGEETNSGKSSNVSIDEEATQDHVETECDLYHGNWFYDPMGPLYTNNSCPLLTQMQNCQGNGRPDKGYENWRWKPSQCDLPRFDAKKFLELMRGKTLAFIGDSVARNQMESMMCLLWQVETPVNRGNRKMQRWYFRSSSVMIARMWSSWLVHQFNEPFGFATDGVTKLKLDQPDERIIEALPNFDVVVLSSGHWFAKQSVYILNDQIVGGQLWWPDKSKPEKINNVEAFGISVETIIKAMAKHPNYTGLTILRTWSPDHYEGGAWNTGGSCTGKVEPLPPGNLVTNGFTEIMHEKQATGFHRAVADDKLGNRSKKLKLMDITEAFGYRHDGHPGPYRSPDPKKITKRGPDGQPPPQDCLHWCMPGPVDTWNEMVLEIIRRDFEGRQSSPSS

SEQ ID NO: 90102 - protein, 501 aa, Arabidopsis thaliana
  peptide (1)..(501): Ceres Seq. ID no. 12722164
MTLASPRVSNSKTTVLLFPRKVSSIAFAIGGLTSFVIFASLLLFTYPIGSSVTDYFYRTETTQNVQFHHSIHDPDRNPSPVSSSESPPVLTQDSDDKVLPKGSHDSNDVRLGEETNSGKSSNVSIDEEATQDHVETECDLYHGNWFYDPMGPLYTNNSCPLLTQMQNCQGNGRPDKGYENWRWKPSQCDLPRFDAKKFLELMRGKTLAFIGDSVARNQMESMMCLLWQVETPVNRGNRKMQRWYFRSSSVMIARMWSSWLVHQFNEPFGFATDGVTKLKLDQPDERIIEALPNFDVVVLSSGHWFAKQSVYILNDQIVGGQLWWPDKSKPEKINNVEAFGISVETIIKAMAKHPNYTGLTILRTWSPDHYEGGAWNTGGSCTGKVEPLPPGNLVTNGFTEIMHEKQATGFHRAVADDKLGNRSKKLKLMDITEAFGYRHDGHPGPYRSPDPKKITKRGPDGQPPPQDCLHWCMPGPVDTWNEMVLEIIRRDFEGRQSSPSS

SEQ ID NO: 90103 - protein, 352 aa, Arabidopsis thaliana
  peptide (1)..(352): Ceres Seq. ID no. 12722165
MGPLYTNNSCPLLTQMQNCQGNGRPDKGYENWRWKPSQCDLPRFDAKKFLELMRGKTLAFIGDSVARNQMESMMCLLWQVETPVNRGNRKMQRWYFRSSSVMIARMWSSWLVHQFNEPFGFATDGVTKLKLDQPDERIIEALPNFDVVVLSSGHWFAKQSVYILNDQIVGGQLWWPDKSKPEKINNVEAFGISVETIIKAMAKHPNYTGLTILRTWSPDHYEGGAWNTGGSCTGKVEPLPPGNLVTNGFTEIMHEKQATGFHRAVADDKLGNRSKKLKLMDITEAFGYRHDGHPGPYRSPDPKKITKRGPDGQPPPQDCLHWCMPGPVDTWNEMVLEIIRRDFEGRQSSPSS

SEQ ID NO: 90104 - DNA, 1425 bp, Arabidopsis thaliana
  misc_feature (1)..(1425): Ceres Seq. ID no. 12722173
  misc_feature (1)..(1425): Ortholog of  Ceres SEQ ID NO 15168429 as cited in SEQ ID NO 57818
atggctctcgaaacttttctaataaaactcaaaaacgctatttcctccaaaccaacttctcgtcgaccacaccgatcatctcctccgatatcaaccaccacttcctccgtcggagtattatcgttcgaagtagcacgtgtcatgaccaaactcctacatctcactcactctctcaccgattccaatctcctcactcctcgagaccactctctttccttagaaggtctaaccaaaatcgtcaacggcgacgaaacattccacctcagcctcgtttgtgctgagctcgcagatagtctcgcccacgcagctaactctgtttcaagactgagcaaccgctgcaccacggccagcctccgttctttccaccgcttattccatgaatttgccgacatgggtcgtgaccctcatggatgggtcatgaactgtaaagacacagaagctaaaaacaagaaaatcgaaagatacgtgagcgtgacgacagctttgtatagagagatggaagaaatggcgatattagagaactctctacgaaaacaaagtttacagattgggatcgaattcgaagaagaagaagactacgagaacaagaaagatgttatgaaagtgatagatctacagaacaagattgagagacagaaacaacatgtcaagtatctaaaagacagatctctctggaacaaaagcttcgacactgtcgtgttgattctcgccagatcggtattcacagcactcgctagactcaaatccgtcttctcctccgccgcagccactgggtacatggttccgaccgtcgtgtcttctctccctcgttctctctcttcttcttcttcctctatgaatcttgttcaccctagcccaaacgacgaagagagagacaagacgacgacgtcttctgcgtttcttgaagaaagctcaagactattgaaaccaccggagacaactctcggcggagctggcgtggcgcttcactacgcgaatctgatagtagtaatggagaagatgataaagcaacctcagcttgtaggtcttgacgcgagagacgatctgtattcaatgttaccggcaagtgtgagatcgtcacttaggtcaaggctaaaaggagttggtttcacggcgacggacggtggtttagcgacggagtggaaggcggctttaggtcggatcttacggtggttgttaccattggcgcagaatatgattaggtggcagagtgagagaagctttgagcagcaacacatggcgacggcaacgaatagtcagaacagagtgatgttagttcaaacactagtgtttgcagataaagttaagacagaagcagccataacagagcttcttgttgggttgaattacatctggagattcgaaagagagatgactgcgaaagctctgtttaatctacagtgtcctcctactaattacagctaa

SEQ ID NO: 90105 - protein, 474 aa, Arabidopsis thaliana
  peptide (1)..(474): Ceres Seq. ID no. 12722174
MALETFLIKLKNAISSKPTSRRPHRSSPPISTTTSSVGVLSFEVARVMTKLLHLTHSLTDSNLLTPRDHSLSLEGLTKIVNGDETFHLSLVCAELADSLAHAANSVSRLSNRCTTASLRSFHRLFHEFADMGRDPHGWVMNCKDTEAKNKKIERYVSVTTALYREMEEMAILENSLRKQSLQIGIEFEEEEDYENKKDVMKVIDLQNKIERQKQHVKYLKDRSLWNKSFDTVVLILARSVFTALARLKSVFSSAAATGYMVPTVVSSLPRSLSSSSSSMNLVHPSPNDEERDKTTTSSAFLEESSRLLKPPETTLGGAGVALHYANLIVVMEKMIKQPQLVGLDARDDLYSMLPASVRSSLRSRLKGVGFTATDGGLATEWKAALGRILRWLLPLAQNMIRWQSERSFEQQHMATATNSQNRVMLVQTLVFADKVKTEAAITELLVGLNYIWRFEREMTAKALFNLQCPPTNYS

SEQ ID NO: 90106 - protein, 427 aa, Arabidopsis thaliana
  peptide (1)..(427): Ceres Seq. ID no. 12722175
MTKLLHLTHSLTDSNLLTPRDHSLSLEGLTKIVNGDETFHLSLVCAELADSLAHAANSVSRLSNRCTTASLRSFHRLFHEFADMGRDPHGWVMNCKDTEAKNKKIERYVSVTTALYREMEEMAILENSLRKQSLQIGIEFEEEEDYENKKDVMKVIDLQNKIERQKQHVKYLKDRSLWNKSFDTVVLILARSVFTALARLKSVFSSAAATGYMVPTVVSSLPRSLSSSSSSMNLVHPSPNDEERDKTTTSSAFLEESSRLLKPPETTLGGAGVALHYANLIVVMEKMIKQPQLVGLDARDDLYSMLPASVRSSLRSRLKGVGFTATDGGLATEWKAALGRILRWLLPLAQNMIRWQSERSFEQQHMATATNSQNRVMLVQTLVFADKVKTEAAITELLVGLNYIWRFEREMTAKALFNLQCPPTNYS

SEQ ID NO: 90107 - protein, 344 aa, Arabidopsis thaliana
  peptide (1)..(344): Ceres Seq. ID no. 12722176
MGRDPHGWVMNCKDTEAKNKKIERYVSVTTALYREMEEMAILENSLRKQSLQIGIEFEEEEDYENKKDVMKVIDLQNKIERQKQHVKYLKDRSLWNKSFDTVVLILARSVFTALARLKSVFSSAAATGYMVPTVVSSLPRSLSSSSSSMNLVHPSPNDEERDKTTTSSAFLEESSRLLKPPETTLGGAGVALHYANLIVVMEKMIKQPQLVGLDARDDLYSMLPASVRSSLRSRLKGVGFTATDGGLATEWKAALGRILRWLLPLAQNMIRWQSERSFEQQHMATATNSQNRVMLVQTLVFADKVKTEAAITELLVGLNYIWRFEREMTAKALFNLQCPPTNYS

SEQ ID NO: 90108 - DNA, 1251 bp, Arabidopsis thaliana
  misc_feature (1)..(1251): Ceres Seq. ID no. 12722181
  misc_feature (1)..(1251): Ortholog of  Ceres SEQ ID NO 12587035 as cited in SEQ ID NO 63605
  misc_feature (1)..(1251): Ortholog of  Ceres SEQ ID NO 14302836 as cited in SEQ ID NO 65013
  misc_feature (1)..(1251): Ortholog of  Ceres SEQ ID NO 13599119 as cited in SEQ ID NO 0
atgactgaaatctacagaacaatttcaaccggacgtggagacgacgtttctccgactaaatgccgtgaacgtcgtcgtcggagaattgagatgcggagacaagcggcggttttcggcgaacctagttcgtctaggaatcgtgatcggacggacatggaagtttactcaagttttgacgttccattgaggaaacaagctcggaggtcagagatcggtggtcttccggcggatatcgggggctttttggcacctccggcggcatcttcttgccaaaaatcggaagcgccggtgtggaagggagaagaaacggaggatgagccgttgtacggtatagtttcggttatgggaagatctcgtaagatggaggattcggttactgttaaaccgaatttgtgcaaaccggaagttaaccggcaaagaccggttcatttctttgcggtatacgatggccacggcggttctcaggtgtcaacattgtgcagcacgactatgcacacgtttgtcaaggaggagctagagcaaaacctcgaagaggaggaagaaggaagcgaaaacgatgtcgtggagaggaaatggcggggcgtgatgaaacggagtttcaagaggatggatgagatggcaacgagtacatgcgtgtgtgggactagtgtgccgttgtgtaactgtgatccgagggaggctgcgatttcgggttcaacggcggtcactgcggttttgacgcacgatcatattattgtagccaatactggtgactcacgtgcggtgttgtgtcgaaatggaatggctattcctctgagtaacgatcacaagccggatagaccagacgagcgtgcgaggattgaagcagctggtggtcgagttttagtagtggatggagctagagttgaaggaattctagccacgtccagagccataggggacaggtatctaaaaccaatggtagcatgggaaccagaagtaacattcatgagaagggaatctggagatgaatgcttagtattagcaagcgatgggctttgggatgtactctcgagtcagctagcttgtgacatagctaggttttgtctccgcgaagaaactccctcgagccttgatttaaatagaatggctcaagaagacgacaatgacggagaacaaaatccttcaaggagtgtattggctgcaacgttgctaacgcggttggctttgggtagacaaagcagtgataatataagtgtggtcgtcattgatctcaagaatagctctcagtaa

SEQ ID NO: 90109 - protein, 416 aa, Arabidopsis thaliana
  peptide (1)..(416): Ceres Seq. ID no. 12722182
MTEIYRTISTGRGDDVSPTKCRERRRRRIEMRRQAAVFGEPSSSRNRDRTDMEVYSSFDVPLRKQARRSEIGGLPADIGGFLAPPAASSCQKSEAPVWKGEETEDEPLYGIVSVMGRSRKMEDSVTVKPNLCKPEVNRQRPVHFFAVYDGHGGSQVSTLCSTTMHTFVKEELEQNLEEEEEGSENDVVERKWRGVMKRSFKRMDEMATSTCVCGTSVPLCNCDPREAAISGSTAVTAVLTHDHIIVANTGDSRAVLCRNGMAIPLSNDHKPDRPDERARIEAAGGRVLVVDGARVEGILATSRAIGDRYLKPMVAWEPEVTFMRRESGDECLVLASDGLWDVLSSQLACDIARFCLREETPSSLDLNRMAQEDDNDGEQNPSRSVLAATLLTRLALGRQSSDNISVVVIDLKNSSQ

SEQ ID NO: 90110 - protein, 386 aa, Arabidopsis thaliana
  peptide (1)..(386): Ceres Seq. ID no. 12722183
MRRQAAVFGEPSSSRNRDRTDMEVYSSFDVPLRKQARRSEIGGLPADIGGFLAPPAASSCQKSEAPVWKGEETEDEPLYGIVSVMGRSRKMEDSVTVKPNLCKPEVNRQRPVHFFAVYDGHGGSQVSTLCSTTMHTFVKEELEQNLEEEEEGSENDVVERKWRGVMKRSFKRMDEMATSTCVCGTSVPLCNCDPREAAISGSTAVTAVLTHDHIIVANTGDSRAVLCRNGMAIPLSNDHKPDRPDERARIEAAGGRVLVVDGARVEGILATSRAIGDRYLKPMVAWEPEVTFMRRESGDECLVLASDGLWDVLSSQLACDIARFCLREETPSSLDLNRMAQEDDNDGEQNPSRSVLAATLLTRLALGRQSSDNISVVVIDLKNSSQ

SEQ ID NO: 90111 - protein, 365 aa, Arabidopsis thaliana
  peptide (1)..(365): Ceres Seq. ID no. 12722184
MEVYSSFDVPLRKQARRSEIGGLPADIGGFLAPPAASSCQKSEAPVWKGEETEDEPLYGIVSVMGRSRKMEDSVTVKPNLCKPEVNRQRPVHFFAVYDGHGGSQVSTLCSTTMHTFVKEELEQNLEEEEEGSENDVVERKWRGVMKRSFKRMDEMATSTCVCGTSVPLCNCDPREAAISGSTAVTAVLTHDHIIVANTGDSRAVLCRNGMAIPLSNDHKPDRPDERARIEAAGGRVLVVDGARVEGILATSRAIGDRYLKPMVAWEPEVTFMRRESGDECLVLASDGLWDVLSSQLACDIARFCLREETPSSLDLNRMAQEDDNDGEQNPSRSVLAATLLTRLALGRQSSDNISVVVIDLKNSSQ

SEQ ID NO: 90112 - DNA, 1965 bp, Arabidopsis thaliana
  misc_feature (1)..(1965): Ceres Seq. ID no. 12722185
  misc_feature (1)..(1965): Ortholog of  Ceres SEQ ID NO 13654989 as cited in SEQ ID NO 63117
  misc_feature (1)..(1965): Ortholog of  Ceres SEQ ID NO 13655640 as cited in SEQ ID NO 63844
atgccgtcacgaacactcccgtcgccggcaccggtaaattcaccgttctcttcctccgtcacacctcaccatgaaacaaccaccacacgcatcttccctcctcttgcagctgtaggtttctctctcttcataactctctccatctgtttctgcaaattcaaccgcaaacgccgatctcccgccgccgtagcctcctcctctacaccgccgcagaaacaaccgttacacgagttctcctactcatctctccgtaaagccaccgcttctttctcaccggagaatcgactaggtcaaggcggattcggctctgtattccgtggaactttatctccttcctccggtggtggtaatgtcgccgttaaagtaatggattcaggttctcttcaaggagaaagagagtttcaaaacgagcttttcttcgctggtaagcttgattctcctcatgtagtttccgttattggcttctctcgacgacgacgaagccgtttgattcttgtatacgagcttatggatattggaaatcttcaagatgctcttcttcatcgtagatctcctgagcttatgatatggaatcgaagatttctcgttgcgattgatatagctaaagggattgaacatttacatagcttgaatccttgtgtgattcatggagatttgaaacctagtaatgtattgttggatcgattcttctctgctaagatctctgattttggtttagctaggttgaaatctgaacatgttgaagttaaagtagtgtctgagagtgatgtagtggaagattatggttctgtagttgaagaagttgagagtgttgttactaatactactggttgtgatgaatctaactttggattcactgatcagtctccggtgcctctttcatcgccggagatggtggagcaggtgcctatgacgtcaccggagacagttgtatcggtttctccggagatgggggagaaaggaagtgtgttggaggttggtaatgtggtgaggagtaaagattggtggtggaagcaagaagggaatgttggaagagggaaagggaaggagtatgtgatgcaatggattggttctgaggtgaaggaagagagacagagtagtgattggattgctgagacggcggaaggcggtaagaaagttgagaagaagaagagtagtaagagattagaatggtggctttcgttggatgaagagaaggagaaggggaagaagaagaagcggagaatggtgagagagtggtggaaagatgagtataggaaagagcttgctaagagaatgaagaagaagaagaagaagaaaactttggagtctgagttttatagtgatgatgtgagtggaagtgtggatcaaaggcggcacggggatggagaagtgtataggaagaaaagaagaggtgttagtagtaacagtataggtagtagcatagactggtggttagatgggctaagcggtgaacaatggagagcacggcgtagaaacagtcaagattcagttaagagttgcggagtcagtagcacgccgagcatgagagggacgatgtgctatgttgctcctgagtgttgtggtaataacatagatgatgtgtctgaaaaatctgatgtgtatagctatggagttttgttgttagtcctggtttcaggacggcggccgctggaagtaactggacccgcgtctgagatcatgctgcgtgcaaatctcatgtcgtgggcgaggaagctggcgagaagagggagactcggtgatctggtggatgaaaagctgcagttgttagaccaagaacaagcggttttgtgcattaaggtggctttgcaatgtctgcaaaaatcaccggtttcacgaccttcaatgaaagatgttttagaaatgcttacaggagcgataagcccaccggatttgcctacagaattctcaccatcaccgcagactcggttcccgttcaaggcacgaaggaagcagaatcgatag

SEQ ID NO: 90113 - protein, 654 aa, Arabidopsis thaliana
  peptide (1)..(654): Ceres Seq. ID no. 12722186
MPSRTLPSPAPVNSPFSSSVTPHHETTTTRIFPPLAAVGFSLFITLSICFCKFNRKRRSPAAVASSSTPPQKQPLHEFSYSSLRKATASFSPENRLGQGGFGSVFRGTLSPSSGGGNVAVKVMDSGSLQGEREFQNELFFAGKLDSPHVVSVIGFSRRRRSRLILVYELMDIGNLQDALLHRRSPELMIWNRRFLVAIDIAKGIEHLHSLNPCVIHGDLKPSNVLLDRFFSAKISDFGLARLKSEHVEVKVVSESDVVEDYGSVVEEVESVVTNTTGCDESNFGFTDQSPVPLSSPEMVEQVPMTSPETVVSVSPEMGEKGSVLEVGNVVRSKDWWWKQEGNVGRGKGKEYVMQWIGSEVKEERQSSDWIAETAEGGKKVEKKKSSKRLEWWLSLDEEKEKGKKKKRRMVREWWKDEYRKELAKRMKKKKKKKTLESEFYSDDVSGSVDQRRHGDGEVYRKKRRGVSSNSIGSSIDWWLDGLSGEQWRARRRNSQDSVKSCGVSSTPSMRGTMCYVAPECCGNNIDDVSEKSDVYSYGVLLLVLVSGRRPLEVTGPASEIMLRANLMSWARKLARRGRLGDLVDEKLQLLDQEQAVLCIKVALQCLQKSPVSRPSMKDVLEMLTGAISPPDLPTEFSPSPQTRFPFKARRKQNR

SEQ ID NO: 90114 - protein, 532 aa, Arabidopsis thaliana
  peptide (1)..(532): Ceres Seq. ID no. 12722187
MDSGSLQGEREFQNELFFAGKLDSPHVVSVIGFSRRRRSRLILVYELMDIGNLQDALLHRRSPELMIWNRRFLVAIDIAKGIEHLHSLNPCVIHGDLKPSNVLLDRFFSAKISDFGLARLKSEHVEVKVVSESDVVEDYGSVVEEVESVVTNTTGCDESNFGFTDQSPVPLSSPEMVEQVPMTSPETVVSVSPEMGEKGSVLEVGNVVRSKDWWWKQEGNVGRGKGKEYVMQWIGSEVKEERQSSDWIAETAEGGKKVEKKKSSKRLEWWLSLDEEKEKGKKKKRRMVREWWKDEYRKELAKRMKKKKKKKTLESEFYSDDVSGSVDQRRHGDGEVYRKKRRGVSSNSIGSSIDWWLDGLSGEQWRARRRNSQDSVKSCGVSSTPSMRGTMCYVAPECCGNNIDDVSEKSDVYSYGVLLLVLVSGRRPLEVTGPASEIMLRANLMSWARKLARRGRLGDLVDEKLQLLDQEQAVLCIKVALQCLQKSPVSRPSMKDVLEMLTGAISPPDLPTEFSPSPQTRFPFKARRKQNR

SEQ ID NO: 90115 - protein, 485 aa, Arabidopsis thaliana
  peptide (1)..(485): Ceres Seq. ID no. 12722188
MDIGNLQDALLHRRSPELMIWNRRFLVAIDIAKGIEHLHSLNPCVIHGDLKPSNVLLDRFFSAKISDFGLARLKSEHVEVKVVSESDVVEDYGSVVEEVESVVTNTTGCDESNFGFTDQSPVPLSSPEMVEQVPMTSPETVVSVSPEMGEKGSVLEVGNVVRSKDWWWKQEGNVGRGKGKEYVMQWIGSEVKEERQSSDWIAETAEGGKKVEKKKSSKRLEWWLSLDEEKEKGKKKKRRMVREWWKDEYRKELAKRMKKKKKKKTLESEFYSDDVSGSVDQRRHGDGEVYRKKRRGVSSNSIGSSIDWWLDGLSGEQWRARRRNSQDSVKSCGVSSTPSMRGTMCYVAPECCGNNIDDVSEKSDVYSYGVLLLVLVSGRRPLEVTGPASEIMLRANLMSWARKLARRGRLGDLVDEKLQLLDQEQAVLCIKVALQCLQKSPVSRPSMKDVLEMLTGAISPPDLPTEFSPSPQTRFPFKARRKQNR

SEQ ID NO: 90116 - DNA, 1938 bp, Arabidopsis thaliana
  misc_feature (1)..(1938): Ceres Seq. ID no. 12722213
  misc_feature (1)..(1938): Ortholog of  Ceres SEQ ID NO 14312408 as cited in SEQ ID NO 55042
gctctaatctaaatattaaagaatcaaacttaatctttcacccataatgggtttacaaatattatggttatttcgcaaaatattcatcatcacatacatcttccatgcctcgtgttctccagataaagctggctattacagttttatgaaagatgcaacattagcaccaatgttcgctcggtttgattacataatcatcggaggagggacttcgggttgcgcgttagccgcgacgctatctcaaaacgctagcgttttggttcttgaacgcggtggtgctccctacgacaatcctacggcaacagatatcgaaaactttgccaccacactctcaaacacatcaccgaaatcttggtcgcaactttttatctccgaggacggcgtttacaacactcgtgcacgcgtcctcggtggtggctccgtgttaaacgccgggttctacacacgtgcgggagatgagtacgtgaaggagactgagtggaagactgatgaagtggaagctgcttacgagtgggtcgagaagaaagtggcgtttcaaccgccggttctgggatggcaaacggcgtttaaagatgggcttttggaggctggtgagtttccttacaatggtttcacgtatgatcatatctatgggactaagatcggtggtacgatctttgaccgtgctggtcatagacacacggccgctgatttgttggaatatgctaatccgggcaacattgttgtctacttgcatgcctctgttcacaagatcctcttcaccaccaaaggaaggccaaggccaaaagcatacggagtgatatttcaagacgcgaacggagtgttacacaaggcagagttagagaagaattcaatgaacgaggtgattttgtccgcgggggcgattgggagcccgcaattgttgatgctgagcggcataggtcccgcagctcatctcgcggctcacgggattaaaccgttggtcttagatcatccgatggtagggcaaggtatgggagataatcccatgaatgccatatttattccttctcctacgcccgtggaggtttctctaatacaagtcgttggaatcacaaagtttgaaagttacatagaaggagcaagtggtgtaatcttctcatatagttggactcgtagatttttcgatggtgttttgaattatctcaacgagatgcagacaagccgtactactagtactacatctccaacactgtcgacccaatccatcacagattttttcaatcccatcaatcctctattgaatgctaccacgagagccggtttgatcctccagaaaatcgcgggaccgatctcgagaggtcatttagagcttaggaacacaaacccggatgataatccttcagtaaggttcaactattatcaagagccagaggatctacagatatgtgttgaagggatcaacaccattattaaagtgatcaactccaaggcattctccaaattcaagtacccggacgcgaccatacatggactactcgatctaatgctaagcgttcctaccaatctgaggccgcggcatataacctcgatgttcaatttaaggcagttttgcattgacactgtgatgacaatttggcactaccatggaggttgccaagttggaagagtggttgacaagaattacagagtcttaggcattgattccttaagggtcatcgatggatccacatttctcaagtctccggggactaatcctcaagctactgttatgatgctcggaaggtatatgggccaaaggattcttcaagagagggagatatacaacaaaccggataaagaagcgtgagatattacttgttttgagaaaatcttgatcttggaattgttttaatcaatgtatgattaacttaaagagtatgaatgtgtacatctgttcatgttctgtttctaatatgtataataatggtggaattatgg

SEQ ID NO: 90117 - protein, 586 aa, Arabidopsis thaliana
  peptide (1)..(586): Ceres Seq. ID no. 12722214
MGLQILWLFRKIFIITYIFHASCSPDKAGYYSFMKDATLAPMFARFDYIIIGGGTSGCALAATLSQNASVLVLERGGAPYDNPTATDIENFATTLSNTSPKSWSQLFISEDGVYNTRARVLGGGSVLNAGFYTRAGDEYVKETEWKTDEVEAAYEWVEKKVAFQPPVLGWQTAFKDGLLEAGEFPYNGFTYDHIYGTKIGGTIFDRAGHRHTAADLLEYANPGNIVVYLHASVHKILFTTKGRPRPKAYGVIFQDANGVLHKAELEKNSMNEVILSAGAIGSPQLLMLSGIGPAAHLAAHGIKPLVLDHPMVGQGMGDNPMNAIFIPSPTPVEVSLIQVVGITKFESYIEGASGVIFSYSWTRRFFDGVLNYLNEMQTSRTTSTTSPTLSTQSITDFFNPINPLLNATTRAGLILQKIAGPISRGHLELRNTNPDDNPSVRFNYYQEPEDLQICVEGINTIIKVINSKAFSKFKYPDATIHGLLDLMLSVPTNLRPRHITSMFNLRQFCIDTVMTIWHYHGGCQVGRVVDKNYRVLGIDSLRVIDGSTFLKSPGTNPQATVMMLGRYMGQRILQEREIYNKPDKEA

SEQ ID NO: 90118 - protein, 553 aa, Arabidopsis thaliana
  peptide (1)..(553): Ceres Seq. ID no. 12722215
MKDATLAPMFARFDYIIIGGGTSGCALAATLSQNASVLVLERGGAPYDNPTATDIENFATTLSNTSPKSWSQLFISEDGVYNTRARVLGGGSVLNAGFYTRAGDEYVKETEWKTDEVEAAYEWVEKKVAFQPPVLGWQTAFKDGLLEAGEFPYNGFTYDHIYGTKIGGTIFDRAGHRHTAADLLEYANPGNIVVYLHASVHKILFTTKGRPRPKAYGVIFQDANGVLHKAELEKNSMNEVILSAGAIGSPQLLMLSGIGPAAHLAAHGIKPLVLDHPMVGQGMGDNPMNAIFIPSPTPVEVSLIQVVGITKFESYIEGASGVIFSYSWTRRFFDGVLNYLNEMQTSRTTSTTSPTLSTQSITDFFNPINPLLNATTRAGLILQKIAGPISRGHLELRNTNPDDNPSVRFNYYQEPEDLQICVEGINTIIKVINSKAFSKFKYPDATIHGLLDLMLSVPTNLRPRHITSMFNLRQFCIDTVMTIWHYHGGCQVGRVVDKNYRVLGIDSLRVIDGSTFLKSPGTNPQATVMMLGRYMGQRILQEREIYNKPDKEA

SEQ ID NO: 90119 - protein, 545 aa, Arabidopsis thaliana
  peptide (1)..(545): Ceres Seq. ID no. 12722216
MFARFDYIIIGGGTSGCALAATLSQNASVLVLERGGAPYDNPTATDIENFATTLSNTSPKSWSQLFISEDGVYNTRARVLGGGSVLNAGFYTRAGDEYVKETEWKTDEVEAAYEWVEKKVAFQPPVLGWQTAFKDGLLEAGEFPYNGFTYDHIYGTKIGGTIFDRAGHRHTAADLLEYANPGNIVVYLHASVHKILFTTKGRPRPKAYGVIFQDANGVLHKAELEKNSMNEVILSAGAIGSPQLLMLSGIGPAAHLAAHGIKPLVLDHPMVGQGMGDNPMNAIFIPSPTPVEVSLIQVVGITKFESYIEGASGVIFSYSWTRRFFDGVLNYLNEMQTSRTTSTTSPTLSTQSITDFFNPINPLLNATTRAGLILQKIAGPISRGHLELRNTNPDDNPSVRFNYYQEPEDLQICVEGINTIIKVINSKAFSKFKYPDATIHGLLDLMLSVPTNLRPRHITSMFNLRQFCIDTVMTIWHYHGGCQVGRVVDKNYRVLGIDSLRVIDGSTFLKSPGTNPQATVMMLGRYMGQRILQEREIYNKPDKEA

SEQ ID NO: 90120 - DNA, 675 bp, Arabidopsis thaliana
  misc_feature (1)..(675): Ceres Seq. ID no. 12722221
  misc_feature (1)..(675): Ortholog of  Ceres SEQ ID NO 15175941 as cited in SEQ ID NO 1355
  misc_feature (1)..(675): Ortholog of  Ceres SEQ ID NO 13661642 as cited in SEQ ID NO 61598
atgaatccattttactctacattcccagactcgtttctctcaatctccgatcatagatctccggtttcagacagtagtgagtgttcaccaaagttagcttcaagttgtccaaagaaacgagctgggaggaagaagtttcgtgagacacgtcatccgatttacagaggagttcgtcagaggaattctggtaaatgggtttgtgaagttagagagcctaataagaaatctaggatttggttaggtacttttccgacggttgaaatggctgctcgtgctcatgatgttgctgctttagctcttcgtggtcgctctgcttgtctcaatttcgctgattctgcttggcggcttcgtattcctgagactacttgtcctaaggagattcagaaagctgcgtctgaagctgcaatggcgtttcagaatgagactacgacggagggatctaaaactgcggcggaggcagaggaggcggcaggggagggggtgagggagggggagaggagggcggaggagcagaatggtggtgtgttttatatggatgatgaggcgcttttggggatgcccaacttttttgagaatatggcggaggggatgcttttgccgccgccggaagttggctggaatcataacgactttgacggagtgggtgacgtgtcactctggagttttgacgagtaa

SEQ ID NO: 90121 - protein, 224 aa, Arabidopsis thaliana
  peptide (1)..(224): Ceres Seq. ID no. 12722222
MNPFYSTFPDSFLSISDHRSPVSDSSECSPKLASSCPKKRAGRKKFRETRHPIYRGVRQRNSGKWVCEVREPNKKSRIWLGTFPTVEMAARAHDVAALALRGRSACLNFADSAWRLRIPETTCPKEIQKAASEAAMAFQNETTTEGSKTAAEAEEAAGEGVREGERRAEEQNGGVFYMDDEALLGMPNFFENMAEGMLLPPPEVGWNHNDFDGVGDVSLWSFDE

SEQ ID NO: 90122 - protein, 137 aa, Arabidopsis thaliana
  peptide (1)..(137): Ceres Seq. ID no. 12722223
MAARAHDVAALALRGRSACLNFADSAWRLRIPETTCPKEIQKAASEAAMAFQNETTTEGSKTAAEAEEAAGEGVREGERRAEEQNGGVFYMDDEALLGMPNFFENMAEGMLLPPPEVGWNHNDFDGVGDVSLWSFDE

SEQ ID NO: 90123 - DNA, 777 bp, Arabidopsis thaliana
  misc_feature (1)..(777): Ceres Seq. ID no. 12722228
  misc_feature (1)..(777): Ortholog of  Ceres SEQ ID NO 13662654 as cited in SEQ ID NO 66150
atgtacacttcaagtgttggaggagaggttgaccaaaacttaaaatccggagagttgtcgttgaccgggactggctttctcggtgctgttggccggagtttagacttgggagggcaaactgcgttggcattgcgacttctattggcggttttctcttctaagttatcttctgttgctgaccgccctttcggggatgagtttcgtgctgctcggaaagcatctgaggaagttggtgcgcagctggttcttggagatcgacccatcgaaataactctccaaagggcttggaactctttgaaatggggagagaagtttaatctggtgatggctgtgactcgggtaatcacatcgtcatcgggtatatccgcagcggagcttaaggaacaagagaccgatgaaaacagtggaagtttgcagctttacgaacggctaagtttctcatacccggcactcctaatgcctcttatacacgaaagagatacctatcttgcttggtcattgaagagaagtaaggcagtgaatgggtgtaaaacagtggtgggagtgatcgggaaaggacacatgaatggtgtcatctacgcgttggtgtcagactctggggatctccggtttagagatttggtgggaagaggagattcatataatggtggtactggtactacatcgaacggttggattcaaaaggttttaaagagcttcgtaagagacacaattatagggttcttgctatgggagttatatgaacagtatctgatgatgaatcaaaacctttcatga

SEQ ID NO: 90124 - protein, 258 aa, Arabidopsis thaliana; identical to SEQ ID NO: 84911
  peptide (1)..(258): Ceres Seq. ID no. 12722229

SEQ ID NO: 90125 - protein, 150 aa, Arabidopsis thaliana
  peptide (1)..(150): Ceres Seq. ID no. 12722230
MAVTRVITSSSGISAAELKEQETDENSGSLQLYERLSFSYPALLMPLIHERDTYLAWSLKRSKAVNGCKTVVGVIGKGHMNGVIYALVSDSGDLRFRDLVGRGDSYNGGTGTTSNGWIQKVLKSFVRDTIIGFLLWELYEQYLMMNQNLS

SEQ ID NO: 90126 - DNA, 1209 bp, Arabidopsis thaliana
  misc_feature (1)..(1209): Ceres Seq. ID no. 12722247
  misc_feature (1)..(1209): Ortholog of  Ceres SEQ ID NO 13594604 as cited in SEQ ID NO 52106
agacaaagaacaaaagaatcgtaaatatgtcaaacccatctctttcatccatatattttctacttctccaccacatcaaacccaaatcttgaatacatacagatcaaagaaaaggaaagatcaaagagaaaatcatatatactatatcatctaatctttaccaatatatgggggcggcttcatcgagcatcgtccgatccgaaccttttgccggaaagttatgcggcctcgaagatgtgcctgagaactgtataacagcaatgttcatgtacatggagccaccggagatctgcctgcttgctagggtaaataaatcatttcatagggcgtcgagatccgatgccgtgtgggaagacaagcttcctagtaactacaagtttctggtccgaagaattcttgaagatcaacaacaagtaggagtaaaagacaaacttatttaccgcaagaaagagatctatgcaaggctttgccgaccaaacctcttcgacaccggcacaaaggaagcatggttggacaagagaagtgggaaagtgtttttggcgatatcaccaaaggcaatgaagataaccggcattgatgatcgccgatattgggaacatatttcttccgatgaatccagatttggatcaataacttatctccggcaaatatggtggttagaagcagttggaaaaatcagattcgaatttgcacccggaaaatacagtttacttttcaagatacaattaggcaaacctattagaaagtgtgggaggaaaacatgtagtttggaccaagttcatggctgggacatcaaaccggtccggtttcagttgtctacatcggatggccaatgcgctatgtcggaacgacatttggatgagtcggggaggtgggtttatcatcatgcgggtgacttcgtcgtagagaatcagaactcacccgtttgggtcaaattctctatgctccagatagattgtacacataccaaaggtggtttatgtttagattgtgtgatcatatgtccatttgagtatagagggaaatacaaatattccgattaaatgtttttagaggttctgttgatatgttagttttttttttggggggtcaaagatatgattttttttaggatatgtgtttttgtcaatacataaagtctgtattgattacgtaaaaatgtgaatttttttgcagatgcagttctagttgagaatgttaagatattgt

SEQ ID NO: 90127 - protein, 291 aa, Arabidopsis thaliana
  peptide (1)..(291): Ceres Seq. ID no. 12722248
MGAASSSIVRSEPFAGKLCGLEDVPENCITAMFMYMEPPEICLLARVNKSFHRASRSDAVWEDKLPSNYKFLVRRILEDQQQVGVKDKLIYRKKEIYARLCRPNLFDTGTKEAWLDKRSGKVFLAISPKAMKITGIDDRRYWEHISSDESRFGSITYLRQIWWLEAVGKIRFEFAPGKYSLLFKIQLGKPIRKCGRKTCSLDQVHGWDIKPVRFQLSTSDGQCAMSERHLDESGRWVYHHAGDFVVENQNSPVWVKFSMLQIDCTHTKGGLCLDCVIICPFEYRGKYKYSD

SEQ ID NO: 90128 - protein, 260 aa, Arabidopsis thaliana
  peptide (1)..(260): Ceres Seq. ID no. 12722249
MFMYMEPPEICLLARVNKSFHRASRSDAVWEDKLPSNYKFLVRRILEDQQQVGVKDKLIYRKKEIYARLCRPNLFDTGTKEAWLDKRSGKVFLAISPKAMKITGIDDRRYWEHISSDESRFGSITYLRQIWWLEAVGKIRFEFAPGKYSLLFKIQLGKPIRKCGRKTCSLDQVHGWDIKPVRFQLSTSDGQCAMSERHLDESGRWVYHHAGDFVVENQNSPVWVKFSMLQIDCTHTKGGLCLDCVIICPFEYRGKYKYSD

SEQ ID NO: 90129 - protein, 258 aa, Arabidopsis thaliana
  peptide (1)..(258): Ceres Seq. ID no. 12722250
MYMEPPEICLLARVNKSFHRASRSDAVWEDKLPSNYKFLVRRILEDQQQVGVKDKLIYRKKEIYARLCRPNLFDTGTKEAWLDKRSGKVFLAISPKAMKITGIDDRRYWEHISSDESRFGSITYLRQIWWLEAVGKIRFEFAPGKYSLLFKIQLGKPIRKCGRKTCSLDQVHGWDIKPVRFQLSTSDGQCAMSERHLDESGRWVYHHAGDFVVENQNSPVWVKFSMLQIDCTHTKGGLCLDCVIICPFEYRGKYKYSD

SEQ ID NO: 90130 - DNA, 858 bp, Arabidopsis thaliana
  misc_feature (1)..(858): Ceres Seq. ID no. 12722257
  misc_feature (1)..(858): Ortholog of  Ceres SEQ ID NO 14316404 as cited in SEQ ID NO 57641
  misc_feature (1)..(858): Ortholog of  Ceres SEQ ID NO 12611159 as cited in SEQ ID NO 59821
atgaccaaatctggagagagaccaaaacagagacagaggaaagggttatggtcacctgaagaagaccagaagctcaagagtttcatcctctctcgtggccatgcttgctggaccactgttcccatcctagctggattgcaaaggaatgggaaaagctgcagattaaggtggattaattacctaagaccaggactaaagagggggtcgtttagtgaagaagaagaagagaccatcttgactttacattcttccttgggtaacaagtggtctcggattgcaaaatatttaccgggaagaacagacaacgagattaagaactattggcattcctatctgaagaagagatggctcaaatctcaaccacaactcaaaagccaaatatcagacctcacagaatctccttcttcactactttcttgcgggaaaagaaatctggaaaccgaaaccctagatcacgtgatctccttccagaaattttcagagaatccaacttcatcaccatccaaagaaagcaacaacaacatgatcatgaacaacagtaataacttgcctaaactgttcttctctgagtggatcagttcttcaaatccacacatcgattactcctctgcttttacagattccaagcacattaatgaaactcaagatcaaatcaatgaagaggaagtgatgatgatcaataacaacaactactcttcacttgaggatgtcatgctccgtacagattttttgcagcctgatcatgaatatgcaaattattattcttctggagatttcttcatcaacagtgaccaaaattatgtctaagaagagtgaatatgatcgtaagaggaacataagctagttacttgtgttaca

SEQ ID NO: 90131 - protein, 268 aa, Arabidopsis thaliana
  peptide (1)..(268): Ceres Seq. ID no. 12722258
MTKSGERPKQRQRKGLWSPEEDQKLKSFILSRGHACWTTVPILAGLQRNGKSCRLRWINYLRPGLKRGSFSEEEEETILTLHSSLGNKWSRIAKYLPGRTDNEIKNYWHSYLKKRWLKSQPQLKSQISDLTESPSSLLSCGKRNLETETLDHVISFQKFSENPTSSPSKESNNNMIMNNSNNLPKLFFSEWISSSNPHIDYSSAFTDSKHINETQDQINEEEVMMINNNNYSSLEDVMLRTDFLQPDHEYANYYSSGDFFINSDQNYV

SEQ ID NO: 90132 - DNA, 1560 bp, Arabidopsis thaliana
  misc_feature (1)..(1560): Ceres Seq. ID no. 12722285
  misc_feature (1)..(1560): Ortholog of  Ceres SEQ ID NO 12614670 as cited in SEQ ID NO 68565
atggagttttttgagatgtctcgagtttggtacatattcttcaaagttttcgtcgtagttatttgcctcatgttcttgaagctctttctgcgttgttggatatggccagttcgagctcaaaagaagcttagaggaaacggatttgttggtccagctcctagttttccatttggaaaccttaatgacatgaagaaactgaaaatggcctcggttgtggtggataatagcaaatcttccaccatcatcaatcatgacatacactctattgcacttccacatttcgctcggtggcaacaagaatacgggaaagtatttgtgtactggctagggatagagccgttcgtgtacgtggccgatcctgaattcttgagtgttatgtcgaaaggggtattggggaagagttggggaaaaccaaatgtttttaagaaagacagagagccaatgtttggtaccggtttggttatggtcgaaggagatgattggacacgacatcgccacatcatcactcctgcatttgcccctcttaatcttaaggttatgacaaatatgatggtggaatcagtctccaatatgttggaccgatggggcatacaaataaactcgggtaatcccgaattcgacatggagagcgagatcataggaacagccggtgagattatcgccaagacaagcttcggtgtcacgggagaaaatggaactcaagtcctcaaaaacctaagagccgtgcaattcgctctcttcaactcaaatcgctacgtaggcgtgccattcagcaacattttgagttacaagcaaaccgttaaagcgaaggggctaggtcatgagatagatggtctccttttgtcgttcataaacaaacggaagatatctttggctgaaggagatgaccaaggccacgatcttctcggaatgttgcttaaggccgatcagaaagggaattttacggcgaaagagcttgtggacgaatgcaagacattcttcttcgctggccacgagacaacggctttagcactaacgtggacgtttatgcttcttgcgatccatcccgagtggcaagacacgatcagggaagagattagagaagtcatcggagattccaagattgagtataacaaacttgccggtctaaaaaagatgagttgggtaatgaacgaggttctccggctatatccaccggcaccgaacgcacaacgacaagcccgaaatgacattgaagtgaacggacgagtgattccaaacggaacaaacatttggattgatgtggtggcgatgcaccacgacgttgagttgtggggagatgacgttaacgagtttaagcctgagagattcgacggtaatttgcacggtggttgtaagaataaaatgggttacatgccgtttggattcggagggagaatgtgtatcggtcggaatttgaccaccatggagtacaagattgtcttgtcgttggttttgtcccggttcgaaatctcggtttcgcccggttatcgccattctccgacgtatatgctttctcttagaccgggttacggtttgcctctaattatacgaccactttag

SEQ ID NO: 90133 - protein, 519 aa, Arabidopsis thaliana
  peptide (1)..(519): Ceres Seq. ID no. 12722286
MEFFEMSRVWYIFFKVFVVVICLMFLKLFLRCWIWPVRAQKKLRGNGFVGPAPSFPFGNLNDMKKLKMASVVVDNSKSSTIINHDIHSIALPHFARWQQEYGKVFVYWLGIEPFVYVADPEFLSVMSKGVLGKSWGKPNVFKKDREPMFGTGLVMVEGDDWTRHRHIITPAFAPLNLKVMTNMMVESVSNMLDRWGIQINSGNPEFDMESEIIGTAGEIIAKTSFGVTGENGTQVLKNLRAVQFALFNSNRYVGVPFSNILSYKQTVKAKGLGHEIDGLLLSFINKRKISLAEGDDQGHDLLGMLLKADQKGNFTAKELVDECKTFFFAGHETTALALTWTFMLLAIHPEWQDTIREEIREVIGDSKIEYNKLAGLKKMSWVMNEVLRLYPPAPNAQRQARNDIEVNGRVIPNGTNIWIDVVAMHHDVELWGDDVNEFKPERFDGNLHGGCKNKMGYMPFGFGGRMCIGRNLTTMEYKIVLSLVLSRFEISVSPGYRHSPTYMLSLRPGYGLPLIIRPL

SEQ ID NO: 90134 - protein, 514 aa, Arabidopsis thaliana
  peptide (1)..(514): Ceres Seq. ID no. 12722287
MSRVWYIFFKVFVVVICLMFLKLFLRCWIWPVRAQKKLRGNGFVGPAPSFPFGNLNDMKKLKMASVVVDNSKSSTIINHDIHSIALPHFARWQQEYGKVFVYWLGIEPFVYVADPEFLSVMSKGVLGKSWGKPNVFKKDREPMFGTGLVMVEGDDWTRHRHIITPAFAPLNLKVMTNMMVESVSNMLDRWGIQINSGNPEFDMESEIIGTAGEIIAKTSFGVTGENGTQVLKNLRAVQFALFNSNRYVGVPFSNILSYKQTVKAKGLGHEIDGLLLSFINKRKISLAEGDDQGHDLLGMLLKADQKGNFTAKELVDECKTFFFAGHETTALALTWTFMLLAIHPEWQDTIREEIREVIGDSKIEYNKLAGLKKMSWVMNEVLRLYPPAPNAQRQARNDIEVNGRVIPNGTNIWIDVVAMHHDVELWGDDVNEFKPERFDGNLHGGCKNKMGYMPFGFGGRMCIGRNLTTMEYKIVLSLVLSRFEISVSPGYRHSPTYMLSLRPGYGLPLIIRPL

SEQ ID NO: 90135 - protein, 496 aa, Arabidopsis thaliana
  peptide (1)..(496): Ceres Seq. ID no. 12722288
MFLKLFLRCWIWPVRAQKKLRGNGFVGPAPSFPFGNLNDMKKLKMASVVVDNSKSSTIINHDIHSIALPHFARWQQEYGKVFVYWLGIEPFVYVADPEFLSVMSKGVLGKSWGKPNVFKKDREPMFGTGLVMVEGDDWTRHRHIITPAFAPLNLKVMTNMMVESVSNMLDRWGIQINSGNPEFDMESEIIGTAGEIIAKTSFGVTGENGTQVLKNLRAVQFALFNSNRYVGVPFSNILSYKQTVKAKGLGHEIDGLLLSFINKRKISLAEGDDQGHDLLGMLLKADQKGNFTAKELVDECKTFFFAGHETTALALTWTFMLLAIHPEWQDTIREEIREVIGDSKIEYNKLAGLKKMSWVMNEVLRLYPPAPNAQRQARNDIEVNGRVIPNGTNIWIDVVAMHHDVELWGDDVNEFKPERFDGNLHGGCKNKMGYMPFGFGGRMCIGRNLTTMEYKIVLSLVLSRFEISVSPGYRHSPTYMLSLRPGYGLPLIIRPL

SEQ ID NO: 90136 - DNA, 1018 bp, Arabidopsis thaliana
  misc_feature (1)..(1018): Ceres Seq. ID no. 12722293
  misc_feature (1)..(1018): Ortholog of  Ceres SEQ ID NO 13594503 as cited in SEQ ID NO 51336
  misc_feature (1)..(1018): Ortholog of  Ceres SEQ ID NO 13599595 as cited in SEQ ID NO 0
acattttcccgagaaaacaaaaaaaaaaaacttacaccaaaacgatgtctggaggtgtcggtccaacgtacaacgacataaccttacccaaagaagaagaagaagaacatcaaacccaatccacctcaacagtatcatccaccggaaaacccgccggattcttctcattccgacaactaaacatcctcgcaataatcatcgttctctccgcaagtggtctcgtaacaatccaagatttcatattcacgatcctcactctcatctacttcttcttcctctcgaaacttatcttcccaccacacaacaatccaaaccgtgacgctcctctcacaagctccacaaacaaaatcttccgtatctatgttacagcggcggggatcgtcgggcttatcattccgatctgttacatcttcgaaggaatcgttgaggatgataagaacggtgttagcgcagctgcaccgcacgtgtttcttttagcgagtcagatttttatggaaggattagcgaccatgtttggcttctctgctccggcgaggattcttgttccgattgtttacaacgccaggagggttttgactcttgtggagtggattatgagtgagttctcgagggaggatgtgacggggacggtttctgcgcggcggatgtatgccgggaaagttttggcggcggctaatttagggatttggtcgtttaatctctttggtgttttgattccggtttatctacccagagcgtttaagaggtattacggttctgataaggaggattgaaatcccggtttagttccggttccaataaggagagtcaaaacccggtttaattcctttgtggttcacagctcttgttgttttccctttttgttctgtatattatttcgatgttttcttttgaacaattcagtttatgtagtagttcacagttgtattagatttcttacgataataaccgaatctatgtttctgaaagaacagaaatgaaaatgttttagtaatgatatagaataagaccattcacg

SEQ ID NO: 90137 - protein, 256 aa, Arabidopsis thaliana
  peptide (1)..(256): Ceres Seq. ID no. 12722294
IFPRKQKKKTYTKTMSGGVGPTYNDITLPKEEEEEHQTQSTSTVSSTGKPAGFFSFRQLNILAIIIVLSASGLVTIQDFIFTILTLIYFFFLSKLIFPPHNNPNRDAPLTSSTNKIFRIYVTAAGIVGLIIPICYIFEGIVEDDKNGVSAAAPHVFLLASQIFMEGLATMFGFSAPARILVPIVYNARRVLTLVEWIMSEFSREDVTGTVSARRMYAGKVLAAANLGIWSFNLFGVLIPVYLPRAFKRYYGSDKED

SEQ ID NO: 90138 - protein, 242 aa, Arabidopsis thaliana
  peptide (1)..(242): Ceres Seq. ID no. 12722295
MSGGVGPTYNDITLPKEEEEEHQTQSTSTVSSTGKPAGFFSFRQLNILAIIIVLSASGLVTIQDFIFTILTLIYFFFLSKLIFPPHNNPNRDAPLTSSTNKIFRIYVTAAGIVGLIIPICYIFEGIVEDDKNGVSAAAPHVFLLASQIFMEGLATMFGFSAPARILVPIVYNARRVLTLVEWIMSEFSREDVTGTVSARRMYAGKVLAAANLGIWSFNLFGVLIPVYLPRAFKRYYGSDKED

SEQ ID NO: 90139 - DNA, 879 bp, Arabidopsis thaliana
  misc_feature (1)..(879): Ceres Seq. ID no. 12722305
  misc_feature (1)..(879): Ortholog of  Ceres SEQ ID NO 12582736 as cited in SEQ ID NO 51489
atgaaacctccccaaagaggacgtggtggtggtgttagaggtggaagaggtttagccagaggcggtgaaggaagtgccgtaagaggcagtggaagaggcggcgaaagtggccgtggaagagggcctggaagagttaaaagtgaatcggacggtggaattaagggaggaagcaaagtgttagtgacaccacacaggcacgcaggagtgtttgttgccaaaagtaaagcagatgctcttgtaaccaagaacttagttcctggtgaaatcatttacaatgagaagagaatctttgttcagaacgaagaccgatctactgttgaatacagagtttggaaccctcatagatctaagttagctgatgctattaccactggtgttgataacatttggatcaaacctggtgttaaagttctgtaccttggtgcttcttctggatacaccgtgtctcatgtctctgacattgttggtccagagggatgtgtttacgctgttgagcattctgatatttgtggtaaagttttgatgaacatggcggagaagagaactaatgttataccaatcattgaagatgctagacatcctgctaaatatagaatgcttgtgggaatggttgatatcatattctctgatgttaatcaccctgagcaagctaacatattaagtctcaatgcttcttatttcctcaaatctggagggcactttatgatctctataaaggcgaattctatagactcaacaattgcagcagaaactgtgtatcagatggaagtggagaagttacaaatggaagagttgagaccaacagagatattgcatcttgactcttgtgaggaaaagcatgcttgtgtttttggtggatatcgcttgcctaggaagtaa

SEQ ID NO: 90140 - protein, 292 aa, Arabidopsis thaliana
  peptide (1)..(292): Ceres Seq. ID no. 12722306
MKPPQRGRGGGVRGGRGLARGGEGSAVRGSGRGGESGRGRGPGRVKSESDGGIKGGSKVLVTPHRHAGVFVAKSKADALVTKNLVPGEIIYNEKRIFVQNEDRSTVEYRVWNPHRSKLADAITTGVDNIWIKPGVKVLYLGASSGYTVSHVSDIVGPEGCVYAVEHSDICGKVLMNMAEKRTNVIPIIEDARHPAKYRMLVGMVDIIFSDVNHPEQANILSLNASYFLKSGGHFMISIKANSIDSTIAAETVYQMEVEKLQMEELRPTEILHLDSCEEKHACVFGGYRLPRK

SEQ ID NO: 90141 - DNA, 1116 bp, Arabidopsis thaliana
  misc_feature (1)..(1116): Ceres Seq. ID no. 12722311
  misc_feature (1)..(1116): Ortholog of  Ceres SEQ ID NO 13659394 as cited in SEQ ID NO 67049
atggaaatcgcgacggcgatcgcggaagggaaaacagagatagcgacggagattttggcgcgtgtttctcaaacgcctaatcttgagaggaattcagaggagaagcttgttgatttcatggtggctgcgcttcgatcgaggatagcttctccagtgacggaattgtatgggaaggagcatttaatctcgactcaattgctctacgagctctctccttgtttcaaactcggtttcgaggccgcgaatctcgccattctcgacgccgccgataacaacgacggtggaatgatgataccgcacgttatcgatttcgatatcggagaaggtggacaatacgttaaccttctccgtacattatccacgcgccggaatggtaaaagtcagagtcagaattctccggtggttaagatcaccgccgtggcgaacaacgtttacggatgtttagtcgatgacggtggagaagagaggttaaaagccgtcggagatttgttgagccaactcggtgatcgactcggtatctccgtaagtttcaacgtggtgacgagtttacgactcggtgatctgaatcgtgaatctctcgggtgtgatcccgacgagactttggctgtgaacttagctttcaagctttatcgtgttcccgacgaaagcgtatgcacggagaatccaagagacgaacttctccggcgcgtgaagggacttaaaccgcgcgtggttactctagtggagcaagaaatgaattcgaatacggcgccgtttttagggagagtgagtgagtcatgcgcgtgttacggtgcgttgcttgagtcggtcgagtctacggttcctagtacgaattccgaccgtgccaaagttgaggaaggaattggccggaagctagtaaacgcggtggcgtgcgaaggaatcgatcgtatagagcggtgcgaggtgttcgggaaatggcgaatgcggatgagcatggctgggtttgagttaatgccattgagtgagaagatagcggagtcgatgaagagtcgtggaaaccgagtccacccgggctttaccgttaaagaagataacggaggtgtgtgctttggttggatgggacgggcactcactgtcgcatccgcttggcgttaa

SEQ ID NO: 90142 - protein, 371 aa, Arabidopsis thaliana
  peptide (1)..(371): Ceres Seq. ID no. 12722312
MEIATAIAEGKTEIATEILARVSQTPNLERNSEEKLVDFMVAALRSRIASPVTELYGKEHLISTQLLYELSPCFKLGFEAANLAILDAADNNDGGMMIPHVIDFDIGEGGQYVNLLRTLSTRRNGKSQSQNSPVVKITAVANNVYGCLVDDGGEERLKAVGDLLSQLGDRLGISVSFNVVTSLRLGDLNRESLGCDPDETLAVNLAFKLYRVPDESVCTENPRDELLRRVKGLKPRVVTLVEQEMNSNTAPFLGRVSESCACYGALLESVESTVPSTNSDRAKVEEGIGRKLVNAVACEGIDRIERCEVFGKWRMRMSMAGFELMPLSEKIAESMKSRGNRVHPGFTVKEDNGGVCFGWMGRALTVASAWR

SEQ ID NO: 90143 - protein, 332 aa, Arabidopsis thaliana
  peptide (1)..(332): Ceres Seq. ID no. 12722313
MVAALRSRIASPVTELYGKEHLISTQLLYELSPCFKLGFEAANLAILDAADNNDGGMMIPHVIDFDIGEGGQYVNLLRTLSTRRNGKSQSQNSPVVKITAVANNVYGCLVDDGGEERLKAVGDLLSQLGDRLGISVSFNVVTSLRLGDLNRESLGCDPDETLAVNLAFKLYRVPDESVCTENPRDELLRRVKGLKPRVVTLVEQEMNSNTAPFLGRVSESCACYGALLESVESTVPSTNSDRAKVEEGIGRKLVNAVACEGIDRIERCEVFGKWRMRMSMAGFELMPLSEKIAESMKSRGNRVHPGFTVKEDNGGVCFGWMGRALTVASAWR

SEQ ID NO: 90144 - protein, 276 aa, Arabidopsis thaliana
  peptide (1)..(276): Ceres Seq. ID no. 12722314
MMIPHVIDFDIGEGGQYVNLLRTLSTRRNGKSQSQNSPVVKITAVANNVYGCLVDDGGEERLKAVGDLLSQLGDRLGISVSFNVVTSLRLGDLNRESLGCDPDETLAVNLAFKLYRVPDESVCTENPRDELLRRVKGLKPRVVTLVEQEMNSNTAPFLGRVSESCACYGALLESVESTVPSTNSDRAKVEEGIGRKLVNAVACEGIDRIERCEVFGKWRMRMSMAGFELMPLSEKIAESMKSRGNRVHPGFTVKEDNGGVCFGWMGRALTVASAWR

SEQ ID NO: 90145 - DNA, 1767 bp, Arabidopsis thaliana
  misc_feature (1)..(1767): Ceres Seq. ID no. 12722327
  misc_feature (1)..(1767): Ortholog of  Ceres SEQ ID NO 12586556 as cited in SEQ ID NO 64667
  misc_feature (1)..(1767): Ortholog of  Ceres SEQ ID NO 13660894 as cited in SEQ ID NO 67475
atggctctgaattcttcagctttcttcgttccatgtcacaattacaatcaaatctgtgatcttcttctttcttcagctcgaaccagatcaactattaaaggacttcagcttcatggctatgtcgttaaatcaggcctttctcttatccctctcgtcgctaacaacctcattaatttctactccaaatcacagcttccgtttgattctcgtcgagcttttgaagatagcccacaaaaaagttcgacgacttggagttcaatcatctcttgttttgcccagaacgagcttccatggatgtcactcgagtttcttaaaaaaatgatggcgggaaaccttagacctgatgatcatgttcttccatcagctacaaagtcgtgtgcgattttgagtcgttgtgatattggtagatcagttcattgtctatcgatgaagactgggtatgatgctgatgtgtttgtggggagttctttggttgatatgtatgcgaaatgtggagaaattgtttatgcgaggaagatgttcgacgaaatgcctcagagaaatgttgttacttggagtgggatgatgtatgggtatgcacaaatgggtgaaaatgaggaagctttgtggttgtttaaagaagctttgtttgagaatctcgctgttaatgattactcgttttcgagtgttattagtgtttgtgcaaattcgactctacttgagttaggtagacagattcatggattgagtattaagtctagctttgattcttctagctttgtgggaagttctttagtctcgttgtattcaaagtgtggtgttcctgaaggagcttatcaagtttttaacgaggtgcctgtgaagaatctcgggatttggaacgctatgctcaaggcgtatgcgcaacattcacatactcaaaaggttattgaattgttcaaaaggatgaagctttctggaatgaaaccaaatttcataacttttttgaatgtgctcaatgcttgtagtcacgcgggtctagttgatgaagggagatactactttgatcagatgaaagaatcgaggattgagccgacggataagcattacgcttccttggtggatatgttaggacgagctggtagattacaagaagcacttgaagttatcactaatatgccgattgatcccacggaatctgtatggggagctttattaacgagttgtacagtccacaagaacacagagcttgcagcatttgcagcagacaaggtcttcgaattaggaccagtgagttccggtatgcacatttcgttatccaatgcttatgcagccgatggtagattcgaagacgcagctaaagctagaaaattgcttcgagaccgaggggaaaagaaggaaacagggctaagttgggttgaagaaaggaacaaggttcatacatttgcagctggagaaagacgtcatgagaaaagcaaggagatatatgagaagctggctgagttaggggaagagatggagaaagcgggttacattgcagacacaagctatgttctgagagaagtggatggtgacgagaagaatcaaaccataaggtatcatagtgagagattagctattgcttttggactgatcacgtttccagctgatagaccgatccgagtaatgaagaatctgcgtgtttgcggtgattgccataacgcgatcaagttcatgtccgtatgtacgagacgagtgatcattgtgagagataataatcggtttcatcggtttgaagatggcaagtgttcttgtaatgactattggtga

SEQ ID NO: 90146 - protein, 588 aa, Arabidopsis thaliana
  peptide (1)..(588): Ceres Seq. ID no. 12722328
MALNSSAFFVPCHNYNQICDLLLSSARTRSTIKGLQLHGYVVKSGLSLIPLVANNLINFYSKSQLPFDSRRAFEDSPQKSSTTWSSIISCFAQNELPWMSLEFLKKMMAGNLRPDDHVLPSATKSCAILSRCDIGRSVHCLSMKTGYDADVFVGSSLVDMYAKCGEIVYARKMFDEMPQRNVVTWSGMMYGYAQMGENEEALWLFKEALFENLAVNDYSFSSVISVCANSTLLELGRQIHGLSIKSSFDSSSFVGSSLVSLYSKCGVPEGAYQVFNEVPVKNLGIWNAMLKAYAQHSHTQKVIELFKRMKLSGMKPNFITFLNVLNACSHAGLVDEGRYYFDQMKESRIEPTDKHYASLVDMLGRAGRLQEALEVITNMPIDPTESVWGALLTSCTVHKNTELAAFAADKVFELGPVSSGMHISLSNAYAADGRFEDAAKARKLLRDRGEKKETGLSWVEERNKVHTFAAGERRHEKSKEIYEKLAELGEEMEKAGYIADTSYVLREVDGDEKNQTIRYHSERLAIAFGLITFPADRPIRVMKNLRVCGDCHNAIKFMSVCTRRVIIVRDNNRFHRFEDGKCSCNDYW

SEQ ID NO: 90147 - protein, 490 aa, Arabidopsis thaliana
  peptide (1)..(490): Ceres Seq. ID no. 12722329
MSLEFLKKMMAGNLRPDDHVLPSATKSCAILSRCDIGRSVHCLSMKTGYDADVFVGSSLVDMYAKCGEIVYARKMFDEMPQRNVVTWSGMMYGYAQMGENEEALWLFKEALFENLAVNDYSFSSVISVCANSTLLELGRQIHGLSIKSSFDSSSFVGSSLVSLYSKCGVPEGAYQVFNEVPVKNLGIWNAMLKAYAQHSHTQKVIELFKRMKLSGMKPNFITFLNVLNACSHAGLVDEGRYYFDQMKESRIEPTDKHYASLVDMLGRAGRLQEALEVITNMPIDPTESVWGALLTSCTVHKNTELAAFAADKVFELGPVSSGMHISLSNAYAADGRFEDAAKARKLLRDRGEKKETGLSWVEERNKVHTFAAGERRHEKSKEIYEKLAELGEEMEKAGYIADTSYVLREVDGDEKNQTIRYHSERLAIAFGLITFPADRPIRVMKNLRVCGDCHNAIKFMSVCTRRVIIVRDNNRFHRFEDGKCSCNDYW

SEQ ID NO: 90148 - protein, 482 aa, Arabidopsis thaliana
  peptide (1)..(482): Ceres Seq. ID no. 12722330
MMAGNLRPDDHVLPSATKSCAILSRCDIGRSVHCLSMKTGYDADVFVGSSLVDMYAKCGEIVYARKMFDEMPQRNVVTWSGMMYGYAQMGENEEALWLFKEALFENLAVNDYSFSSVISVCANSTLLELGRQIHGLSIKSSFDSSSFVGSSLVSLYSKCGVPEGAYQVFNEVPVKNLGIWNAMLKAYAQHSHTQKVIELFKRMKLSGMKPNFITFLNVLNACSHAGLVDEGRYYFDQMKESRIEPTDKHYASLVDMLGRAGRLQEALEVITNMPIDPTESVWGALLTSCTVHKNTELAAFAADKVFELGPVSSGMHISLSNAYAADGRFEDAAKARKLLRDRGEKKETGLSWVEERNKVHTFAAGERRHEKSKEIYEKLAELGEEMEKAGYIADTSYVLREVDGDEKNQTIRYHSERLAIAFGLITFPADRPIRVMKNLRVCGDCHNAIKFMSVCTRRVIIVRDNNRFHRFEDGKCSCNDYW

SEQ ID NO: 90149 - DNA, 2682 bp, Arabidopsis thaliana
  misc_feature (1)..(2682): Ceres Seq. ID no. 12722353
  misc_feature (1)..(2682): Ortholog of  Ceres SEQ ID NO 12586556 as cited in SEQ ID NO 64667
  misc_feature (1)..(2682): Ortholog of  Ceres SEQ ID NO 13660894 as cited in SEQ ID NO 67475
atgacgagcaaagtagtagcagcagcagcttctgcatttctctctcgcactaacgaattgggtaatcttcaaaaatcatgtattcggattctctccttctgcgaatcgaattcatcacgtattggtttacacatccactgcccagtaataaagtttggtcttttagagaatctcgacttatgcaacaatcttttgagtctttacttaaaaaccgatggtatatggaatgcacgtaaactgttcgatgaaatgtctcacagaactgttttcgcatggacagttatgatctctgcttttaccaagagccaagagtttgcatcagcgctttcgttgtttgaggaaatgatggcttcgggaacacacccgaacgaattcactttttcctcggtggtaagatcttgtgctggtttaagagatattagttacggaggtcgagttcatggctctgttataaagactgggtttgagggaaactcagttgttggaagcagcttgagtgatttgtattctaagtgtgggcagtttaaggaagcttgtgagctatttagttctcttcagaacgcggatactatctcgtggacgatgatgatatcttctttagtgggagctcgtaaatggagagaagcgttgcagttttactctgagatggttaaagctggtgttcctcctaacgagttcacatttgttaagcttttaggtgcctcttcctttctcggtttggagtttggtaaaacgattcatagcaacataattgtcaggggaattccgctgaatgtggtattgaagacatctctcgttgatttctactcgcagttttctaaaatggaggatgctgtgagggtgttgaattcgagtggagaacaagacgtgtttctttggacgtctgtggtatcagggtttgtaaggaacttgagagccaaggaagctgttggcacgtttcttgagatgcgaagtttgggtttgcaaccaaataacttcacatactctgcaatcttgagcttgtgttctgctgttcgttcgctggattttgggaaacagattcactcacagacaattaaggttggcttcgaggatagcactgatgttggaaatgcacttgtagatatgtatatgaagtgctcggcatcagaagtagaagcttcgagagtctttggagcaatggtttcaccaaacgtcgtctcttggacaacgttaatcttaggtcttgttgatcacgggttcgtgcaagattgttttggactgctgatggagatggtaaaacgagaggtagaacccaatgttgttaccctatccggtgttctccgagcctgtagcaaattgagacatgtaaggcgggtattagagattcatgcatatctactcagaagacacgtagatggtgaaatggtagtagggaattcacttgtcgatgcatatgccagctcgaggaaggtggattatgcctggaatgtgattaggtcgatgaaaaggagggataatatcacatacacgagcttggtaacaaggtttaatgagttgggcaagcatgaaatggcactgagtgtcatcaattatatgtatggtgatggaatcagaatggatcagttaagcttacccgggtttatctcagcttcagccaacttgggcgctcttgaaactgggaaacatcttcattgttactccgtgaaatccgggttttctggtgcggcttcggttttaaatagtctcgttgacatgtatagtaaatgtggtagcttggaagatgcaaagaaagtttttgaagaaatagctacgcctgatgtggtttcttggaacgggttggtatctggtttggcatcaaacggttttatttcatctgctctatctgcatttgaggagatgaggatgaaagaaaccgagcccgattcagtaacgttcctgatattgctctctgcttgtagtaatggaagattgactgacttgggccttgagtatttccaagtaatgaaaaagatttataacattgagccacaggtagagcactatgttcatctagttggtatcttaggtcgtgctggacggctagaggaagcaacaggagttgtagagacaatgcatttaaaaccaaatgctatgatcttcaaaacgttgttgagagcttgtagataccgtggaaatctgtctttaggagaagatatggctaacaaaggcttagcacttgcaccatctgatccagccttgtacattcttttggctgacctatacgacgaatctggaaaaccagagttagctcaaaagactcgaaatttgatgactgagaagcgcttgagtaaaaagctaggcaagagcactgtggaggttcaaggaaaagttcacagctttgtcagtgaggatgttactagagtggataaaacgaatgggatttacgcagagatagaatcgataaaggaagagatcaaaaggtttggttcaccatacagaggtaatgaaaacgcaagctttcacagtgcaaaacaagctgttgtgtatggttttatctatgcgtcaccagaagccccggttcatgttgttaagaacaaaattctgtgtaaggactgccatgagttcgtgtccatcttgactcggttagtcgataagaaaataactgtaagagatgggaatcaggttcatatctttaagaatggcgaatgttcttgcaaaagggaagaaacatcatttgtttaa

SEQ ID NO: 90150 - protein, 893 aa, Arabidopsis thaliana
  peptide (1)..(893): Ceres Seq. ID no. 12722354
MTSKVVAAAASAFLSRTNELGNLQKSCIRILSFCESNSSRIGLHIHCPVIKFGLLENLDLCNNLLSLYLKTDGIWNARKLFDEMSHRTVFAWTVMISAFTKSQEFASALSLFEEMMASGTHPNEFTFSSVVRSCAGLRDISYGGRVHGSVIKTGFEGNSVVGSSLSDLYSKCGQFKEACELFSSLQNADTISWTMMISSLVGARKWREALQFYSEMVKAGVPPNEFTFVKLLGASSFLGLEFGKTIHSNIIVRGIPLNVVLKTSLVDFYSQFSKMEDAVRVLNSSGEQDVFLWTSVVSGFVRNLRAKEAVGTFLEMRSLGLQPNNFTYSAILSLCSAVRSLDFGKQIHSQTIKVGFEDSTDVGNALVDMYMKCSASEVEASRVFGAMVSPNVVSWTTLILGLVDHGFVQDCFGLLMEMVKREVEPNVVTLSGVLRACSKLRHVRRVLEIHAYLLRRHVDGEMVVGNSLVDAYASSRKVDYAWNVIRSMKRRDNITYTSLVTRFNELGKHEMALSVINYMYGDGIRMDQLSLPGFISASANLGALETGKHLHCYSVKSGFSGAASVLNSLVDMYSKCGSLEDAKKVFEEIATPDVVSWNGLVSGLASNGFISSALSAFEEMRMKETEPDSVTFLILLSACSNGRLTDLGLEYFQVMKKIYNIEPQVEHYVHLVGILGRAGRLEEATGVVETMHLKPNAMIFKTLLRACRYRGNLSLGEDMANKGLALAPSDPALYILLADLYDESGKPELAQKTRNLMTEKRLSKKLGKSTVEVQGKVHSFVSEDVTRVDKTNGIYAEIESIKEEIKRFGSPYRGNENASFHSAKQAVVYGFIYASPEAPVHVVKNKILCKDCHEFVSILTRLVDKKITVRDGNQVHIFKNGECSCKREETSFV

SEQ ID NO: 90151 - protein, 810 aa, Arabidopsis thaliana
  peptide (1)..(810): Ceres Seq. ID no. 12722355
MSHRTVFAWTVMISAFTKSQEFASALSLFEEMMASGTHPNEFTFSSVVRSCAGLRDISYGGRVHGSVIKTGFEGNSVVGSSLSDLYSKCGQFKEACELFSSLQNADTISWTMMISSLVGARKWREALQFYSEMVKAGVPPNEFTFVKLLGASSFLGLEFGKTIHSNIIVRGIPLNVVLKTSLVDFYSQFSKMEDAVRVLNSSGEQDVFLWTSVVSGFVRNLRAKEAVGTFLEMRSLGLQPNNFTYSAILSLCSAVRSLDFGKQIHSQTIKVGFEDSTDVGNALVDMYMKCSASEVEASRVFGAMVSPNVVSWTTLILGLVDHGFVQDCFGLLMEMVKREVEPNVVTLSGVLRACSKLRHVRRVLEIHAYLLRRHVDGEMVVGNSLVDAYASSRKVDYAWNVIRSMKRRDNITYTSLVTRFNELGKHEMALSVINYMYGDGIRMDQLSLPGFISASANLGALETGKHLHCYSVKSGFSGAASVLNSLVDMYSKCGSLEDAKKVFEEIATPDVVSWNGLVSGLASNGFISSALSAFEEMRMKETEPDSVTFLILLSACSNGRLTDLGLEYFQVMKKIYNIEPQVEHYVHLVGILGRAGRLEEATGVVETMHLKPNAMIFKTLLRACRYRGNLSLGEDMANKGLALAPSDPALYILLADLYDESGKPELAQKTRNLMTEKRLSKKLGKSTVEVQGKVHSFVSEDVTRVDKTNGIYAEIESIKEEIKRFGSPYRGNENASFHSAKQAVVYGFIYASPEAPVHVVKNKILCKDCHEFVSILTRLVDKKITVRDGNQVHIFKNGECSCKREETSFV

SEQ ID NO: 90152 - protein, 799 aa, Arabidopsis thaliana
  peptide (1)..(799): Ceres Seq. ID no. 12722356
MISAFTKSQEFASALSLFEEMMASGTHPNEFTFSSVVRSCAGLRDISYGGRVHGSVIKTGFEGNSVVGSSLSDLYSKCGQFKEACELFSSLQNADTISWTMMISSLVGARKWREALQFYSEMVKAGVPPNEFTFVKLLGASSFLGLEFGKTIHSNIIVRGIPLNVVLKTSLVDFYSQFSKMEDAVRVLNSSGEQDVFLWTSVVSGFVRNLRAKEAVGTFLEMRSLGLQPNNFTYSAILSLCSAVRSLDFGKQIHSQTIKVGFEDSTDVGNALVDMYMKCSASEVEASRVFGAMVSPNVVSWTTLILGLVDHGFVQDCFGLLMEMVKREVEPNVVTLSGVLRACSKLRHVRRVLEIHAYLLRRHVDGEMVVGNSLVDAYASSRKVDYAWNVIRSMKRRDNITYTSLVTRFNELGKHEMALSVINYMYGDGIRMDQLSLPGFISASANLGALETGKHLHCYSVKSGFSGAASVLNSLVDMYSKCGSLEDAKKVFEEIATPDVVSWNGLVSGLASNGFISSALSAFEEMRMKETEPDSVTFLILLSACSNGRLTDLGLEYFQVMKKIYNIEPQVEHYVHLVGILGRAGRLEEATGVVETMHLKPNAMIFKTLLRACRYRGNLSLGEDMANKGLALAPSDPALYILLADLYDESGKPELAQKTRNLMTEKRLSKKLGKSTVEVQGKVHSFVSEDVTRVDKTNGIYAEIESIKEEIKRFGSPYRGNENASFHSAKQAVVYGFIYASPEAPVHVVKNKILCKDCHEFVSILTRLVDKKITVRDGNQVHIFKNGECSCKREETSFV

SEQ ID NO: 90153 - DNA, 2616 bp, Arabidopsis thaliana
  misc_feature (1)..(2616): Ceres Seq. ID no. 12722373
  misc_feature (1)..(2616): Ortholog of  Ceres SEQ ID NO 14313674 as cited in SEQ ID NO 59602
ggaaactccttccccgtcctctctgtcctctgataaaggcttcactttcatcattcaatctcttcttcttctttcttcttcatcactctctctctttctccaatttcttcattttatcagcttcctctcttctttagtttctgggtcactttagtttcgctctttccgaggaaaaacaaaacaaagatttgatttttctttttggtgggtttaaacagtgatttcttcttttgcccttttattggttcttattgttctcctcaaaagtctacaggattgtcggaagcaaacacacttgtccatgttcgggttatgaatttccctctaattggtgaagaagacacatgaagcagtgaaatctctgtttgtattgaatcttattagtctcaaactatgaatttccgacaagagaagtttgtaaggtttcaagattggaagtcggataagacttcctccgacgtggaatattccggtaaaaacgagattcaaactggaatattccagagaacaataagctcaatctccgacaagttttacagaagctttgaatcaagctctgcaaggatcaaactattcaaaagatcttacaagtcttactcttttaaagaagctgtttcaaaagggattggttctactcacaaaattcttgacccacaaggaccttttcttcagagatggaacaagatctttgttttagcttgtatcatcgctgtctcgcttgaccctttgttcttctacgtgcctatcatcgatgatgctaagaaatgtcttggtattgacaagaaaatggaaataacagcaagcgttttgcgctctttcactgatgttttttatgtccttcacatcattttccagttccgtactggctttatcgctccttcgtctcgtgtttttgggagaggtgttcttgttgaggacaagcgagagatcgctaaacgttacttgtcctcacatttcataattgacattcttgctgttcttccgcttccgcagatggtgattttgataatcattccacatatgagaggttcatcgtctttgaacacgaagaatatgttgaagtttattgttttcttccaatatataccgaggtttataagaatatatccgctctacaaggaagttacaagaacttcaggcatactcactgagacagcttgggctggagctgctttcaatctcttcctctacatgcttgctagtcatgtgtttggtgctttctggtatttgttctcaatcgaacgcgaaacggtgtgctggaaacaagcttgtgagaggaataaccctccgtgcatttcgaagttgttgtactgtgaccctgaaactgcaggaggcaatgctttcctcaatgagtcttgtccgattcagacaccaaacacaacactcttcgactttgggatattccttgacgcacttcaatccggtgtagtggaatctcaagatttccctcaaaagtttttttactgtttctggtggggtctgcagaacctcagttcgctcggtcagaaccttaaaacaagtacatatatttgggaaatctgtttcgcggtgttcatttctattgcggggctggttttgttctccttcttgattggaaatatgcagacgtatctgcaatccactaccacgagattggaggagatgagggtaaagagaagagacgcagaacaatggatgtcacaccgtttgctacctgagaacttgagaaaaagaatccggcgatacgagcagtacaaatggcaagagacaagaggtgttgacgaagagaatcttcttagtaatcttcccaaagatcttagacgcgacatcaaacgtcatctctgtctcgcccttctcatgcgggtccccatgtttgagaaaatggacgaacagcttcttgatgcgctctgtgaccgtttgcaacctgtgttatacacagaggaaagctacatagtaagagaaggagatccggtagacgaaatgctcttcataatgcgcgggaagcttctaacaatcacaacaaacggtggaagaaccggttttttaaattccgagtatcttggagccggtgatttctgtggtgaggagcttttaacctgggctttagacccacactcatcctcaaacctcccaatctcaacaagaactgttcgagctctcatggaagttgaagctttcgcacttaaagctgatgacctcaaattcgtggcttcccagttcagacgtcttcacagcaaacagctaagacatactttcaggtactactcacaacaatggaagacttgggccgcttgcttcatacaagccgcttggagaagatacattaagaagaaactcgaagagtctcttaaagaagaagagaatcggttgcaggatgctttggctaaagaagcttgtggaagttccccaagcctcggtgctacaatatacgcatcacggtttgctgcaaatatcttgcgcacaatacgtaggagcggatcagtaaggaaaccaaggatgccggaacgaatgccacctatgctacttcagaaaccagcagagccagatttcaacagtgatgattaattaattagcatatatgtatatgaaagattttattgcgaaccatagagccaatatataaatataagtcttttt

SEQ ID NO: 90154 - protein, 716 aa, Arabidopsis thaliana
  peptide (1)..(716): Ceres Seq. ID no. 12722374
MNFRQEKFVRFQDWKSDKTSSDVEYSGKNEIQTGIFQRTISSISDKFYRSFESSSARIKLFKRSYKSYSFKEAVSKGIGSTHKILDPQGPFLQRWNKIFVLACIIAVSLDPLFFYVPIIDDAKKCLGIDKKMEITASVLRSFTDVFYVLHIIFQFRTGFIAPSSRVFGRGVLVEDKREIAKRYLSSHFIIDILAVLPLPQMVILIIIPHMRGSSSLNTKNMLKFIVFFQYIPRFIRIYPLYKEVTRTSGILTETAWAGAAFNLFLYMLASHVFGAFWYLFSIERETVCWKQACERNNPPCISKLLYCDPETAGGNAFLNESCPIQTPNTTLFDFGIFLDALQSGVVESQDFPQKFFYCFWWGLQNLSSLGQNLKTSTYIWEICFAVFISIAGLVLFSFLIGNMQTYLQSTTTRLEEMRVKRRDAEQWMSHRLLPENLRKRIRRYEQYKWQETRGVDEENLLSNLPKDLRRDIKRHLCLALLMRVPMFEKMDEQLLDALCDRLQPVLYTEESYIVREGDPVDEMLFIMRGKLLTITTNGGRTGFLNSEYLGAGDFCGEELLTWALDPHSSSNLPISTRTVRALMEVEAFALKADDLKFVASQFRRLHSKQLRHTFRYYSQQWKTWAACFIQAAWRRYIKKKLEESLKEEENRLQDALAKEACGSSPSLGATIYASRFAANILRTIRRSGSVRKPRMPERMPPMLLQKPAEPDFNSDD

SEQ ID NO: 90155 - protein, 585 aa, Arabidopsis thaliana
  peptide (1)..(585): Ceres Seq. ID no. 12722375
MEITASVLRSFTDVFYVLHIIFQFRTGFIAPSSRVFGRGVLVEDKREIAKRYLSSHFIIDILAVLPLPQMVILIIIPHMRGSSSLNTKNMLKFIVFFQYIPRFIRIYPLYKEVTRTSGILTETAWAGAAFNLFLYMLASHVFGAFWYLFSIERETVCWKQACERNNPPCISKLLYCDPETAGGNAFLNESCPIQTPNTTLFDFGIFLDALQSGVVESQDFPQKFFYCFWWGLQNLSSLGQNLKTSTYIWEICFAVFISIAGLVLFSFLIGNMQTYLQSTTTRLEEMRVKRRDAEQWMSHRLLPENLRKRIRRYEQYKWQETRGVDEENLLSNLPKDLRRDIKRHLCLALLMRVPMFEKMDEQLLDALCDRLQPVLYTEESYIVREGDPVDEMLFIMRGKLLTITTNGGRTGFLNSEYLGAGDFCGEELLTWALDPHSSSNLPISTRTVRALMEVEAFALKADDLKFVASQFRRLHSKQLRHTFRYYSQQWKTWAACFIQAAWRRYIKKKLEESLKEEENRLQDALAKEACGSSPSLGATIYASRFAANILRTIRRSGSVRKPRMPERMPPMLLQKPAEPDFNSDD

SEQ ID NO: 90156 - protein, 516 aa, Arabidopsis thaliana
  peptide (1)..(516): Ceres Seq. ID no. 12722376
MVILIIIPHMRGSSSLNTKNMLKFIVFFQYIPRFIRIYPLYKEVTRTSGILTETAWAGAAFNLFLYMLASHVFGAFWYLFSIERETVCWKQACERNNPPCISKLLYCDPETAGGNAFLNESCPIQTPNTTLFDFGIFLDALQSGVVESQDFPQKFFYCFWWGLQNLSSLGQNLKTSTYIWEICFAVFISIAGLVLFSFLIGNMQTYLQSTTTRLEEMRVKRRDAEQWMSHRLLPENLRKRIRRYEQYKWQETRGVDEENLLSNLPKDLRRDIKRHLCLALLMRVPMFEKMDEQLLDALCDRLQPVLYTEESYIVREGDPVDEMLFIMRGKLLTITTNGGRTGFLNSEYLGAGDFCGEELLTWALDPHSSSNLPISTRTVRALMEVEAFALKADDLKFVASQFRRLHSKQLRHTFRYYSQQWKTWAACFIQAAWRRYIKKKLEESLKEEENRLQDALAKEACGSSPSLGATIYASRFAANILRTIRRSGSVRKPRMPERMPPMLLQKPAEPDFNSDD

SEQ ID NO: 90157 - DNA, 1951 bp, Arabidopsis thaliana
  misc_feature (1)..(1951): Ceres Seq. ID no. 12722399
  misc_feature (1)..(1951): Ortholog of  Ceres SEQ ID NO 13594037 as cited in SEQ ID NO 55666
  misc_feature (1)..(1951): Ortholog of  Ceres SEQ ID NO 13657707 as cited in SEQ ID NO 66407
gttcccttaacaaactctaaaccaaaaaaaaaaaaaaaaactatgggttacgacaggctcggtccatccggaccatcaaacccgaaccagaaggaccctgccacgtcactcccggaactacagaagaaaactaaaacgaagctgattctcttcactttggccgttttggtagttggagtagtctgcttcggtatctttgccggcatccgagccgtagactcgggtaaaaccgagccgaaactaacccgtaaaccgacccaagcaatctcccgaacctgtagcaaatccttatacccgaacctatgcatcgacacacttcttgactttccgggatctttaaccgccgacgagaacgagctcattcacatatcattcaacgcaacgcttcaaaaattcagcaaagctctttatacttcttcgacgatcacatacactcagatgcccccacgtgtacggtcagcttacgattcttgccttgagttacttgatgattcagtggacgcgctcacacgcgctctttcctccgtcgttgtcgtctccggagatgagtctcattccgatgtgatgacgtggcttagctctgcgatgactaaccacgacacttgcactgacggattcgatgaaattgaaggtcaaggaggagaagtgaaggatcaagtgatcggagcggttaaagatttgtcggagatggtgagtaattgtttggctatattcgccggaaaagttaaggatttatctggagttccggtggtgaataataggaagttacttgggactgaagaaacagaggaattacctaattggttgaagagagaagacagagagcttcttggtactccaacgtcggcgattcaagctgatatcacggtgtcgaaagacggtagcggaacgtttaagacgatcgcggaggcgatcaagaaagccccggagcatagtagccgacgattcgtcatctacgttaaagcaggaagatacgaagaagagaatctgaaagttggtaggaagaagacaaacttgatgttcatcggggacggcaagggtaaaacggtcataaccggtgggaaaagtatcgccgatgatctaactacttttcacaccgccactttcgctgcgactggtgctggatttatagtgagggacatgacgtttgagaattacgccggaccggctaagcatcaggccgtggcactccgtgttggtggagaccacgcggtggtttaccgttgcaacattatcggttaccaagacgcgctttacgtacattctaaccgacagtttttccgcgaatgcgaaatttatggaacggtcgattttatattcgggaatgcggctgtgatcttacagagttgtaacatttatgcgcgtaaaccaatggctcagcagaagattactattacggctcagaaccgaaaagatccgaatcagaatacggggatttcgattcatgcttgtaagctactagcaacaccggatcttgaagcctctaagggtagttatccgacgtatctcggccgtccgtggaagttgtattctagagttgtgtacatgatgtcggatatgggtgaccatattgacccgcgaggatggttggagtggaatggtccgtttgcattggactcgttgtactatggtgagtatatgaacaaagggttgggttcaggaattggtcaacgagtcaaatggcctggttatcatgttattacctcaacggtagaggctagtaagtttacggtggctcagttcatttctggttcttcgtggttgccatccaccggtgtgtccttcttctccgggttgtcacaatagattgtctcagccttgtatgttacgtatacgaatgattttatgtacaaactcaagatctgtaatatagtccataagccattttaagtgtacttattatatgacaggacatcttcttgaatgaaataaagatatgatttgaatatgt

SEQ ID NO: 90158 - protein, 601 aa, Arabidopsis thaliana
  peptide (1)..(601): Ceres Seq. ID no. 12722400
VPLTNSKPKKKKKTMGYDRLGPSGPSNPNQKDPATSLPELQKKTKTKLILFTLAVLVVGVVCFGIFAGIRAVDSGKTEPKLTRKPTQAISRTCSKSLYPNLCIDTLLDFPGSLTADENELIHISFNATLQKFSKALYTSSTITYTQMPPRVRSAYDSCLELLDDSVDALTRALSSVVVVSGDESHSDVMTWLSSAMTNHDTCTDGFDEIEGQGGEVKDQVIGAVKDLSEMVSNCLAIFAGKVKDLSGVPVVNNRKLLGTEETEELPNWLKREDRELLGTPTSAIQADITVSKDGSGTFKTIAEAIKKAPEHSSRRFVIYVKAGRYEEENLKVGRKKTNLMFIGDGKGKTVITGGKSIADDLTTFHTATFAATGAGFIVRDMTFENYAGPAKHQAVALRVGGDHAVVYRCNIIGYQDALYVHSNRQFFRECEIYGTVDFIFGNAAVILQSCNIYARKPMAQQKITITAQNRKDPNQNTGISIHACKLLATPDLEASKGSYPTYLGRPWKLYSRVVYMMSDMGDHIDPRGWLEWNGPFALDSLYYGEYMNKGLGSGIGQRVKWPGYHVITSTVEASKFTVAQFISGSSWLPSTGVSFFSGLSQ

SEQ ID NO: 90159 - protein, 587 aa, Arabidopsis thaliana
  peptide (1)..(587): Ceres Seq. ID no. 12722401
MGYDRLGPSGPSNPNQKDPATSLPELQKKTKTKLILFTLAVLVVGVVCFGIFAGIRAVDSGKTEPKLTRKPTQAISRTCSKSLYPNLCIDTLLDFPGSLTADENELIHISFNATLQKFSKALYTSSTITYTQMPPRVRSAYDSCLELLDDSVDALTRALSSVVVVSGDESHSDVMTWLSSAMTNHDTCTDGFDEIEGQGGEVKDQVIGAVKDLSEMVSNCLAIFAGKVKDLSGVPVVNNRKLLGTEETEELPNWLKREDRELLGTPTSAIQADITVSKDGSGTFKTIAEAIKKAPEHSSRRFVIYVKAGRYEEENLKVGRKKTNLMFIGDGKGKTVITGGKSIADDLTTFHTATFAATGAGFIVRDMTFENYAGPAKHQAVALRVGGDHAVVYRCNIIGYQDALYVHSNRQFFRECEIYGTVDFIFGNAAVILQSCNIYARKPMAQQKITITAQNRKDPNQNTGISIHACKLLATPDLEASKGSYPTYLGRPWKLYSRVVYMMSDMGDHIDPRGWLEWNGPFALDSLYYGEYMNKGLGSGIGQRVKWPGYHVITSTVEASKFTVAQFISGSSWLPSTGVSFFSGLSQ

SEQ ID NO: 90160 - protein, 455 aa, Arabidopsis thaliana
  peptide (1)..(455): Ceres Seq. ID no. 12722402
MPPRVRSAYDSCLELLDDSVDALTRALSSVVVVSGDESHSDVMTWLSSAMTNHDTCTDGFDEIEGQGGEVKDQVIGAVKDLSEMVSNCLAIFAGKVKDLSGVPVVNNRKLLGTEETEELPNWLKREDRELLGTPTSAIQADITVSKDGSGTFKTIAEAIKKAPEHSSRRFVIYVKAGRYEEENLKVGRKKTNLMFIGDGKGKTVITGGKSIADDLTTFHTATFAATGAGFIVRDMTFENYAGPAKHQAVALRVGGDHAVVYRCNIIGYQDALYVHSNRQFFRECEIYGTVDFIFGNAAVILQSCNIYARKPMAQQKITITAQNRKDPNQNTGISIHACKLLATPDLEASKGSYPTYLGRPWKLYSRVVYMMSDMGDHIDPRGWLEWNGPFALDSLYYGEYMNKGLGSGIGQRVKWPGYHVITSTVEASKFTVAQFISGSSWLPSTGVSFFSGLSQ

SEQ ID NO: 90161 - DNA, 1357 bp, Arabidopsis thaliana
  misc_feature (1)..(1357): Ceres Seq. ID no. 12722652
  misc_feature (1)..(1357): Ortholog of  Ceres SEQ ID NO 14302828 as cited in SEQ ID NO 65549
cattattacaccaccgttggcctccgacgacggctcaagcctatcttcgtcgccggcttctccgatggttaccaatcgcgtagacgtcttctggcacgaaggaatgctccgacacgacgccgtagaaggcgtcttcgacactggatacgaccctggattcctcgacgtattggagaagcacccggagaacgccgatcgcgtcaggaacatgctttcgattctccgacgcggtcccatcgctcctcatgtcaattggtttaccggtcttccagcaatcgtttcggagcttctaatgtttcacacttcagagtacattgagaagctagtggaggcagataaatcaggagaaaggtgtgaaattgccgcaggtactttcatgagcccaggctcgtgggaagctgctcttcttgcagctggaacaactctttcagcaatgcaacatattcttgattgccatgggaaaattgcatatgctctggtacgcccaccaggtcaccactcacagcctactcaggctgatgggtattgcttcctcaacaacgctgctcttgctgtcaagctggcattgaattcgggttcttgttcccgagttgcggttattgacatcgatgtacattatggaaatggcacagctgaagggttttatacatctgataaggttcttacggtgtcactccatatgaaccatggatcatggggatcgtcccacccgcagaaagggtcgattgatgaacttggtgaagacgtgggattgggttacaatctgaatgtccctttaccgaatggcacgggtgaccggggatatgaatatgccatgaatgagctggtggttcctgcagttagaaggtttggacccgatatggttgttctcgttgttggtcaagactctagcgcttttgatccaaacgggagacaaagcctgacaatgaatggatacagaaggattgggcagataatgaggggagttgcagaggagcacagccatggaaggttgcttatggtgcaagaaggcgggtatcatgtaacatatgcagcttactgcctccacgccatgctcgaaggggtgctgaagattccagaaccgcatctatctgatccgatcgcttattatcccgaagaagaagctaatgctgttgctgctgtggagtcaatcaaaacatatcacaccgaatttgttccatttctcagaggaacttgaaaatgggacgtatgaatgagtttatgttattcctcgttgtcttgtgaccttttggaacacagatccaaatcaatcaggtcaaaccgtatatatcaaaatacttgttgatcaaactatcttttgtatgaaaacttattcacacgatccgactttgttttt

SEQ ID NO: 90162 - protein, 398 aa, Arabidopsis thaliana; identical to SEQ ID NO: 22998
  peptide (1)..(398): Ceres Seq. ID no. 12722653

SEQ ID NO: 90163 - protein, 377 aa, Arabidopsis thaliana; identical to SEQ ID NO: 22999
  peptide (1)..(377): Ceres Seq. ID no. 12722654

SEQ ID NO: 90164 - protein, 364 aa, Arabidopsis thaliana; identical to SEQ ID NO: 23000
  peptide (1)..(364): Ceres Seq. ID no. 12722655

SEQ ID NO: 90165 - DNA, 1156 bp, Arabidopsis thaliana
  misc_feature (1)..(1156): Ceres Seq. ID no. 12722660
  misc_feature (1)..(1156): Ortholog of  Ceres SEQ ID NO 14303336 as cited in SEQ ID NO 54567
aaataaaccacattagtcttttcagattttttgtacacttccttcatcccccacccatctctctctctctctctcatccttcctctttcttctttgcttgcccttttctttttattttattcttccaaaatcaaatagttccttctttgatctcattgggataactaaaagtttcaagaagagaaacatatcattgaagagagaacccacacaaaaaaaaatgtctgtagatttctcatctgagcgtgtttgctatgtccactgcagcttctgcaccacgattttagcggtaagtgtaccatacgcaagtttgttcacacttgtgacggtgagatgtggccattgtaccaatttgctatccctcaacattggagtttcacttcatcaaacctcagctcctcccattcaccaagatcttcagcctcatagacagcacacaacctctctggtgacaaggaaagattgtgcatcgtcttctaggagcaccaacaattttatcggaaaacattgatcgtgaggctcctagaatgcctcctattcgcccaccggagaaaagacaacgtgttccttcggccctacaacagatttcatcaaggaggaaatccaaaggattaagggcttgcaatccagagattagccaccgtgaggcattttagcactgctgctaaaaaattgggcacattttcctcacattcactttggattaaagctggatggcaacaagaaaggcaagcaattagaccagtcagttgcaggccaaaagtctaatggctattactaaagcctttatatatatacacacatatatacacttatacgtatatatatgtgtatagatatatatgcgtgtgtatgatttatgtttatctttgtacgtacgcattaatgaatgtgtaagcagagagctgatgatggaaagagatcaggcgaggaagaagaagatcatataacgttacatatatatacatgtatgtatatatgttcctttcttttttcttgcgtgtgcttcatctataacttcatttctagttttattctcctaataagtgaagtctataaatttgaacctaaaatgtttaggaagaatcttctttctgaagattgtaatataaatttcaactttactcattctgaaaaggtgtggtcacgactttat

SEQ ID NO: 90166 - protein, 96 aa, Arabidopsis thaliana
  peptide (1)..(96): Ceres Seq. ID no. 12722661
MSVDFSSERVCYVHCSFCTTILAVSVPYASLFTLVTVRCGHCTNLLSLNIGVSLHQTSAPPIHQDLQPHRQHTTSLVTRKDCASSSRSTNNFIGKH

SEQ ID NO: 90167 - protein, 89 aa, Arabidopsis thaliana
  peptide (1)..(89): Ceres Seq. ID no. 12722662
MCKQRADDGKRSGEEEEDHITLHIYTCMYICSFLFSCVCFIYNFISSFILLISEVYKFEPKMFRKNLLSEDCNINFNFTHSEKVWSRLY

SEQ ID NO: 90168 - protein, 62 aa, Arabidopsis thaliana
  peptide (1)..(62): Ceres Seq. ID no. 12722663
MYICSFLFSCVCFIYNFISSFILLISEVYKFEPKMFRKNLLSEDCNINFNFTHSEKVWSRLY

SEQ ID NO: 90169 - DNA, 3126 bp, Arabidopsis thaliana
  misc_feature (1)..(3126): Ceres Seq. ID no. 12722728
  misc_feature (1)..(3126): Ortholog of  Ceres SEQ ID NO 13597957 as cited in SEQ ID NO 60744
aatcctctgccaattttctctcttcttcttcctcttcttcttcgtcgtcgtcatataaagcttctctcgtaacgaattagatcattctttgtgtcaccaccgacgtttttgtacagctaattttttttgtgaaatccgagcttcgtttttttgatcattttgtttacacttccagagtgataacgattctctgatctgtttccatgatcgctcttctctaactctctattcgatcttcgacaatttcttctacaacgccgaagaggaagaaagaatctgtgtttcttcgttgtggcttatttctttctctattgctatttatgttccgtagaaatttgatctggtgaatgctcctgcgataaaatttccctgagccaacgcggctcgggggagatctgttatatcagctatgtcttcatcaacggacgatgcaggaacaacaacacattctcttcaggaattcaaactcttcgaaactcaatcgaacttttatatgattggttgggatggaagtggagtttatagagtactaaagattgatcgtcttgatccatctgagcttaacattagtcaagattcgactcattacacaaagaaagaatgttatgagttgctcaaacggatacacgaaggaaataaagctacgggtgggcttaaacttgtgactctttgttatggtatcattggctttgttaaattcttgggaccttactatatgctgctaataactgaaagaagacacataggtgatctttttggtcacagtgtctatgctgtatcaaagagcgagatagttgccttgcataattctactgtacagtgcaattttgcaaattcaagagatgaaaacagatataagagactcttgtgtatggtggaccttacgaaagacttctttttcagctattcttacaatgtaatgagaagttaccagaagaatgtatgcaattatgagaccgggcataatctctatgagaaaatgtttgtctggaatgagttcttgactcggggaatccgacatcatctacggaataccctgtggactgtagcattggtttatggtttcttcaagcaggcatctctttctgaatctgggaaggattttaagatcacccttatcgctaggcgttcccgtcataatgctggaaccaggtacttgaagcgaggagtaaacagaaatggtgatgttgccaatgatgtcgagaccgaacagatagtgtctgaagatgttcctgaagaccaccctatgcaaataagttctgttgtgcagaatcgtggctcaatccctcttttctggtcacaagagacctcacgactgaatctaaagccagatatagtcttgtcaaaaaaggaaccaaactatgaggcgactaggcttcactttgataaccttgtagaacgatatggaaaccccatcatcattctgaacttgatcaagacaaaagagaggaggcctagagagtcaatcctacgagaagagtttgttaatgcaattgactttataaacaaagatttacctgaggaaaatcgtctgcgattcctccactgggacctgcacaaacattttcggagcaaaacaaaaaatgtcttggcactcctttgcaaagtagctacctgcgcattgatgctaaccgatttattttactatcaagttacaccagccatgacgattgaggattccatgagcttgtcttcttcttctgatgccgacactggggatatatctccacacactagttctgatgatgataatggggaccatgatagtcttgagaaaaaatctagtaggagtaagaatattgcttatggaaaatgtgatgtcaagccacccaggcttcagagtggcgttcttaggaccaattgcattgattgccttgaccgtacaaatgtagcacaatatgcatacggttgggctgctcttgggcagcagcttcatgtattagggattagagatgttcccgccatagaacttgatgatcccttggctatttcgttaatggggttgtatgagagaatgggtgacacactagctcatcagtatggcggatccgcagcccacaacaaggtattcagtgagagaagaggccagtggagagcagcaactcagtcacaggagttcttgagaactctacaacgatattataacaacgcatatatggatgcagataaacaagacgccattaatatatttcttggcacgttccagcctgaacagggaatgccagcaatctgggagttacgatcaaattctctctccaatggacgaaatggagagatgaacatagggaaagatgaaaggtttcttgtgaaaaggtgcttatcagatggagattttctccatgaaagttgcactccgctgtcagccatgagtagcaatcatgaaagcatgccacaaaaaggtttctccgcaccattacagcatgtgagccatattctttcagagtcatcgtctgatataccagtatctaatgatgtagcattatcaaggtgtactccttcaatgcccaggaaacagctcttcggagatgtgcaaaaggttcatcgttttggtagcgaccaagtttactttggcggggaggaagacatgtctagtgtctccaattttgttgatattgagtggctttcatcagaaaacccatgcgagaatgctttatttgacaggtcgtcggagcttacaagaaatttgacagcggagacgtcttcaacagagaatagcgtcaacggagtaggacaatcggcaccaactataagtgaaagtgggtcaagcagcagtaagggaaaggaaccgatgggaacaaagattcgggaggactttccagatagcttcaaagaatgggtagcatacggtgaagctctctgccactgagtcccaaaatcttaggaacacggaatggtacaaaagagtagtacattattgctgaatagctgaaacctttgtgttgcataaaatttcatcattcgtttgaaacctttatttttccccctaatttgttttgtaaatagtgtaatgtttatataaagcttgtaagaatcatgttaaaattatttgtaggtttctttgtctctctgtaatcgtttgaatcacaaacacctgcggttatatattgcgtttgcgttttctgaagt

SEQ ID NO: 90170 - protein, 818 aa, Arabidopsis thaliana
  peptide (1)..(818): Ceres Seq. ID no. 12722729
MSSSTDDAGTTTHSLQEFKLFETQSNFYMIGWDGSGVYRVLKIDRLDPSELNISQDSTHYTKKECYELLKRIHEGNKATGGLKLVTLCYGIIGFVKFLGPYYMLLITERRHIGDLFGHSVYAVSKSEIVALHNSTVQCNFANSRDENRYKRLLCMVDLTKDFFFSYSYNVMRSYQKNVCNYETGHNLYEKMFVWNEFLTRGIRHHLRNTLWTVALVYGFFKQASLSESGKDFKITLIARRSRHNAGTRYLKRGVNRNGDVANDVETEQIVSEDVPEDHPMQISSVVQNRGSIPLFWSQETSRLNLKPDIVLSKKEPNYEATRLHFDNLVERYGNPIIILNLIKTKERRPRESILREEFVNAIDFINKDLPEENRLRFLHWDLHKHFRSKTKNVLALLCKVATCALMLTDLFYYQVTPAMTIEDSMSLSSSSDADTGDISPHTSSDDDNGDHDSLEKKSSRSKNIAYGKCDVKPPRLQSGVLRTNCIDCLDRTNVAQYAYGWAALGQQLHVLGIRDVPAIELDDPLAISLMGLYERMGDTLAHQYGGSAAHNKVFSERRGQWRAATQSQEFLRTLQRYYNNAYMDADKQDAINIFLGTFQPEQGMPAIWELRSNSLSNGRNGEMNIGKDERFLVKRCLSDGDFLHESCTPLSAMSSNHESMPQKGFSAPLQHVSHILSESSSDIPVSNDVALSRCTPSMPRKQLFGDVQKVHRFGSDQVYFGGEEDMSSVSNFVDIEWLSSENPCENALFDRSSELTRNLTAETSSTENSVNGVGQSAPTISESGSSSSKGKEPMGTKIREDFPDSFKEWVAYGEALCH

SEQ ID NO: 90171 - protein, 790 aa, Arabidopsis thaliana
  peptide (1)..(790): Ceres Seq. ID no. 12722730
MIGWDGSGVYRVLKIDRLDPSELNISQDSTHYTKKECYELLKRIHEGNKATGGLKLVTLCYGIIGFVKFLGPYYMLLITERRHIGDLFGHSVYAVSKSEIVALHNSTVQCNFANSRDENRYKRLLCMVDLTKDFFFSYSYNVMRSYQKNVCNYETGHNLYEKMFVWNEFLTRGIRHHLRNTLWTVALVYGFFKQASLSESGKDFKITLIARRSRHNAGTRYLKRGVNRNGDVANDVETEQIVSEDVPEDHPMQISSVVQNRGSIPLFWSQETSRLNLKPDIVLSKKEPNYEATRLHFDNLVERYGNPIIILNLIKTKERRPRESILREEFVNAIDFINKDLPEENRLRFLHWDLHKHFRSKTKNVLALLCKVATCALMLTDLFYYQVTPAMTIEDSMSLSSSSDADTGDISPHTSSDDDNGDHDSLEKKSSRSKNIAYGKCDVKPPRLQSGVLRTNCIDCLDRTNVAQYAYGWAALGQQLHVLGIRDVPAIELDDPLAISLMGLYERMGDTLAHQYGGSAAHNKVFSERRGQWRAATQSQEFLRTLQRYYNNAYMDADKQDAINIFLGTFQPEQGMPAIWELRSNSLSNGRNGEMNIGKDERFLVKRCLSDGDFLHESCTPLSAMSSNHESMPQKGFSAPLQHVSHILSESSSDIPVSNDVALSRCTPSMPRKQLFGDVQKVHRFGSDQVYFGGEEDMSSVSNFVDIEWLSSENPCENALFDRSSELTRNLTAETSSTENSVNGVGQSAPTISESGSSSSKGKEPMGTKIREDFPDSFKEWVAYGEALCH

SEQ ID NO: 90172 - protein, 716 aa, Arabidopsis thaliana
  peptide (1)..(716): Ceres Seq. ID no. 12722731
MLLITERRHIGDLFGHSVYAVSKSEIVALHNSTVQCNFANSRDENRYKRLLCMVDLTKDFFFSYSYNVMRSYQKNVCNYETGHNLYEKMFVWNEFLTRGIRHHLRNTLWTVALVYGFFKQASLSESGKDFKITLIARRSRHNAGTRYLKRGVNRNGDVANDVETEQIVSEDVPEDHPMQISSVVQNRGSIPLFWSQETSRLNLKPDIVLSKKEPNYEATRLHFDNLVERYGNPIIILNLIKTKERRPRESILREEFVNAIDFINKDLPEENRLRFLHWDLHKHFRSKTKNVLALLCKVATCALMLTDLFYYQVTPAMTIEDSMSLSSSSDADTGDISPHTSSDDDNGDHDSLEKKSSRSKNIAYGKCDVKPPRLQSGVLRTNCIDCLDRTNVAQYAYGWAALGQQLHVLGIRDVPAIELDDPLAISLMGLYERMGDTLAHQYGGSAAHNKVFSERRGQWRAATQSQEFLRTLQRYYNNAYMDADKQDAINIFLGTFQPEQGMPAIWELRSNSLSNGRNGEMNIGKDERFLVKRCLSDGDFLHESCTPLSAMSSNHESMPQKGFSAPLQHVSHILSESSSDIPVSNDVALSRCTPSMPRKQLFGDVQKVHRFGSDQVYFGGEEDMSSVSNFVDIEWLSSENPCENALFDRSSELTRNLTAETSSTENSVNGVGQSAPTISESGSSSSKGKEPMGTKIREDFPDSFKEWVAYGEALCH

SEQ ID NO: 90173 - DNA, 3690 bp, Arabidopsis thaliana
  misc_feature (1)..(3690): Ceres Seq. ID no. 12722872
  misc_feature (1)..(3690): Ortholog of  Ceres SEQ ID NO 13600310 as cited in SEQ ID NO 5086
atgccgtttatctccgagactgctagtgccatcaagcgccggttcggattcaacgaccgtcccgctccgtcggaatctctccgctctgtaccttgcacgccagaagctaacaccgtctcgagagataatcacactcatcagtctttgcttttctcttccgccgttcgaagcatgcctgaattggacgaagatggtgcgatttgcgctggatctgctcagatatcgaggtctcaaagctttgagttcaatgaagatcccgctttttggaaagatcacaatgttcaggttatcataagaactcgtccacttagtagttcagagatttctgtacaaggcaacaacaaatgtgtaaggcaagacaatggtcaggcaattacttggattgggaatccagagtctcggttcacatttgatctcgttgctgatgagaatgttagccaggagcagatgtttaaagtggctggagtacctatggtagagaatgttgtggctggttacaatagctgtatgtttgcatatggccagactggaagtgggaaaactcatactatgcttggagatatcgagggaggaacacgtagacatagtgtcaactgcgggatgacacctagagtttttgagtatttgttctcaaggatccaaaaggaaaaagaggttcgcaaagaggaaaagctacatttcacatgtagatgctcatttctggagatttacaacgagcaaatccttgatttattagatccatcgtcttataatttacagctaagggaagaccacaaaaaaggtattcatgttgagaatctaaaggagattgaagtttcaagtgccagagacgtgattcaacaattgatgcagggtgctgcaaacaggaaagtagccgctactaatatgaatcgtgcaagtagtcgatcccacagtgtatttacatgtatcatcgaaagcaagtgggtatctcaaggtgtaactcatcatcgttttgcacggcttaatcttgttgatttagctggatctgaaaggcaaaagagttcaggagctgaaggtgaacgcctcaaagaagctaccaacatcaacaagtctctttctacattggggcttgtaatcatgaatctcgtaagcgtttccaatggaaaatcagttcatgttccttatcgagattcgaagctcacatttctgcttcaggattctcttggagggaattcaaagacaattataattgcgaatattagtccatctagcagttgctcattggagaccctaagtaccttgaagtttgcacagcgtgccaagcttattaagaacaatgcaattgtcaacgaagatgcgtctggagatgttattgctatgcggcttcaaattcaacaactcaagaaagaagtaacccgcttaagaggaatgggtggagtagacaatcaggacatggacactatctcaatgggttgccctgcctctccaatgtctctcaagtgggatgggttcaatggatcattcactcctctgacaactcacaaaaggatgtctaaggtaaaagactacgaagttgcacttgtgggtgctttcaggagagagagggaaaaggacgttgctttacaggctttgactgctgaaaatgaggcctcaatgaagttggaaaagaaaagagaggatgaaatacgagggctgaaaatgatgttaaagctccgagattcagcaatcaagagtttacaaggtgtaacttcaggaaagatccctgttgaagctcatctgcaaaaagaaaagggtgaccttatgaaggagatagaggaaggggaacgggatatcttaaatcaacagattcaagcgttacaagccaagttgctagaagctcttgactggaaactcatgcacgagtcagattcctccatggttaaagaagatggtaacatcagcaatatgttctgctcaaaccagaatcaggaatcaaagaaactttcgtctatccaagatgagaatgaatttctccggatgcaggctattcaaaaccgggcagaaatggaatctcttcagaagtccttaagtttttcacttgacgagaaagagagattgcaaaagcttgtcgacaatttgtctaatgaacttgagggaaaaataagatcctcaggcatggttggtgatgatgatcagatggaggttaaaacaatggttcaagccattgcatgtgttagtcaaagagaagctgaagctcacgagacagcaatcaaattgtcgaaagaaaatgatgatttgcgccagaaaataaaggtcttgattgaggacaacaacaagcttatagagctgtatgaacaagtagccgaagaaaacagttccagagcttggggaaagatcgagacagattcgtcaagtaataatgcggacgctcagaacagtgctgaaattgctttagaggttgaaaaaagtgcagctgaagaacagaagaaaatgataggaaacctggagaatcagctaaccgagatgcacgatgagaacgagaagctaatgagtctgtacgaaaatgcgatgaaggaaaaggatgaattgaaaagacttctctcttctcctgaccaaaagaagcctattgaagctaattccgatactgaaatggagctgtgtaacatttcttctgaaaagtccacagaagatttaaactcagcaaagctgaaacttgaactggcgcaggaaaagctttcaatatctgcgaaaactattggagtgttctcttcgcttgaagagaatattttggacatcatcaagctgtcaaaggaaagcaaagagaccgaagaaaaagttaaggagcaccagtctgagctaggatctatcaaaactgtttctgatcaaactaatgcaagaaaggaagttgcagagaaaaaattggccgctctcagatgctcactatcaaactttgcatcatcagcagtttactttcaacagcgagaagaacgagcaagggcgcatgtaaactcattttccggttatctaaaccagaaaaatgaagaactcgatgttatccgttctcacaaaagagaaatcgatgctgctatgggtaagatccaacaatctgaggcagagctgaagagtaacattgtaatgctgaaaataaaagtggatgaagagaacaagaggcatgaggaagagggtgttctttgcacgatagataacattctgcgtacaggaaaagccacagatttgctgaaatcccaggaagaaaaaacaaagctccaatcggagatgaagctttctcgggagaagcttgcttcggttagaaaagaagttgacgacatgactaagaagtctttgaaactggagaaagagatcaaaaccatggaaacagagatagagaagagctcaaagactagaaccgaatcagaaatggaattggagaacacaattcaagagaagcaaactattcaggagatggaagaacaagggatgtctgaaatacaaaacatgataatcgagattcatcagcttgtctttgaatcggatctgagaaaagaagaggcgatgattataagagaagagcttattgcagaggagcttagagccaaagatgtgcacacgaatatgatcgagagagtcgagaatgcgttgaagacactggagaatcaaaacaatagcgtatcaggcaagattgaagaagaagtagaaaatgttttgagtttagttcacgaagcctcgaggttgcttgaagtttctcactga

SEQ ID NO: 90174 - protein, 1229 aa, Arabidopsis thaliana
  peptide (1)..(1229): Ceres Seq. ID no. 12722873
MPFISETASAIKRRFGFNDRPAPSESLRSVPCTPEANTVSRDNHTHQSLLFSSAVRSMPELDEDGAICAGSAQISRSQSFEFNEDPAFWKDHNVQVIIRTRPLSSSEISVQGNNKCVRQDNGQAITWIGNPESRFTFDLVADENVSQEQMFKVAGVPMVENVVAGYNSCMFAYGQTGSGKTHTMLGDIEGGTRRHSVNCGMTPRVFEYLFSRIQKEKEVRKEEKLHFTCRCSFLEIYNEQILDLLDPSSYNLQLREDHKKGIHVENLKEIEVSSARDVIQQLMQGAANRKVAATNMNRASSRSHSVFTCIIESKWVSQGVTHHRFARLNLVDLAGSERQKSSGAEGERLKEATNINKSLSTLGLVIMNLVSVSNGKSVHVPYRDSKLTFLLQDSLGGNSKTIIIANISPSSSCSLETLSTLKFAQRAKLIKNNAIVNEDASGDVIAMRLQIQQLKKEVTRLRGMGGVDNQDMDTISMGCPASPMSLKWDGFNGSFTPLTTHKRMSKVKDYEVALVGAFRREREKDVALQALTAENEASMKLEKKREDEIRGLKMMLKLRDSAIKSLQGVTSGKIPVEAHLQKEKGDLMKEIEEGERDILNQQIQALQAKLLEALDWKLMHESDSSMVKEDGNISNMFCSNQNQESKKLSSIQDENEFLRMQAIQNRAEMESLQKSLSFSLDEKERLQKLVDNLSNELEGKIRSSGMVGDDDQMEVKTMVQAIACVSQREAEAHETAIKLSKENDDLRQKIKVLIEDNNKLIELYEQVAEENSSRAWGKIETDSSSNNADAQNSAEIALEVEKSAAEEQKKMIGNLENQLTEMHDENEKLMSLYENAMKEKDELKRLLSSPDQKKPIEANSDTEMELCNISSEKSTEDLNSAKLKLELAQEKLSISAKTIGVFSSLEENILDIIKLSKESKETEEKVKEHQSELGSIKTVSDQTNARKEVAEKKLAALRCSLSNFASSAVYFQQREERARAHVNSFSGYLNQKNEELDVIRSHKREIDAAMGKIQQSEAELKSNIVMLKIKVDEENKRHEEEGVLCTIDNILRTGKATDLLKSQEEKTKLQSEMKLSREKLASVRKEVDDMTKKSLKLEKEIKTMETEIEKSSKTRTESEMELENTIQEKQTIQEMEEQGMSEIQNMIIEIHQLVFESDLRKEEAMIIREELIAEELRAKDVHTNMIERVENALKTLENQNNSVSGKIEEEVENVLSLVHEASRLLEVSH

SEQ ID NO: 90175 - protein, 1172 aa, Arabidopsis thaliana
  peptide (1)..(1172): Ceres Seq. ID no. 12722874
MPELDEDGAICAGSAQISRSQSFEFNEDPAFWKDHNVQVIIRTRPLSSSEISVQGNNKCVRQDNGQAITWIGNPESRFTFDLVADENVSQEQMFKVAGVPMVENVVAGYNSCMFAYGQTGSGKTHTMLGDIEGGTRRHSVNCGMTPRVFEYLFSRIQKEKEVRKEEKLHFTCRCSFLEIYNEQILDLLDPSSYNLQLREDHKKGIHVENLKEIEVSSARDVIQQLMQGAANRKVAATNMNRASSRSHSVFTCIIESKWVSQGVTHHRFARLNLVDLAGSERQKSSGAEGERLKEATNINKSLSTLGLVIMNLVSVSNGKSVHVPYRDSKLTFLLQDSLGGNSKTIIIANISPSSSCSLETLSTLKFAQRAKLIKNNAIVNEDASGDVIAMRLQIQQLKKEVTRLRGMGGVDNQDMDTISMGCPASPMSLKWDGFNGSFTPLTTHKRMSKVKDYEVALVGAFRREREKDVALQALTAENEASMKLEKKREDEIRGLKMMLKLRDSAIKSLQGVTSGKIPVEAHLQKEKGDLMKEIEEGERDILNQQIQALQAKLLEALDWKLMHESDSSMVKEDGNISNMFCSNQNQESKKLSSIQDENEFLRMQAIQNRAEMESLQKSLSFSLDEKERLQKLVDNLSNELEGKIRSSGMVGDDDQMEVKTMVQAIACVSQREAEAHETAIKLSKENDDLRQKIKVLIEDNNKLIELYEQVAEENSSRAWGKIETDSSSNNADAQNSAEIALEVEKSAAEEQKKMIGNLENQLTEMHDENEKLMSLYENAMKEKDELKRLLSSPDQKKPIEANSDTEMELCNISSEKSTEDLNSAKLKLELAQEKLSISAKTIGVFSSLEENILDIIKLSKESKETEEKVKEHQSELGSIKTVSDQTNARKEVAEKKLAALRCSLSNFASSAVYFQQREERARAHVNSFSGYLNQKNEELDVIRSHKREIDAAMGKIQQSEAELKSNIVMLKIKVDEENKRHEEEGVLCTIDNILRTGKATDLLKSQEEKTKLQSEMKLSREKLASVRKEVDDMTKKSLKLEKEIKTMETEIEKSSKTRTESEMELENTIQEKQTIQEMEEQGMSEIQNMIIEIHQLVFESDLRKEEAMIIREELIAEELRAKDVHTNMIERVENALKTLENQNNSVSGKIEEEVENVLSLVHEASRLLEVSH

SEQ ID NO: 90176 - protein, 1080 aa, Arabidopsis thaliana
  peptide (1)..(1080): Ceres Seq. ID no. 12722875
MFKVAGVPMVENVVAGYNSCMFAYGQTGSGKTHTMLGDIEGGTRRHSVNCGMTPRVFEYLFSRIQKEKEVRKEEKLHFTCRCSFLEIYNEQILDLLDPSSYNLQLREDHKKGIHVENLKEIEVSSARDVIQQLMQGAANRKVAATNMNRASSRSHSVFTCIIESKWVSQGVTHHRFARLNLVDLAGSERQKSSGAEGERLKEATNINKSLSTLGLVIMNLVSVSNGKSVHVPYRDSKLTFLLQDSLGGNSKTIIIANISPSSSCSLETLSTLKFAQRAKLIKNNAIVNEDASGDVIAMRLQIQQLKKEVTRLRGMGGVDNQDMDTISMGCPASPMSLKWDGFNGSFTPLTTHKRMSKVKDYEVALVGAFRREREKDVALQALTAENEASMKLEKKREDEIRGLKMMLKLRDSAIKSLQGVTSGKIPVEAHLQKEKGDLMKEIEEGERDILNQQIQALQAKLLEALDWKLMHESDSSMVKEDGNISNMFCSNQNQESKKLSSIQDENEFLRMQAIQNRAEMESLQKSLSFSLDEKERLQKLVDNLSNELEGKIRSSGMVGDDDQMEVKTMVQAIACVSQREAEAHETAIKLSKENDDLRQKIKVLIEDNNKLIELYEQVAEENSSRAWGKIETDSSSNNADAQNSAEIALEVEKSAAEEQKKMIGNLENQLTEMHDENEKLMSLYENAMKEKDELKRLLSSPDQKKPIEANSDTEMELCNISSEKSTEDLNSAKLKLELAQEKLSISAKTIGVFSSLEENILDIIKLSKESKETEEKVKEHQSELGSIKTVSDQTNARKEVAEKKLAALRCSLSNFASSAVYFQQREERARAHVNSFSGYLNQKNEELDVIRSHKREIDAAMGKIQQSEAELKSNIVMLKIKVDEENKRHEEEGVLCTIDNILRTGKATDLLKSQEEKTKLQSEMKLSREKLASVRKEVDDMTKKSLKLEKEIKTMETEIEKSSKTRTESEMELENTIQEKQTIQEMEEQGMSEIQNMIIEIHQLVFESDLRKEEAMIIREELIAEELRAKDVHTNMIERVENALKTLENQNNSVSGKIEEEVENVLSLVHEASRLLEVSH

SEQ ID NO: 90177 - DNA, 621 bp, Arabidopsis thaliana
  misc_feature (1)..(621): Ceres Seq. ID no. 12722895
  misc_feature (1)..(621): Ortholog of  Ceres SEQ ID NO 14303374 as cited in SEQ ID NO 54088
  misc_feature (1)..(621): Ortholog of  Ceres SEQ ID NO 13639250 as cited in SEQ ID NO 56555
  misc_feature (1)..(621): Ortholog of  Ceres SEQ ID NO 15177034 as cited in SEQ ID NO 60024
  misc_feature (1)..(621): Ortholog of  Ceres SEQ ID NO 13598257 as cited in SEQ ID NO 63008
  misc_feature (1)..(621): Ortholog of  Ceres SEQ ID NO 13597309 as cited in SEQ ID NO 63851
  misc_feature (1)..(621): Ortholog of  Ceres SEQ ID NO 12599167 as cited in SEQ ID NO 64443
atgactgagaaggaatgtgaacatcaccacgacgaagatgagaagatgaggaaacgtataggagcattggtgcttgggtttctcgcagctgttcttttcgtggttttcttggtgtgggcgatacttcacccacacggaccacgttttgttcttcaagacgcaaccatttacgcgttcaacgtttctcagcctaattatctcacttctaatcttcaggtcactctttcttcacgaaatcctaatgacaagatcggaatcttctatgaccgccttgacatctacgcatcttaccgcaaccaacaggtgacgttggcgacgttattgccggcgacttaccaaggccaccttgatgtgacaatatggtcgccgtttctgtatggaacaactgtaccggtggcaccatatttttctccggcgttaagccaagatctaacggcggggatggtgcttctgaatatcaagatcgatggttgggttagatggaaagtgggaacgtgggtctccggtaggtaccgcctccacgtcaattgtccagcttacattaccttagccggacatttttctggtgatggtccagccgtgaagtaccagcttgtccaacgatgtgccgttgatgtttaa

SEQ ID NO: 90178 - protein, 206 aa, Arabidopsis thaliana
  peptide (1)..(206): Ceres Seq. ID no. 12722896
MTEKECEHHHDEDEKMRKRIGALVLGFLAAVLFVVFLVWAILHPHGPRFVLQDATIYAFNVSQPNYLTSNLQVTLSSRNPNDKIGIFYDRLDIYASYRNQQVTLATLLPATYQGHLDVTIWSPFLYGTTVPVAPYFSPALSQDLTAGMVLLNIKIDGWVRWKVGTWVSGRYRLHVNCPAYITLAGHFSGDGPAVKYQLVQRCAVDV

SEQ ID NO: 90179 - protein, 191 aa, Arabidopsis thaliana
  peptide (1)..(191): Ceres Seq. ID no. 12722897
MRKRIGALVLGFLAAVLFVVFLVWAILHPHGPRFVLQDATIYAFNVSQPNYLTSNLQVTLSSRNPNDKIGIFYDRLDIYASYRNQQVTLATLLPATYQGHLDVTIWSPFLYGTTVPVAPYFSPALSQDLTAGMVLLNIKIDGWVRWKVGTWVSGRYRLHVNCPAYITLAGHFSGDGPAVKYQLVQRCAVDV

SEQ ID NO: 90180 - DNA, 1500 bp, Arabidopsis thaliana
  misc_feature (1)..(1500): Ceres Seq. ID no. 12722908
  misc_feature (1)..(1500): Ortholog of  Ceres SEQ ID NO 13594209 as cited in SEQ ID NO 59089
  misc_feature (1)..(1500): Ortholog of  Ceres SEQ ID NO 13502874 as cited in SEQ ID NO 66298
  misc_feature (1)..(1500): Ortholog of  Ceres SEQ ID NO 12614124 as cited in SEQ ID NO 68392
atgtctatcttcctttgtttcctcttactcttgcctctctctttaatcctttttaaaaagcttttaccatcgaaaggaaagcttcctccgggacctattggacttccgatcatcggaaacttacaccagcttggaaaattgctttacaaatctttccacaaaatctcccaagaatatggaccggtggtacttctccgtttaggggtagtccctgtcatcgttgtctcttccaaagaaggagctgaggaagtgctcaaaactcatgatcttgagacttgtacccgacctaaaacggcagcgactggcttgtttacttacaattttaaagacattggttttgctccttttggcgacgactggagagagatgaggaaaatcacaacgctcgagctctttagcgtgaaaaaacttaaatctttcaggtatattagagaggaagagagcgaattgttggtcaagaaaatatcaaaatctgttgacgaaacacaaaactcatcagtagatttgaggaaagtccttttctccttcacggctagcatcatttgtagacttgcttttggacaaaacttccaccaatgcgattttgttgatgctagcctggaagagttagtgcttgaatcagaggccaacctcggcaccttcgcgttcgctgacttcttccctggagggtggctcatagataggatctcgggtcaacattcaagggtgaacaaagccttttacaaactcaccaatttctataaacatgtaatcgatgatcatttgaagactggacaacctcaagatcactcggacatcgtcagtgtcatgttggatatgatcaataaacccacaaaagctgattcgtttaaagtcacttatgaccatcttaaaggagtcatgtcagatatttttttggctggagtgaacgggggagccaacacaatgatatggacattgacagagctaagcagacatccgagagtgatgaaaaaactccaagaagagatacgagcaatgcttggacccaacaaagagagaatcacagaagaagatctagagaaagttgagtacttgaaattggtgatggtggaaacattcagattacacccaccagctcctctcttgctcccaagactaactatgtccgacatcaagattcaaggctacaacattcccaagaacaccatgatccaaatcaacacttacgcaataggacgggatcccaaatattggaaacaacctggtgagttcatccccgagaggtttcttgatagccctatcgattataagggtcaacattttgagctattaccgtttggagctggacgtaggatctgtcctgggatggccaccgggatcaccatggtcgagctcgggcttcttaaccttctttacttcttcgattggagtttgcccaatggaatgactattgaagatattgacatggaagaagacgaagggttcgctatcgccaagaaagtccctcttgttctcatacaaacttctcatcgctggtga

SEQ ID NO: 90181 - protein, 499 aa, Arabidopsis thaliana
  peptide (1)..(499): Ceres Seq. ID no. 12722909
MSIFLCFLLLLPLSLILFKKLLPSKGKLPPGPIGLPIIGNLHQLGKLLYKSFHKISQEYGPVVLLRLGVVPVIVVSSKEGAEEVLKTHDLETCTRPKTAATGLFTYNFKDIGFAPFGDDWREMRKITTLELFSVKKLKSFRYIREEESELLVKKISKSVDETQNSSVDLRKVLFSFTASIICRLAFGQNFHQCDFVDASLEELVLESEANLGTFAFADFFPGGWLIDRISGQHSRVNKAFYKLTNFYKHVIDDHLKTGQPQDHSDIVSVMLDMINKPTKADSFKVTYDHLKGVMSDIFLAGVNGGANTMIWTLTELSRHPRVMKKLQEEIRAMLGPNKERITEEDLEKVEYLKLVMVETFRLHPPAPLLLPRLTMSDIKIQGYNIPKNTMIQINTYAIGRDPKYWKQPGEFIPERFLDSPIDYKGQHFELLPFGAGRRICPGMATGITMVELGLLNLLYFFDWSLPNGMTIEDIDMEEDEGFAIAKKVPLVLIQTSHRW

SEQ ID NO: 90182 - protein, 377 aa, Arabidopsis thaliana
  peptide (1)..(377): Ceres Seq. ID no. 12722910
MRKITTLELFSVKKLKSFRYIREEESELLVKKISKSVDETQNSSVDLRKVLFSFTASIICRLAFGQNFHQCDFVDASLEELVLESEANLGTFAFADFFPGGWLIDRISGQHSRVNKAFYKLTNFYKHVIDDHLKTGQPQDHSDIVSVMLDMINKPTKADSFKVTYDHLKGVMSDIFLAGVNGGANTMIWTLTELSRHPRVMKKLQEEIRAMLGPNKERITEEDLEKVEYLKLVMVETFRLHPPAPLLLPRLTMSDIKIQGYNIPKNTMIQINTYAIGRDPKYWKQPGEFIPERFLDSPIDYKGQHFELLPFGAGRRICPGMATGITMVELGLLNLLYFFDWSLPNGMTIEDIDMEEDEGFAIAKKVPLVLIQTSHRW

SEQ ID NO: 90183 - DNA, 1008 bp, Arabidopsis thaliana
  misc_feature (1)..(1008): Ceres Seq. ID no. 12722911
  misc_feature (1)..(1008): Ortholog of  Ceres SEQ ID NO 13660872 as cited in SEQ ID NO 60830
atggcagctgcaccaccgatcgagccggcggtgacgacgacgttccctggcttcaaattctccccgaccgacatcgaacttatatcttattacttgaagaggaagatggatggtttggagagatctgttgagattatacctgaggttgagatttacaacttcgagccttgggatttacctgataagtctatcgttaaatcggatagcgaatggttcttcttctgtgctcgcggtaagaagtatccccacggttcacagaacagaagagcaaccaagataggatattggaaagccacaggaaaagagcgtaatgtgaagtcaggttctgaggtcattggaacaaagagaacgcttgtattccacattggccgcgcgccaaaaggaggaagaacggaatggcttatgcatgagtactgcatgattggagtatcactggatgctctggttatttgccgacttaggaggaatactgaatttcaagggagtacaattcaaaagccaccacaaccaagtttaccactggataagcacgtaaacttgcggaatgaagctatttcagaaagtatttatggttgggaaactatggttgatttctacttatcaagtgagtcagggcaagaactacttagtgaaatagcagaatcttcacaatcttcacaaaatccacaggttcctagtgaagaagatttctatgccgatatactgagggatgaaatagtaaagctagatgatccggcggtatccggtaatacactgatcaatgtaccaaggcttcaaacagagtccaataccacaagagtactacctttacctgacatggtagacaaacaaatgcaatcgttgctacagaaactaccattacaaaatgacactggagaagagaacaacatatccatgtcaaattgctttatcggtatctactcgattaagtctataaaccgagcgcgatgggacgttgttgtttggttactcgttatgatagccgtgttggtgttttatttagtgtga

SEQ ID NO: 90184 - protein, 335 aa, Arabidopsis thaliana
  peptide (1)..(335): Ceres Seq. ID no. 12722912
MAAAPPIEPAVTTTFPGFKFSPTDIELISYYLKRKMDGLERSVEIIPEVEIYNFEPWDLPDKSIVKSDSEWFFFCARGKKYPHGSQNRRATKIGYWKATGKERNVKSGSEVIGTKRTLVFHIGRAPKGGRTEWLMHEYCMIGVSLDALVICRLRRNTEFQGSTIQKPPQPSLPLDKHVNLRNEAISESIYGWETMVDFYLSSESGQELLSEIAESSQSSQNPQVPSEEDFYADILRDEIVKLDDPAVSGNTLINVPRLQTESNTTRVLPLPDMVDKQMQSLLQKLPLQNDTGEENNISMSNCFIGIYSIKSINRARWDVVVWLLVMIAVLVFYLV

SEQ ID NO: 90185 - protein, 300 aa, Arabidopsis thaliana
  peptide (1)..(300): Ceres Seq. ID no. 12722913
MDGLERSVEIIPEVEIYNFEPWDLPDKSIVKSDSEWFFFCARGKKYPHGSQNRRATKIGYWKATGKERNVKSGSEVIGTKRTLVFHIGRAPKGGRTEWLMHEYCMIGVSLDALVICRLRRNTEFQGSTIQKPPQPSLPLDKHVNLRNEAISESIYGWETMVDFYLSSESGQELLSEIAESSQSSQNPQVPSEEDFYADILRDEIVKLDDPAVSGNTLINVPRLQTESNTTRVLPLPDMVDKQMQSLLQKLPLQNDTGEENNISMSNCFIGIYSIKSINRARWDVVVWLLVMIAVLVFYLV

SEQ ID NO: 90186 - protein, 201 aa, Arabidopsis thaliana
  peptide (1)..(201): Ceres Seq. ID no. 12722914
MHEYCMIGVSLDALVICRLRRNTEFQGSTIQKPPQPSLPLDKHVNLRNEAISESIYGWETMVDFYLSSESGQELLSEIAESSQSSQNPQVPSEEDFYADILRDEIVKLDDPAVSGNTLINVPRLQTESNTTRVLPLPDMVDKQMQSLLQKLPLQNDTGEENNISMSNCFIGIYSIKSINRARWDVVVWLLVMIAVLVFYLV

SEQ ID NO: 90187 - DNA, 2224 bp, Arabidopsis thaliana
  misc_feature (1)..(2224): Ceres Seq. ID no. 12722933
  misc_feature (1)..(2224): Ortholog of  Ceres SEQ ID NO 15169037 as cited in SEQ ID NO 58715
  misc_feature (1)..(2224): Ortholog of  Ceres SEQ ID NO 15224680 as cited in SEQ ID NO 59829
  misc_feature (1)..(2224): Ortholog of  Ceres SEQ ID NO 12627215 as cited in SEQ ID NO 60976
gtagcaaaccttgctttcaatcgacgaaggagttttgagttgaggaagtgagtagaaatcaatggaggaagaatctaagaatggcggaaccacgattccgactgaagaattggcggtggttgcggtgccacctgtagtagaagaagaggagccgatggtcggacctggaccagctccacgaggcaaacgcaagcgtccgcttcaattcgagcaagcttatcttgattcgcttccttctgctaatatgtatgagaaaagttatatgcatcgagatgtagttacacatgttgctgtttcagcagctgagttctttataagtggaagtatggatggtcacttgaaattttggaagaaaaagggtgttggtatcgagtttgctaagcatttccgctcccatctcggtccaattgaaggtctagcggttagcattgatggtttgctttgctgtacaatctcaaatgatcatgctgttaaaatatatgatgttgtcaactacgatatgatggccatgatccgtttgccatatattcctggtgctgttgagtgggtctacaagcaaggggatgtcaaagctaaacttgctgtcagtgaccgagactctttgtttgtgcacatttatgatcctcgttctggttccaacgaacccattgcttcaaaagagatacatatgaatccaattaaggtcatgaagtacaatcctgtttcggacacaatgatctctggtgacacaaaaggaatcattgagtactggagtgcaactacattacagtttcccgaggatgaggtaaactttaaactgaagagtgatacaaatctctttgagattataaagtgcaaaacaacaatctctgccattgaggtgagtccagatggtaaacagttttccattacagctcctgatcgtaggattcgtgtgttctggtttagaactggtaaactgaggcgggtatatgatgagtcacttgtggtggcccaagatctgcagaggagtgatgctcccttatacaggcttgaagctattgactttggtagaagaatggcagttgaaaaggaacttgaaaaaaccgagagtgctccgcagcccaatgctgtgtttgatgaaagctctaatttccttatatacgccacttttcttggaataaaagtaataaatttacacaccaacacagttgcaaggatccttggaaaggtggagagtaatgaaaggtatctgagagttgcattatatcaaggtgatcaaggaggcaagaaagttagaaagattcctgcagctgcagcaaatgtaaatgaaagcaaggagcctttgactgatccgactatcctatgctgtgcctttaagaaacacaggatctatatgttcagtcggagagagccagaagaacctgaagatgcaagccaagggagagatgtgtttaacgagaagcctgctgctgatgaacttatgtctgtctcagatattggaaactcagccacaacatcccttccagagaacgtgataatgcatactacgcttggtgacattcacatgaagctttacccagaagaatgtcccaaaactgtggagaatttcacaacacactgtagaaatggctattacgataaccaccttttccatcgggttatcagaggatttatgatacagactggagatcctcttggggatggtactggaggacagtcaatttggggcagagaatttgaggacgagtttcacaaaagtctaaggcatgacaggccgttcacattgtctatggcaaatgccggcccaaacacaaatgggtctcagttcttcatcacaacagtggctacaccgtggctagacaataagcacactgtttttggaagagttgtgaagggaatggacgtcgttcagggtatagagaaagtgaagacagacaagaacgacaggccttaccaagatgtgaagatacttaatgtcaccgttccgaaatcttagcatctttgctactgtctcaaagatagtgaacaatctatgctgatccgtaaccccgtgattggttctatgctgggaagttgttcttgcggagatggatcgaactgtgggatatgtttgttgtacccgagcagatcaggttaagttggtggcatcatcttcttgacactaaacattattttatgtttttgtcaaacaaattttatgagaatgcttagtgaacaaaaagacttcaacttctaatgttacttcaattcctcttattttctt

SEQ ID NO: 90188 - protein, 631 aa, Arabidopsis thaliana
  peptide (1)..(631): Ceres Seq. ID no. 12722934
MEEESKNGGTTIPTEELAVVAVPPVVEEEEPMVGPGPAPRGKRKRPLQFEQAYLDSLPSANMYEKSYMHRDVVTHVAVSAAEFFISGSMDGHLKFWKKKGVGIEFAKHFRSHLGPIEGLAVSIDGLLCCTISNDHAVKIYDVVNYDMMAMIRLPYIPGAVEWVYKQGDVKAKLAVSDRDSLFVHIYDPRSGSNEPIASKEIHMNPIKVMKYNPVSDTMISGDTKGIIEYWSATTLQFPEDEVNFKLKSDTNLFEIIKCKTTISAIEVSPDGKQFSITAPDRRIRVFWFRTGKLRRVYDESLVVAQDLQRSDAPLYRLEAIDFGRRMAVEKELEKTESAPQPNAVFDESSNFLIYATFLGIKVINLHTNTVARILGKVESNERYLRVALYQGDQGGKKVRKIPAAAANVNESKEPLTDPTILCCAFKKHRIYMFSRREPEEPEDASQGRDVFNEKPAADELMSVSDIGNSATTSLPENVIMHTTLGDIHMKLYPEECPKTVENFTTHCRNGYYDNHLFHRVIRGFMIQTGDPLGDGTGGQSIWGREFEDEFHKSLRHDRPFTLSMANAGPNTNGSQFFITTVATPWLDNKHTVFGRVVKGMDVVQGIEKVKTDKNDRPYQDVKILNVTVPKS

SEQ ID NO: 90189 - protein, 600 aa, Arabidopsis thaliana
  peptide (1)..(600): Ceres Seq. ID no. 12722935
MVGPGPAPRGKRKRPLQFEQAYLDSLPSANMYEKSYMHRDVVTHVAVSAAEFFISGSMDGHLKFWKKKGVGIEFAKHFRSHLGPIEGLAVSIDGLLCCTISNDHAVKIYDVVNYDMMAMIRLPYIPGAVEWVYKQGDVKAKLAVSDRDSLFVHIYDPRSGSNEPIASKEIHMNPIKVMKYNPVSDTMISGDTKGIIEYWSATTLQFPEDEVNFKLKSDTNLFEIIKCKTTISAIEVSPDGKQFSITAPDRRIRVFWFRTGKLRRVYDESLVVAQDLQRSDAPLYRLEAIDFGRRMAVEKELEKTESAPQPNAVFDESSNFLIYATFLGIKVINLHTNTVARILGKVESNERYLRVALYQGDQGGKKVRKIPAAAANVNESKEPLTDPTILCCAFKKHRIYMFSRREPEEPEDASQGRDVFNEKPAADELMSVSDIGNSATTSLPENVIMHTTLGDIHMKLYPEECPKTVENFTTHCRNGYYDNHLFHRVIRGFMIQTGDPLGDGTGGQSIWGREFEDEFHKSLRHDRPFTLSMANAGPNTNGSQFFITTVATPWLDNKHTVFGRVVKGMDVVQGIEKVKTDKNDRPYQDVKILNVTVPKS

SEQ ID NO: 90190 - protein, 570 aa, Arabidopsis thaliana
  peptide (1)..(570): Ceres Seq. ID no. 12722936
MYEKSYMHRDVVTHVAVSAAEFFISGSMDGHLKFWKKKGVGIEFAKHFRSHLGPIEGLAVSIDGLLCCTISNDHAVKIYDVVNYDMMAMIRLPYIPGAVEWVYKQGDVKAKLAVSDRDSLFVHIYDPRSGSNEPIASKEIHMNPIKVMKYNPVSDTMISGDTKGIIEYWSATTLQFPEDEVNFKLKSDTNLFEIIKCKTTISAIEVSPDGKQFSITAPDRRIRVFWFRTGKLRRVYDESLVVAQDLQRSDAPLYRLEAIDFGRRMAVEKELEKTESAPQPNAVFDESSNFLIYATFLGIKVINLHTNTVARILGKVESNERYLRVALYQGDQGGKKVRKIPAAAANVNESKEPLTDPTILCCAFKKHRIYMFSRREPEEPEDASQGRDVFNEKPAADELMSVSDIGNSATTSLPENVIMHTTLGDIHMKLYPEECPKTVENFTTHCRNGYYDNHLFHRVIRGFMIQTGDPLGDGTGGQSIWGREFEDEFHKSLRHDRPFTLSMANAGPNTNGSQFFITTVATPWLDNKHTVFGRVVKGMDVVQGIEKVKTDKNDRPYQDVKILNVTVPKS

SEQ ID NO: 90191 - DNA, 3270 bp, Arabidopsis thaliana
  misc_feature (1)..(3270): Ceres Seq. ID no. 12722955
  misc_feature (1)..(3270): Ortholog of  Ceres SEQ ID NO 13600310 as cited in SEQ ID NO 5086
atggaccaaggcgcgatggagacactcccggaaaaaccgtcggaagacgagttctccctcgccctccgcaacggcctcattctctgcaacgtcctcaacaaagtcaatcccggttctgttctcaaggtggtggagaatccgattacgccagctattcagtacgcggatggagcggcgcaatcggcaattcaatattttgagaacatgaggaactttcttaaagctgtagaggatatgcagcttttaacatttggagcttctgatctcgagaagggaggatcgtcgaacaaagtagtagattgtattttgtgtttgaaaggtttttacgagtggaaacaagcgggtggagttggagtatggaggtatggagggactgtgaggatagtatcattcaatcgaaaaggcagttctccgccgcagtatgggattggtagtgaaagtactaccgatgagtctgtttctttggatgaatctgagtcttctcagtatgaccagcttttggattttcttcatctttctaatgagatctcagctgaggaatctgaaactgcaatctccttggcttttctttttgatcatttcgcgcttcagcttctacatggttaccttaaggagagtgatgggatcaatgatatgcctttaaatgaaatggtgattgatacattgctgaacagggtagttaaggatttctctgcaatactagtttctcagggagctcagctgggttcgtttctaaggaaaatactgaaatgtgataacggggatctgtcaagatcagagtttctagcagcagtcttcagataccttcagcacagaaaagatttggtgtcaaaggagttttcaaagttttgtaaatgtggcggaaagcttgagtttagtagactaaacgcccgcgaattttctccgggtcatgtagaagctattggtcttcaacagaaagagctggaggaagttaaatcaaattttgtggaaacaagaagccaagttaaacaaatgcagtcagaatggcagaaagagcttcagaggatagtccatcacgttaaggccatggaagttacatcttcttcttaccacaaggttctggaggaaaatcgcttactttacaatgaggttcaagatctcaaaggcaccattagagtttactgcagagtcagacctttcttccaagaacaaaaagatatgcaatcaactgtggattatattggagaaaatggtaatattatcattaacaatcctttcaagcaggagaaagatgcacggaaaatattttccttcaacaaagtatttggacagactgtctcacaagagcaaatctacattgacactcaaccggtaataaggtccgtcctcgacggattcaatgtttgtatcttcgcgtatgggcaaaccggttcagggaaaacgtatacgatgagtgggccagatctgatgacggagacaacttggggcgtgaactaccgagctctacgcgatctcttccagctttcaaatgcaagaacacatgtggtgacttatgaaattggagtccaaatgatcgaaatatataatgaacaagttagagatctactaaatcccgtaatccttgaccagtttctcacattagacatacgcaataattctcaactcaatggccttaatgtacccgatgcaaacttgattccagtttctaatactcgagatgtccttgatttgatgaggattggccaaaagaatcgtgctgtgggtgccactgctttgaatgagaggagcagccgttctcatagtgtattaactgttcacgtccaaggaaaagaattggcctcaggatccattttaagaggctgccttcatttagtggatttggctggaagtgaaagagtagaaaaatccgaagctgtaggcgagagactcaaagaagctcaacacataaacaaatcgttgtctgcattaggagatgtcatttatgcacttgcacaaaagagttcccacgttccctacagaaatagcaagcttacacaagttctgcaggactccttaggtggacaagcaaaaactttaatgtttgtacatattaatcctgaagttaatgcggtaggggagactatcagcacccttaagtttgcccaaagggttgcatccattgagcttggagcagctcgatcaaacaaggaaaccggtgaaattcgagatcttaaggatgagatatccagccttaaatcggccatggagaagaaggaagcagagctggaacaattgcgatcaggtagcattcggaacacaactgaatgtcagagagcaagagcagtttctcctttccatctcccaagaactggtaacggtgctggaacaaaggctgaggcaagtccacagccaaacgacggtaccagaagctacgagaccagaagttgctcaactggcaagcagagaaagtcagggtttccgtctgcactgagaaatagagaagcaagcccgaggatgccgaatctagcagaagagaggttaaatccgagtccaagtaggagatcactatccacagacagagcatcaaccatcaaaagtaggaataagcccgacgttacccaaaaccttccggtttcaagaacaccttttccagctagagtaccagtagtcaaatccttttcaactgttccattgaacccatcagcagaaaataaccacaggcttcacactgataactcttcagaggcatttcaaaatcatcagaagttaagcgctcgaaagctcttccctgagatcgaggaggaacacataaggcatgcactacacatacgtcaaggtggtgttaagaagaccagagccgagagcagtaaagccaaggcaaagcaaccatcaccagctaggtttcagaaactcgatgttgggatcagtttgcgttctgatgcagattctgaagcaaaggtaggaaattatcagacccaaaaggggaacaacaaccacaatgtgatacactcaagattccaaaacttcgacgtgggtatcagcctattctctgacctttgtgccggtgacaaatcagattcaacactcaagagtgattcctcagagacagacaacgaaccaccctcgaaatctaagaatgcccaaagaaactcgtccaaaaactccctcaaccacaaactaaggacgatctatgctcatgaggacacttcactcgtggacgacaagccttctaatggtacagcccatatcaaagaaggtaataataatatatctatgcctgagttcaggagaagtcgttcaacacatcatgcaaggttcatggtaccatag

SEQ ID NO: 90192 - protein, 1089 aa, Arabidopsis thaliana
  peptide (1)..(1089): Ceres Seq. ID no. 12722956
MDQGAMETLPEKPSEDEFSLALRNGLILCNVLNKVNPGSVLKVVENPITPAIQYADGAAQSAIQYFENMRNFLKAVEDMQLLTFGASDLEKGGSSNKVVDCILCLKGFYEWKQAGGVGVWRYGGTVRIVSFNRKGSSPPQYGIGSESTTDESVSLDESESSQYDQLLDFLHLSNEISAEESETAISLAFLFDHFALQLLHGYLKESDGINDMPLNEMVIDTLLNRVVKDFSAILVSQGAQLGSFLRKILKCDNGDLSRSEFLAAVFRYLQHRKDLVSKEFSKFCKCGGKLEFSRLNAREFSPGHVEAIGLQQKELEEVKSNFVETRSQVKQMQSEWQKELQRIVHHVKAMEVTSSSYHKVLEENRLLYNEVQDLKGTIRVYCRVRPFFQEQKDMQSTVDYIGENGNIIINNPFKQEKDARKIFSFNKVFGQTVSQEQIYIDTQPVIRSVLDGFNVCIFAYGQTGSGKTYTMSGPDLMTETTWGVNYRALRDLFQLSNARTHVVTYEIGVQMIEIYNEQVRDLLNPVILDQFLTLDIRNNSQLNGLNVPDANLIPVSNTRDVLDLMRIGQKNRAVGATALNERSSRSHSVLTVHVQGKELASGSILRGCLHLVDLAGSERVEKSEAVGERLKEAQHINKSLSALGDVIYALAQKSSHVPYRNSKLTQVLQDSLGGQAKTLMFVHINPEVNAVGETISTLKFAQRVASIELGAARSNKETGEIRDLKDEISSLKSAMEKKEAELEQLRSGSIRNTTECQRARAVSPFHLPRTGNGAGTKAEASPQPNDGTRSYETRSCSTGKQRKSGFPSALRNREASPRMPNLAEERLNPSPSRRSLSTDRASTIKSRNKPDVTQNLPVSRTPFPARVPVVKSFSTVPLNPSAENNHRLHTDNSSEAFQNHQKLSARKLFPEIEEEHIRHALHIRQGGVKKTRAESSKAKAKQPSPARFQKLDVGISLRSDADSEAKVGNYQTQKGNNNHNVIHSRFQNFDVGISLFSDLCAGDKSDSTLKSDSSETDNEPPSKSKNAQRNSSKNSLNHKLRTIYAHEDTSLVDDKPSNGTAHIKEGNNNISMPEFRRSRSTHHARFMVP

SEQ ID NO: 90193 - protein, 1084 aa, Arabidopsis thaliana
  peptide (1)..(1084): Ceres Seq. ID no. 12722957
METLPEKPSEDEFSLALRNGLILCNVLNKVNPGSVLKVVENPITPAIQYADGAAQSAIQYFENMRNFLKAVEDMQLLTFGASDLEKGGSSNKVVDCILCLKGFYEWKQAGGVGVWRYGGTVRIVSFNRKGSSPPQYGIGSESTTDESVSLDESESSQYDQLLDFLHLSNEISAEESETAISLAFLFDHFALQLLHGYLKESDGINDMPLNEMVIDTLLNRVVKDFSAILVSQGAQLGSFLRKILKCDNGDLSRSEFLAAVFRYLQHRKDLVSKEFSKFCKCGGKLEFSRLNAREFSPGHVEAIGLQQKELEEVKSNFVETRSQVKQMQSEWQKELQRIVHHVKAMEVTSSSYHKVLEENRLLYNEVQDLKGTIRVYCRVRPFFQEQKDMQSTVDYIGENGNIIINNPFKQEKDARKIFSFNKVFGQTVSQEQIYIDTQPVIRSVLDGFNVCIFAYGQTGSGKTYTMSGPDLMTETTWGVNYRALRDLFQLSNARTHVVTYEIGVQMIEIYNEQVRDLLNPVILDQFLTLDIRNNSQLNGLNVPDANLIPVSNTRDVLDLMRIGQKNRAVGATALNERSSRSHSVLTVHVQGKELASGSILRGCLHLVDLAGSERVEKSEAVGERLKEAQHINKSLSALGDVIYALAQKSSHVPYRNSKLTQVLQDSLGGQAKTLMFVHINPEVNAVGETISTLKFAQRVASIELGAARSNKETGEIRDLKDEISSLKSAMEKKEAELEQLRSGSIRNTTECQRARAVSPFHLPRTGNGAGTKAEASPQPNDGTRSYETRSCSTGKQRKSGFPSALRNREASPRMPNLAEERLNPSPSRRSLSTDRASTIKSRNKPDVTQNLPVSRTPFPARVPVVKSFSTVPLNPSAENNHRLHTDNSSEAFQNHQKLSARKLFPEIEEEHIRHALHIRQGGVKKTRAESSKAKAKQPSPARFQKLDVGISLRSDADSEAKVGNYQTQKGNNNHNVIHSRFQNFDVGISLFSDLCAGDKSDSTLKSDSSETDNEPPSKSKNAQRNSSKNSLNHKLRTIYAHEDTSLVDDKPSNGTAHIKEGNNNISMPEFRRSRSTHHARFMVP

SEQ ID NO: 90194 - protein, 1021 aa, Arabidopsis thaliana
  peptide (1)..(1021): Ceres Seq. ID no. 12722958
MRNFLKAVEDMQLLTFGASDLEKGGSSNKVVDCILCLKGFYEWKQAGGVGVWRYGGTVRIVSFNRKGSSPPQYGIGSESTTDESVSLDESESSQYDQLLDFLHLSNEISAEESETAISLAFLFDHFALQLLHGYLKESDGINDMPLNEMVIDTLLNRVVKDFSAILVSQGAQLGSFLRKILKCDNGDLSRSEFLAAVFRYLQHRKDLVSKEFSKFCKCGGKLEFSRLNAREFSPGHVEAIGLQQKELEEVKSNFVETRSQVKQMQSEWQKELQRIVHHVKAMEVTSSSYHKVLEENRLLYNEVQDLKGTIRVYCRVRPFFQEQKDMQSTVDYIGENGNIIINNPFKQEKDARKIFSFNKVFGQTVSQEQIYIDTQPVIRSVLDGFNVCIFAYGQTGSGKTYTMSGPDLMTETTWGVNYRALRDLFQLSNARTHVVTYEIGVQMIEIYNEQVRDLLNPVILDQFLTLDIRNNSQLNGLNVPDANLIPVSNTRDVLDLMRIGQKNRAVGATALNERSSRSHSVLTVHVQGKELASGSILRGCLHLVDLAGSERVEKSEAVGERLKEAQHINKSLSALGDVIYALAQKSSHVPYRNSKLTQVLQDSLGGQAKTLMFVHINPEVNAVGETISTLKFAQRVASIELGAARSNKETGEIRDLKDEISSLKSAMEKKEAELEQLRSGSIRNTTECQRARAVSPFHLPRTGNGAGTKAEASPQPNDGTRSYETRSCSTGKQRKSGFPSALRNREASPRMPNLAEERLNPSPSRRSLSTDRASTIKSRNKPDVTQNLPVSRTPFPARVPVVKSFSTVPLNPSAENNHRLHTDNSSEAFQNHQKLSARKLFPEIEEEHIRHALHIRQGGVKKTRAESSKAKAKQPSPARFQKLDVGISLRSDADSEAKVGNYQTQKGNNNHNVIHSRFQNFDVGISLFSDLCAGDKSDSTLKSDSSETDNEPPSKSKNAQRNSSKNSLNHKLRTIYAHEDTSLVDDKPSNGTAHIKEGNNNISMPEFRRSRSTHHARFMVP

SEQ ID NO: 90195 - DNA, 961 bp, Arabidopsis thaliana
  misc_feature (1)..(961): Ceres Seq. ID no. 12722959
  misc_feature (1)..(961): Ortholog of  Ceres SEQ ID NO 12333459 as cited in SEQ ID NO 20477
  misc_feature (1)..(961): Ortholog of  Ceres SEQ ID NO 15176155 as cited in SEQ ID NO 0
acattttcagctgctcataaaccctaaaaatcctctctttttctcaaccttgattcttagccatggagttctggggaattgaagttaaatcaggaaagccagttacagtgactcctgaagaaggcattcttatccacgtttctcaggcatcgcttggagaatgtaaaaacaagaagggagagtttgtgcctttacatgtaaaggttgggaaccagaacttggttctgggaactctatcgactgagaacatccctcagcttttctgtgatttggtattcgacaaggagtttgagctttctcacacttggggaaaaggaagtgtttactttgttggatacaaaactcccaacattgagccacaaggctattctgaggaagaagaggaagaagaggaagaagttcctgctgggaatgctgccaaggctgtagctaaaccaaaggctaagcctgcagaagtgaagccagctgttgatgatgaagaggatgagtctgattctgacggaatggatgaagatgattctgatggtgaggattctgaggaagaagagcctacacctaagaagcctgcatcaagcaagaagagagctaatgaaactacccctaaagcacctgtgtcagcaaagaaggcgaaagtagcagttactcctcagaaaacagatgagaagaagaaagggggaaaggctgcaaaccagagcccaaagtcggccagtcaagtctcatgtggttcatgcaagaagactttcaactcagggaatgcacttgagtctcacaacaaggccaagcacgctgctgccaagtgaagtggtttcttattagagcttgtgatttctatggaattttgcctgtagtctttatgaaaccttcggattttcttatattttcttttgataacaagagtcttaatgaaagagagccagttggagtcttattaccactatatttcaacattctatcttggctc

SEQ ID NO: 90196 - protein, 245 aa, Arabidopsis thaliana
  peptide (1)..(245): Ceres Seq. ID no. 12722960
MEFWGIEVKSGKPVTVTPEEGILIHVSQASLGECKNKKGEFVPLHVKVGNQNLVLGTLSTENIPQLFCDLVFDKEFELSHTWGKGSVYFVGYKTPNIEPQGYSEEEEEEEEEVPAGNAAKAVAKPKAKPAEVKPAVDDEEDESDSDGMDEDDSDGEDSEEEEPTPKKPASSKKRANETTPKAPVSAKKAKVAVTPQKTDEKKKGGKAANQSPKSASQVSCGSCKKTFNSGNALESHNKAKHAAAK

SEQ ID NO: 90197 - DNA, 1605 bp, Arabidopsis thaliana
  misc_feature (1)..(1605): Ceres Seq. ID no. 12722978
  misc_feature (1)..(1605): Ortholog of  Ceres SEQ ID NO 15176588 as cited in SEQ ID NO 60461
atggcggaggacaaaaacaacggacgtgtgaatgacgaaagtgagtactcgtcggaggacgaaggaacagaggattataagaaaggaggataccatacagtaagagtcggtgatacttttaagaatggagcttatgtgattcagagtaaacttggttgggggcatttctccactgtttggcttgcttgggatacgcaagaatcgcgttatgtagctttgaaagttcagaagagtgctcaacattatacagaggcagcaatggatgagataaagattttgaaacagatagctgaaggtgactcgggtgataagaagtgtgttgtaaagctactggatcatttcaagcatacgggtcctaatgggaagcatgtttgtatggttttcgagtatttgggagataaccttttgtcggttattaagtacagtgattaccgaggggttcctcttcacatggttaaagagctttgttttcatattttggttgggttggattatcttcatcgtgagctttctattattcatactgatttaaagccggagaatgttctgcttttgtctacgattgatccgtcgagagatgtgaggagatcaggtgttccacttgttctgcctataaccaaggacaagattgtttctgagtctgctgttaaacctgaaactaaaagttatacgtacaatggtgatttgacaaagaatcagaagaagaagattcgtaagaaagcgaagaaggtggtggctcaagattttggtggagaggaagctttggaagaaagtgagagagattctaactccgaagcaagaataaatggcaattccaccgtagagagatctgaaggaagttccacaagattaatggaaggtgaagaagccagagagaaggctaacaaaaagaatggtcggggtagtaggagaggaagccgatccacaaggcagaaattactgagtgatatagagtgcaaatgcaaattagtagattttgggaatgcttgttggacatataaacagttcacaagcgatattcagacaagacagtatcgatgtccagaggttgttcttggctcaaaatactcaacttctgcagatatgtggtcctttgcttgtatttgtttcgagctggccaccggagatgtcttgttcgatcctcacagtggtgaaaattatgaccgggatgaggatcacctggcattgatgatggagcttctagggatgatgccacgaaagattgcattaggtggtcgatactcacgagatttcttcaaccgacaaggtgagctaaggcacatccggcggttgcggttttggcccatcagcaaagtcttgaaggagaaatatgatttcagcgagcaggacgcaaaagacatgtcagatttcttagtcacaattcttgaatttgtgcctgagaagagaccaacagccgcccaatgcctaaaacacccatggttcaatcctggcccgagattgcttgaaccgtcactgaaaccacaacaaccaaaaggagaagaagaaggagcagcaaatgagaacatagaaaaggaaaaggacgaaagagaagcaatggaagctggtgtagggaatatcgctattgatgtctctgaaccgaagtga

SEQ ID NO: 90198 - protein, 534 aa, Arabidopsis thaliana
  peptide (1)..(534): Ceres Seq. ID no. 12722979
MAEDKNNGRVNDESEYSSEDEGTEDYKKGGYHTVRVGDTFKNGAYVIQSKLGWGHFSTVWLAWDTQESRYVALKVQKSAQHYTEAAMDEIKILKQIAEGDSGDKKCVVKLLDHFKHTGPNGKHVCMVFEYLGDNLLSVIKYSDYRGVPLHMVKELCFHILVGLDYLHRELSIIHTDLKPENVLLLSTIDPSRDVRRSGVPLVLPITKDKIVSESAVKPETKSYTYNGDLTKNQKKKIRKKAKKVVAQDFGGEEALEESERDSNSEARINGNSTVERSEGSSTRLMEGEEAREKANKKNGRGSRRGSRSTRQKLLSDIECKCKLVDFGNACWTYKQFTSDIQTRQYRCPEVVLGSKYSTSADMWSFACICFELATGDVLFDPHSGENYDRDEDHLALMMELLGMMPRKIALGGRYSRDFFNRQGELRHIRRLRFWPISKVLKEKYDFSEQDAKDMSDFLVTILEFVPEKRPTAAQCLKHPWFNPGPRLLEPSLKPQQPKGEEEGAANENIEKEKDEREAMEAGVGNIAIDVSEPK

SEQ ID NO: 90199 - protein, 448 aa, Arabidopsis thaliana
  peptide (1)..(448): Ceres Seq. ID no. 12722980
MDEIKILKQIAEGDSGDKKCVVKLLDHFKHTGPNGKHVCMVFEYLGDNLLSVIKYSDYRGVPLHMVKELCFHILVGLDYLHRELSIIHTDLKPENVLLLSTIDPSRDVRRSGVPLVLPITKDKIVSESAVKPETKSYTYNGDLTKNQKKKIRKKAKKVVAQDFGGEEALEESERDSNSEARINGNSTVERSEGSSTRLMEGEEAREKANKKNGRGSRRGSRSTRQKLLSDIECKCKLVDFGNACWTYKQFTSDIQTRQYRCPEVVLGSKYSTSADMWSFACICFELATGDVLFDPHSGENYDRDEDHLALMMELLGMMPRKIALGGRYSRDFFNRQGELRHIRRLRFWPISKVLKEKYDFSEQDAKDMSDFLVTILEFVPEKRPTAAQCLKHPWFNPGPRLLEPSLKPQQPKGEEEGAANENIEKEKDEREAMEAGVGNIAIDVSEPK

SEQ ID NO: 90200 - protein, 409 aa, Arabidopsis thaliana
  peptide (1)..(409): Ceres Seq. ID no. 12722981
MVFEYLGDNLLSVIKYSDYRGVPLHMVKELCFHILVGLDYLHRELSIIHTDLKPENVLLLSTIDPSRDVRRSGVPLVLPITKDKIVSESAVKPETKSYTYNGDLTKNQKKKIRKKAKKVVAQDFGGEEALEESERDSNSEARINGNSTVERSEGSSTRLMEGEEAREKANKKNGRGSRRGSRSTRQKLLSDIECKCKLVDFGNACWTYKQFTSDIQTRQYRCPEVVLGSKYSTSADMWSFACICFELATGDVLFDPHSGENYDRDEDHLALMMELLGMMPRKIALGGRYSRDFFNRQGELRHIRRLRFWPISKVLKEKYDFSEQDAKDMSDFLVTILEFVPEKRPTAAQCLKHPWFNPGPRLLEPSLKPQQPKGEEEGAANENIEKEKDEREAMEAGVGNIAIDVSEPK

SEQ ID NO: 90201 - DNA, 918 bp, Arabidopsis thaliana
  misc_feature (1)..(918): Ceres Seq. ID no. 12722982
  misc_feature (1)..(918): Ortholog of  Ceres SEQ ID NO 15179163 as cited in SEQ ID NO 0
aagaagataacaattactacaactgtgcgctcttgttatctctgctttgaagtgaaatcagctttggctatggcttcttcgacagctttgtctctctcatggagctcctctccttgttggtcacacagcttcaatggcggtgcaaatgaaaccctaaaagtatctgagcgaaggttcaattttgaagttgtttcccagaagaaagctaagaaacttcgcaaggtaattttgaaagaggatgtgacggatttgggtaagcaagggcaattacttgatgtgaaagctggatttttcagaaacttcctcttgcctactggaaaggctcagcttatgactccacttctgctcaaggaattgaagatggaagacgaacggattgaggcagagaagcaaagggtgaaagaagaggcacaacaactggcgatggtattccaaaccgttggtgctttcaaggttaaacgcaaaggcggtaaaggcaaactgatatttggatctgtcacagctcaagacctcgtcgacatcatcaaatcacagctccaaaaggacatcgacaaacgccttgtctctctcccagaaatccgtgaaaccggagaatacatagccgaactcaagcttcaccccgatgtcactgctcgagttaagatcaatgttttcgctaactaaaccttcaacgattcaagactcctactgcatcccaaggaacgtatagagagggaaaagagagtagcctcttgtggtgaggattgaaggttgtgaagtttttcctttagattgtttgatgcatttgtatttttgctatttttggaatctggaaacgctaaaagtataatattctcttgcaagttatgatatttacttgaagttatattgtattcatttgtctgttgaagtgatgagaatgcttaaattaacactaac

SEQ ID NO: 90202 - protein, 220 aa, Arabidopsis thaliana
  peptide (1)..(220): Ceres Seq. ID no. 12722983
KKITITTTVRSCYLCFEVKSALAMASSTALSLSWSSSPCWSHSFNGGANETLKVSERRFNFEVVSQKKAKKLRKVILKEDVTDLGKQGQLLDVKAGFFRNFLLPTGKAQLMTPLLLKELKMEDERIEAEKQRVKEEAQQLAMVFQTVGAFKVKRKGGKGKLIFGSVTAQDLVDIIKSQLQKDIDKRLVSLPEIRETGEYIAELKLHPDVTARVKINVFAN

SEQ ID NO: 90203 - protein, 197 aa, Arabidopsis thaliana; identical to SEQ ID NO: 75073
  peptide (1)..(197): Ceres Seq. ID no. 12722984

SEQ ID NO: 90204 - protein, 110 aa, Arabidopsis thaliana; identical to SEQ ID NO: 75074
  peptide (1)..(110): Ceres Seq. ID no. 12722985

SEQ ID NO: 90205 - DNA, 1896 bp, Arabidopsis thaliana
  misc_feature (1)..(1896): Ceres Seq. ID no. 12723002
  misc_feature (1)..(1896): Ortholog of  Ceres SEQ ID NO 14311232 as cited in SEQ ID NO 53073
atcgcgccttaaaacaacgaatctccggcgaaatcatcatcttctccggcgatgaagacgacggcgacgtcgtttgtaacgggagagagagttgtagttttcgtcgtggtttctcgtattctcttatctcttcctttatcacttatctcccatggcttctccctcttcctcctctctctctccgccttcctcgtcgagatccgcgtcgagacttctccgtttcttctctctcatttcagctccagacgcggtgcgtcttcagggatattactaggagctgtgacacttccttctgttatgatatctaagttagttcagctttcaagagctatttcaatccatgaagctgaacaagatgagcttgcacatgtgacaatgcagtattgggcagcatcggctagttgttgtgctatacttatatatctatcagtgattatgtcacaagtgagaaaagatgaatctttgtcgtcatcgtctatttggcttacgagagttagcttgactgggacagtgttgtatggagtagcatgttttgtttcactttccatgatttcacacactggcttgaatacgtcattgaaaatgttgtggatgttatttcatggacttgcagctgtgaagttgattcgacatttgctttgcactttcccatcgtgtgcttcgataggggaagcacttcttgtgaccagtggtcttgttctctattttggcgactttttggcatgcacaattgcaaagatttttgagaaattgatacctgtggatcttgtctcaataagctatggaataaagagaacggaaaccggcataatcgttcagggtctactgttgggccttctacttttcccgatggtgtttagatttgttctgcatatatatgaaagctctttgagaaagagagatgctcgacaaagaaactgcagtgatgctgcaaaatctgtcttattctttgtttcacttctattttttatggtcgtggctgttccttcttggatgcagtttgtacacgatttcaaccagcatcccttcttatgggtgctcacatttgtcttttctgaacctctgaagagactttcattatgtatctactggattctgttgatcgttgtgtctgtctcacgattttataacatctcgaggagtagcaaggttgagagaatcttgcttcggaagtactaccatctgatggctgttttaatgttcttgccagctcttgtcttacagcctaaatttctcgatctagcatttggtgcagcattggcagtatttgttgcattggagatcattcgaatatggagaattcagcctcttggagagcctttacatcaattcatgaatgctttcactgaccatcgtgactcagagcatctgattgtcagccacttctcactcttgcttgggtgtgcgcttccgatttggatgtcatctgggttcaatgaccgagccttatctccatttgctggaattctcagcctaggaattggagatacaatggcatcgatggttggtcacaaatatggggtgttgagatggagcaagacaggaaagaaaacggttgaaggaacagcagcgggaataacatcgatgatggcagtgtgctttgttctggtcccaatattagcatcaatgggttatatactaagtcaaggatggtggtcgcttctggtggctgtgacagccaccgggatgttggaagcttacacggcgcagttagacaatgcctttatacctcttgtcttctactcactcctctgcttgtaaattagttaagcctagagtcaacattctacgttttttcacttcatgtacataacaaagtatcttactactaaccatacttcctcttgttaattgccgtatctctttaagagacaaatgtgttttttgatctcaact

SEQ ID NO: 90206 - protein, 569 aa, Arabidopsis thaliana
  peptide (1)..(569): Ceres Seq. ID no. 12723003
MKTTATSFVTGERVVVFVVVSRILLSLPLSLISHGFSLFLLSLSAFLVEIRVETSPFLLSHFSSRRGASSGILLGAVTLPSVMISKLVQLSRAISIHEAEQDELAHVTMQYWAASASCCAILIYLSVIMSQVRKDESLSSSSIWLTRVSLTGTVLYGVACFVSLSMISHTGLNTSLKMLWMLFHGLAAVKLIRHLLCTFPSCASIGEALLVTSGLVLYFGDFLACTIAKIFEKLIPVDLVSISYGIKRTETGIIVQGLLLGLLLFPMVFRFVLHIYESSLRKRDARQRNCSDAAKSVLFFVSLLFFMVVAVPSWMQFVHDFNQHPFLWVLTFVFSEPLKRLSLCIYWILLIVVSVSRFYNISRSSKVERILLRKYYHLMAVLMFLPALVLQPKFLDLAFGAALAVFVALEIIRIWRIQPLGEPLHQFMNAFTDHRDSEHLIVSHFSLLLGCALPIWMSSGFNDRALSPFAGILSLGIGDTMASMVGHKYGVLRWSKTGKKTVEGTAAGITSMMAVCFVLVPILASMGYILSQGWWSLLVAVTATGMLEAYTAQLDNAFIPLVFYSLLCL

SEQ ID NO: 90207 - protein, 487 aa, Arabidopsis thaliana; identical to SEQ ID NO: 86417
  peptide (1)..(487): Ceres Seq. ID no. 12723004

SEQ ID NO: 90208 - protein, 461 aa, Arabidopsis thaliana; identical to SEQ ID NO: 86418
  peptide (1)..(461): Ceres Seq. ID no. 12723005

SEQ ID NO: 90209 - DNA, 972 bp, Arabidopsis thaliana
  misc_feature (1)..(972): Ceres Seq. ID no. 12723010
  misc_feature (1)..(972): Ortholog of  Ceres SEQ ID NO 15174863 as cited in SEQ ID NO 51281
  misc_feature (1)..(972): Ortholog of  Ceres SEQ ID NO 12614972 as cited in SEQ ID NO 61986
  misc_feature (1)..(972): Ortholog of  Ceres SEQ ID NO 14302317 as cited in SEQ ID NO 63244
  misc_feature (1)..(972): Ortholog of  Ceres SEQ ID NO 12625706 as cited in SEQ ID NO 64144
  misc_feature (1)..(972): Ortholog of  Ceres SEQ ID NO 13584933 as cited in SEQ ID NO 65009
  misc_feature (1)..(972): Ortholog of  Ceres SEQ ID NO 12634984 as cited in SEQ ID NO 0
  misc_feature (1)..(972): Ortholog of  Ceres SEQ ID NO 13599377 as cited in SEQ ID NO 0
atggagatgaacttgagaattgaagacctaaacgaagaaacaaagactctaatctcttcacttccttcagacaaagatttcactgggaaaactatttgcaagtatcaaggatgttggtatactcacaatgttcttcaagctgtcctcaatttccagaaaagcttcaagcctcaagacaccgatatcatcgttgcttcgttccctaaatgcggcaccacttggctcaaggcgcttacattcgcactccttcatagatcaaaacagccttctcatgatgatgatcatcctcttctttctaataatccacacgttcttgtaccctactttgagatagatctctatctacgtagcgaaaatcctgaccttaccaagttctcatcatctccgaggctgttttcgacacacgtgccgtcacatacgttgcaagaaggtctcaaaggttctacttgtaaaattgtgtatatatctagaaacgtaaaagacacattggtttcatattggcatttctttactaagaaacaaaccgatgaaaaaataataagcagtttcgaggatacgtttgagatgttttgtaggggagtcagcattttcgggcctttttgggatcatgtcttaagctattggagaggaagcttggaagatccaaaccatgtgctttttatgaagtttgaagagatgaaagcagaacctcgtgaccagatcaagaaatttgccgagttcttaggttgtccttttactaaggaagaagaagagagcggatcggtggatgagattatcgatctttgttctctacgtaatctgagcagtttggagatcaataagaccggaaaattgaattctggtagagaaaacaaaatgtttttccgtaaaggagaagttggtgattggaagaactatttgactcctgaaatggagaacaaaatcgacatgatcattcaagagaaacttcaaaactctggtttgaaattctga

SEQ ID NO: 90210 - protein, 323 aa, Arabidopsis thaliana
  peptide (1)..(323): Ceres Seq. ID no. 12723011
MEMNLRIEDLNEETKTLISSLPSDKDFTGKTICKYQGCWYTHNVLQAVLNFQKSFKPQDTDIIVASFPKCGTTWLKALTFALLHRSKQPSHDDDHPLLSNNPHVLVPYFEIDLYLRSENPDLTKFSSSPRLFSTHVPSHTLQEGLKGSTCKIVYISRNVKDTLVSYWHFFTKKQTDEKIISSFEDTFEMFCRGVSIFGPFWDHVLSYWRGSLEDPNHVLFMKFEEMKAEPRDQIKKFAEFLGCPFTKEEEESGSVDEIIDLCSLRNLSSLEINKTGKLNSGRENKMFFRKGEVGDWKNYLTPEMENKIDMIIQEKLQNSGLKF

SEQ ID NO: 90211 - protein, 321 aa, Arabidopsis thaliana
  peptide (1)..(321): Ceres Seq. ID no. 12723012
MNLRIEDLNEETKTLISSLPSDKDFTGKTICKYQGCWYTHNVLQAVLNFQKSFKPQDTDIIVASFPKCGTTWLKALTFALLHRSKQPSHDDDHPLLSNNPHVLVPYFEIDLYLRSENPDLTKFSSSPRLFSTHVPSHTLQEGLKGSTCKIVYISRNVKDTLVSYWHFFTKKQTDEKIISSFEDTFEMFCRGVSIFGPFWDHVLSYWRGSLEDPNHVLFMKFEEMKAEPRDQIKKFAEFLGCPFTKEEEESGSVDEIIDLCSLRNLSSLEINKTGKLNSGRENKMFFRKGEVGDWKNYLTPEMENKIDMIIQEKLQNSGLKF

SEQ ID NO: 90212 - DNA, 1050 bp, Arabidopsis thaliana
  misc_feature (1)..(1050): Ceres Seq. ID no. 12723062
  misc_feature (1)..(1050): Ortholog of  Ceres SEQ ID NO 13597380 as cited in SEQ ID NO 64054
  misc_feature (1)..(1050): Ortholog of  Ceres SEQ ID NO 12625474 as cited in SEQ ID NO 64169
  misc_feature (1)..(1050): Ortholog of  Ceres SEQ ID NO 13597502 as cited in SEQ ID NO 64681
atgaagattcaaatattattgttcgctttggttttaatcttcgtggaagctaatgcagcgacgcaaggaaaaaacacaacaatcccagcactaatagtttttggagattcaataatggatacaggaaataacaataatcttcccactcttctaaagtgtaactttcctccatatggaaaagattatcctggaggcttcgctactggaagattttctgatggaagagttccttctgatcttattgcggaaaagttgggattggctaagacattaccagcatatatgaatccgtatttgaagccagaggatcttcttaaaggtgtaacatttgcatctggaggaactggttatgatccattgacagcaaaaattatgtcagtaatatcggtgtgggatcaactcataaatttcaaagaatatatatcaaagatcaagaggcatttcggagaagaaaaagccaaagatatcttggaacatagtttctttcttgtggtgtctagtagcaatgaccttgctcacacttatttagctcaaactcatcgatatgatcgtacctcttatgccaatttcttggctgactctgctgtccatttcgtgagagaattacataagcttggagctcggaaaataggagtgtttagtgcagtccccgtcggttgtgttccactccaaagaacagtttttggaggtttttttacaagaggatgtaatcaacctctaaacaacatggcaaaacaatttaacgcaagactttctccagctttagattctttagataaagagctagatggtgttatcctttacattaatgtttatgatactcttttcgacatgatccaacaccctaaaaaatacggttttgaggtagctgatagaggatgttgcggtaaaggattgcttgcgatatcctatttgtgtaactcattgaacccatttacgtgttctaattcttcagcatacatattttgggatagctatcatccatctgaaagagcttatcaagttatcgtcgacaatttactcgacaaatatttgagcaaagtctattga

SEQ ID NO: 90213 - protein, 349 aa, Arabidopsis thaliana
  peptide (1)..(349): Ceres Seq. ID no. 12723063
MKIQILLFALVLIFVEANAATQGKNTTIPALIVFGDSIMDTGNNNNLPTLLKCNFPPYGKDYPGGFATGRFSDGRVPSDLIAEKLGLAKTLPAYMNPYLKPEDLLKGVTFASGGTGYDPLTAKIMSVISVWDQLINFKEYISKIKRHFGEEKAKDILEHSFFLVVSSSNDLAHTYLAQTHRYDRTSYANFLADSAVHFVRELHKLGARKIGVFSAVPVGCVPLQRTVFGGFFTRGCNQPLNNMAKQFNARLSPALDSLDKELDGVILYINVYDTLFDMIQHPKKYGFEVADRGCCGKGLLAISYLCNSLNPFTCSNSSAYIFWDSYHPSERAYQVIVDNLLDKYLSKVY

SEQ ID NO: 90214 - protein, 311 aa, Arabidopsis thaliana
  peptide (1)..(311): Ceres Seq. ID no. 12723064
MDTGNNNNLPTLLKCNFPPYGKDYPGGFATGRFSDGRVPSDLIAEKLGLAKTLPAYMNPYLKPEDLLKGVTFASGGTGYDPLTAKIMSVISVWDQLINFKEYISKIKRHFGEEKAKDILEHSFFLVVSSSNDLAHTYLAQTHRYDRTSYANFLADSAVHFVRELHKLGARKIGVFSAVPVGCVPLQRTVFGGFFTRGCNQPLNNMAKQFNARLSPALDSLDKELDGVILYINVYDTLFDMIQHPKKYGFEVADRGCCGKGLLAISYLCNSLNPFTCSNSSAYIFWDSYHPSERAYQVIVDNLLDKYLSKVY

SEQ ID NO: 90215 - protein, 255 aa, Arabidopsis thaliana
  peptide (1)..(255): Ceres Seq. ID no. 12723065
MNPYLKPEDLLKGVTFASGGTGYDPLTAKIMSVISVWDQLINFKEYISKIKRHFGEEKAKDILEHSFFLVVSSSNDLAHTYLAQTHRYDRTSYANFLADSAVHFVRELHKLGARKIGVFSAVPVGCVPLQRTVFGGFFTRGCNQPLNNMAKQFNARLSPALDSLDKELDGVILYINVYDTLFDMIQHPKKYGFEVADRGCCGKGLLAISYLCNSLNPFTCSNSSAYIFWDSYHPSERAYQVIVDNLLDKYLSKVY

SEQ ID NO: 90216 - DNA, 1938 bp, Arabidopsis thaliana
  misc_feature (1)..(1938): Ceres Seq. ID no. 12723110
  misc_feature (1)..(1938): Ortholog of  Ceres SEQ ID NO 15171212 as cited in SEQ ID NO 56899
  misc_feature (1)..(1938): Ortholog of  Ceres SEQ ID NO 12613725 as cited in SEQ ID NO 68196
gtcctcaaagatagtaaagaagccaaataataaccaatctttcttctatcttctctccctcaatatctttctctcactctctgatctccctggcacaactaaagtagagatatagagagagaggaactttggattgtttgtgtctttgtgacagatggcagagataaacaaacaaagcaacaaatgggaacaagaagaggttagtaatgaaaataattgggaattggctgaagaagaaagtgttgactggagagggagaccttccaaccctaacaagcatggtggaatgagagctgctctctttgttcttggactacaagcctttgagataatggggatagcagcagtagggaacaaccttataacttatgtaataaacgaaatgcatttccctttgtctaaagcggccaatattgttaccaactttgtcggtaccatctttatctttgcccttctcggcggctatctctcggacgcctttctaggcagcttctggaccattatcatattcggcttcgtcgagctttctggtttcatactactatcagtacaagcacatttaccccaactaaagccaccaaaatgtaacccattgatagaccaaacatgtgaagaagccaaaggtttcaaggcaatgatcttcttcatggcactctacttggtggctttaggaagtggctgcgtgaaaccaaacatgatagctcacggtgcggaccagttctctcagtcgcatcctaaacaatctaaaagactgtcatcttacttcaatgctgcctattttgcattctcaatgggcgagcttatcgctctaactctccttgtttgggttcaaactcattcgggcatggacattggatttggagtctctgctgcagcgatgactatgggcatcattagcttagtctccggtactatgtattttcgtaacaaacgtccacgtcgaagcatcttcactcccattgcccatgttattgtggctgccatattaaaaagaaagcttgcgtctccctctgacccaagaatgctccatggagaccaccatgtcgcaaacgacgtcgtaccctcctccactttaccacacactcctcgtttcaggttcttggacaaggcatgcatcaaaatccaagacacaaacacaaaggagagtccatggaggctatgcacagtaacacaagtagagcaagtaaaaaccctaatctcacttgtccctatctttgcaagcaccatagtcttcaacaccatcttggcacagctccaaacgttttcagtccaacaaggaagttccatgaacactcgtctctcaaattccttccacatccctccggcttcactccaggccatcccttacataatgctcatattccttgtccctctctacgactctttcttagtcccttttgcacgtaagctcacaggacataactcaggtattcctccattgactcggataggaattggactcttcctctccactttctccatggtttcagctgccatgctcgagaagaaacgtagagactcttcggttcttgacggtagaatcttgagtatcttctggatcacgccacagttcttgatctttggtatctccgagatgtttacagctgttggattaatcgagtttttttacaagcaatctgcaaagggcatggaatcattcttgatggcattgacttattgttcctactcctttgggttttacttcagctcggtgctcgtttcggtcgtaaacaagatcacttccacgtcagtcgactctaaagggtggctcggggagaacgacctaaataaggacaggctcgatctattttactggcttttagcggttcttagtctcttgaactttcttagctatctcttttggtctcgttggaacattaagtcttcgagacgcaacaacactaatgttgtgggtgatgagaacatttagcttgatgc

SEQ ID NO: 90217 - protein, 591 aa, Arabidopsis thaliana
  peptide (1)..(591): Ceres Seq. ID no. 12723111
MAEINKQSNKWEQEEVSNENNWELAEEESVDWRGRPSNPNKHGGMRAALFVLGLQAFEIMGIAAVGNNLITYVINEMHFPLSKAANIVTNFVGTIFIFALLGGYLSDAFLGSFWTIIIFGFVELSGFILLSVQAHLPQLKPPKCNPLIDQTCEEAKGFKAMIFFMALYLVALGSGCVKPNMIAHGADQFSQSHPKQSKRLSSYFNAAYFAFSMGELIALTLLVWVQTHSGMDIGFGVSAAAMTMGIISLVSGTMYFRNKRPRRSIFTPIAHVIVAAILKRKLASPSDPRMLHGDHHVANDVVPSSTLPHTPRFRFLDKACIKIQDTNTKESPWRLCTVTQVEQVKTLISLVPIFASTIVFNTILAQLQTFSVQQGSSMNTRLSNSFHIPPASLQAIPYIMLIFLVPLYDSFLVPFARKLTGHNSGIPPLTRIGIGLFLSTFSMVSAAMLEKKRRDSSVLDGRILSIFWITPQFLIFGISEMFTAVGLIEFFYKQSAKGMESFLMALTYCSYSFGFYFSSVLVSVVNKITSTSVDSKGWLGENDLNKDRLDLFYWLLAVLSLLNFLSYLFWSRWNIKSSRRNNTNVVGDENI

SEQ ID NO: 90218 - protein, 547 aa, Arabidopsis thaliana
  peptide (1)..(547): Ceres Seq. ID no. 12723112
MRAALFVLGLQAFEIMGIAAVGNNLITYVINEMHFPLSKAANIVTNFVGTIFIFALLGGYLSDAFLGSFWTIIIFGFVELSGFILLSVQAHLPQLKPPKCNPLIDQTCEEAKGFKAMIFFMALYLVALGSGCVKPNMIAHGADQFSQSHPKQSKRLSSYFNAAYFAFSMGELIALTLLVWVQTHSGMDIGFGVSAAAMTMGIISLVSGTMYFRNKRPRRSIFTPIAHVIVAAILKRKLASPSDPRMLHGDHHVANDVVPSSTLPHTPRFRFLDKACIKIQDTNTKESPWRLCTVTQVEQVKTLISLVPIFASTIVFNTILAQLQTFSVQQGSSMNTRLSNSFHIPPASLQAIPYIMLIFLVPLYDSFLVPFARKLTGHNSGIPPLTRIGIGLFLSTFSMVSAAMLEKKRRDSSVLDGRILSIFWITPQFLIFGISEMFTAVGLIEFFYKQSAKGMESFLMALTYCSYSFGFYFSSVLVSVVNKITSTSVDSKGWLGENDLNKDRLDLFYWLLAVLSLLNFLSYLFWSRWNIKSSRRNNTNVVGDENI

SEQ ID NO: 90219 - protein, 532 aa, Arabidopsis thaliana
  peptide (1)..(532): Ceres Seq. ID no. 12723113
MGIAAVGNNLITYVINEMHFPLSKAANIVTNFVGTIFIFALLGGYLSDAFLGSFWTIIIFGFVELSGFILLSVQAHLPQLKPPKCNPLIDQTCEEAKGFKAMIFFMALYLVALGSGCVKPNMIAHGADQFSQSHPKQSKRLSSYFNAAYFAFSMGELIALTLLVWVQTHSGMDIGFGVSAAAMTMGIISLVSGTMYFRNKRPRRSIFTPIAHVIVAAILKRKLASPSDPRMLHGDHHVANDVVPSSTLPHTPRFRFLDKACIKIQDTNTKESPWRLCTVTQVEQVKTLISLVPIFASTIVFNTILAQLQTFSVQQGSSMNTRLSNSFHIPPASLQAIPYIMLIFLVPLYDSFLVPFARKLTGHNSGIPPLTRIGIGLFLSTFSMVSAAMLEKKRRDSSVLDGRILSIFWITPQFLIFGISEMFTAVGLIEFFYKQSAKGMESFLMALTYCSYSFGFYFSSVLVSVVNKITSTSVDSKGWLGENDLNKDRLDLFYWLLAVLSLLNFLSYLFWSRWNIKSSRRNNTNVVGDENI

SEQ ID NO: 90220 - DNA, 1028 bp, Arabidopsis thaliana
  misc_feature (1)..(1028): Ceres Seq. ID no. 12723139
  misc_feature (1)..(1028): Ortholog of  Ceres SEQ ID NO 15178083 as cited in SEQ ID NO 56185
  misc_feature (1)..(1028): Ortholog of  Ceres SEQ ID NO 15225046 as cited in SEQ ID NO 57061
  misc_feature (1)..(1028): Ortholog of  Ceres SEQ ID NO 15173586 as cited in SEQ ID NO 61901
  misc_feature (1)..(1028): Ortholog of  Ceres SEQ ID NO 15179881 as cited in SEQ ID NO 66861
ggaactagtagcaatatctctcttctatcttttcatttcctactcttttctcactatggccaaagacggtggcgtttcttgtctacgaaggtcggagatgatcggtataggaatcggagaacttgaatctccgccgctagattctgatcaagtccacgttctcgccgttgatgacagcctagttgatcgaatagtcatcgaaagattgcttcgaatcacatcctgcaaagtcacggcggttgatagcggatggcgtgctctcgaattcttaggattagacgacgacaaagccgccgtcgaattcgatagattgaaggtggatttgatcatcactgattactgtatgcctggaatgactggatacgagcttctgaaaaagattaaggaatcgacaagttttaaggaagttcctgttgtaattatgtcgtcggagaatgtaatgactcgtatcgacagatgtcttgaagaaggtgcggaggattttttactaaaaccggtgaaactcgccgacgtgaaacgtctgaggagttacttgacgagagacgttaaagtcgccgccgaaggaaacaaacggaagctgaccactccaccgccgccgcctccgctctcagccacatcctcgatggaatcttcggactctacggtggaatcgcctctgtctatggttgacgatgaagattcgttgacaatgtcgccggagtctgcaacttcgcttgtggattcgccgatgaggagtcccggattagcttagagagatccgtgtgataacgatctccgttaactttttacttttgacggttttattgactgcaacgttgacttgaacgccgtcagtttatacttatagatctctctctctctttttatatcgttgcacgtggggtctctttgctcacgaaggaacttttataaaaacaagtattgtatttatttaattacgtatatttgataattttaaaattaaataatgtttctatttctaataatatcataataatcaaataatgtgtgacagtttacctctgtgt

SEQ ID NO: 90221 - protein, 249 aa, Arabidopsis thaliana
  peptide (1)..(249): Ceres Seq. ID no. 12723140
ELVAISLFYLFISYSFLTMAKDGGVSCLRRSEMIGIGIGELESPPLDSDQVHVLAVDDSLVDRIVIERLLRITSCKVTAVDSGWRALEFLGLDDDKAAVEFDRLKVDLIITDYCMPGMTGYELLKKIKESTSFKEVPVVIMSSENVMTRIDRCLEEGAEDFLLKPVKLADVKRLRSYLTRDVKVAAEGNKRKLTTPPPPPPLSATSSMESSDSTVESPLSMVDDEDSLTMSPESATSLVDSPMRSPGLA

SEQ ID NO: 90222 - protein, 231 aa, Arabidopsis thaliana
  peptide (1)..(231): Ceres Seq. ID no. 12723141
MAKDGGVSCLRRSEMIGIGIGELESPPLDSDQVHVLAVDDSLVDRIVIERLLRITSCKVTAVDSGWRALEFLGLDDDKAAVEFDRLKVDLIITDYCMPGMTGYELLKKIKESTSFKEVPVVIMSSENVMTRIDRCLEEGAEDFLLKPVKLADVKRLRSYLTRDVKVAAEGNKRKLTTPPPPPPLSATSSMESSDSTVESPLSMVDDEDSLTMSPESATSLVDSPMRSPGLA

SEQ ID NO: 90223 - protein, 217 aa, Arabidopsis thaliana
  peptide (1)..(217): Ceres Seq. ID no. 12723142
MIGIGIGELESPPLDSDQVHVLAVDDSLVDRIVIERLLRITSCKVTAVDSGWRALEFLGLDDDKAAVEFDRLKVDLIITDYCMPGMTGYELLKKIKESTSFKEVPVVIMSSENVMTRIDRCLEEGAEDFLLKPVKLADVKRLRSYLTRDVKVAAEGNKRKLTTPPPPPPLSATSSMESSDSTVESPLSMVDDEDSLTMSPESATSLVDSPMRSPGLA

SEQ ID NO: 90224 - DNA, 1174 bp, Arabidopsis thaliana
  misc_feature (1)..(1174): Ceres Seq. ID no. 12723147
  misc_feature (1)..(1174): Ortholog of  Ceres SEQ ID NO 12474685 as cited in SEQ ID NO 88
  misc_feature (1)..(1174): Ortholog of  Ceres SEQ ID NO 13638574 as cited in SEQ ID NO 51223
  misc_feature (1)..(1174): Ortholog of  Ceres SEQ ID NO 12610790 as cited in SEQ ID NO 56123
  misc_feature (1)..(1174): Ortholog of  Ceres SEQ ID NO 14315399 as cited in SEQ ID NO 57112
  misc_feature (1)..(1174): Ortholog of  Ceres SEQ ID NO 13596388 as cited in SEQ ID NO 62129
  misc_feature (1)..(1174): Ortholog of  Ceres SEQ ID NO 13655636 as cited in SEQ ID NO 63519
  misc_feature (1)..(1174): Ortholog of  Ceres SEQ ID NO 13655896 as cited in SEQ ID NO 64970
agtggctactgagtaaagctttgggccaccgagagaaaccattttctgagagcacactttcgttgacttctctttaaccaatgtctttaaccacagtccctacgctcgccatcagatccggaccatccggtcatcactcgatgccggttcttggttttggaaccgccgcttctccgctaccggaaccaacgatgctgaaagagacggtgattgaggctattaagcttggttatcgccatttcgacacctctccaaggtaccaaacggaggagccgatcggcgaagctttagcggaggcggtttcactcggcttagttcgatctcgatctgaattctttgtcactaccaaactttggtgtgctgatgctcatggtggtctcgtcgtaccggcgatcaaacggagtttgaaaaaccttaaactggactatcttgatctttatataattcattggccggttagctcgaaacctggtaaatacaagtttcctattgatgaagatgattttatgccaatggatttcgaagtagtgtggtctgaaatggaggagtgtcagagacttgggctcgcaaaatgcataggagtaagcaatttttcatgtaagaagcttcaacacatactctctatcgcgacaatcccgcctagcgtcaatcaagttgagatgagtccaatatggcaacaaagaaagctaagggagctttgtagatcgaacgacattgttgtcacagcgtactcggtgttgggatctagaggagctttttggggaactcccaaaattatggaatctgatgttctcaaagaaatagcagaagcaaaggaaaaaacagtggcccaggtgagtatgagatgggcttatgaacaaggagtgagcatggtagtgaagagctttaccaaagagagattagaagagaatctaaagatatttgattggtctttgacagaggatgagacacagagaatttcaactgagattcctcagttcagaaacgtccacggagaggtttatacctctaagaaaggtcccatcaaatctgtcgccgagatgtgggacggggagatctgatcactttgtgtgaaaatagcctattgaaaacggcacaattatcattcgtcacaatgattttcttgtcattctctctaataatgaaataatgaataatgaataaggactatctc

SEQ ID NO: 90225 - protein, 326 aa, Arabidopsis thaliana
  peptide (1)..(326): Ceres Seq. ID no. 12723148
MSLTTVPTLAIRSGPSGHHSMPVLGFGTAASPLPEPTMLKETVIEAIKLGYRHFDTSPRYQTEEPIGEALAEAVSLGLVRSRSEFFVTTKLWCADAHGGLVVPAIKRSLKNLKLDYLDLYIIHWPVSSKPGKYKFPIDEDDFMPMDFEVVWSEMEECQRLGLAKCIGVSNFSCKKLQHILSIATIPPSVNQVEMSPIWQQRKLRELCRSNDIVVTAYSVLGSRGAFWGTPKIMESDVLKEIAEAKEKTVAQVSMRWAYEQGVSMVVKSFTKERLEENLKIFDWSLTEDETQRISTEIPQFRNVHGEVYTSKKGPIKSVAEMWDGEI

SEQ ID NO: 90226 - protein, 306 aa, Arabidopsis thaliana
  peptide (1)..(306): Ceres Seq. ID no. 12723149
MPVLGFGTAASPLPEPTMLKETVIEAIKLGYRHFDTSPRYQTEEPIGEALAEAVSLGLVRSRSEFFVTTKLWCADAHGGLVVPAIKRSLKNLKLDYLDLYIIHWPVSSKPGKYKFPIDEDDFMPMDFEVVWSEMEECQRLGLAKCIGVSNFSCKKLQHILSIATIPPSVNQVEMSPIWQQRKLRELCRSNDIVVTAYSVLGSRGAFWGTPKIMESDVLKEIAEAKEKTVAQVSMRWAYEQGVSMVVKSFTKERLEENLKIFDWSLTEDETQRISTEIPQFRNVHGEVYTSKKGPIKSVAEMWDGEI

SEQ ID NO: 90227 - protein, 289 aa, Arabidopsis thaliana
  peptide (1)..(289): Ceres Seq. ID no. 12723150
MLKETVIEAIKLGYRHFDTSPRYQTEEPIGEALAEAVSLGLVRSRSEFFVTTKLWCADAHGGLVVPAIKRSLKNLKLDYLDLYIIHWPVSSKPGKYKFPIDEDDFMPMDFEVVWSEMEECQRLGLAKCIGVSNFSCKKLQHILSIATIPPSVNQVEMSPIWQQRKLRELCRSNDIVVTAYSVLGSRGAFWGTPKIMESDVLKEIAEAKEKTVAQVSMRWAYEQGVSMVVKSFTKERLEENLKIFDWSLTEDETQRISTEIPQFRNVHGEVYTSKKGPIKSVAEMWDGEI

SEQ ID NO: 90228 - DNA, 1539 bp, Arabidopsis thaliana
  misc_feature (1)..(1539): Ceres Seq. ID no. 12723159
  misc_feature (1)..(1539): Ortholog of  Ceres SEQ ID NO 13600220 as cited in SEQ ID NO 0
atggaacagattttggctctgtttgccatttttcttgcttttgctttctccgggaaatgcagcgacgttttcagcagatctgactaccctgagggattcgtctttggagccggcacttctgcttatcagtgggaaggagctgctgcagaagacggaaggaaacctagcctgtgggacactctttgtcactctcgtgaccaaggtaacggagatatagcatgtgatgggtatcacaagtacaaggatgatgtgaagttgatggtggacactaacttagatgctttcagattctccatctcttggtctaggctaatacctaatggaagagggcctgttaaccaaaagggtctacagttctacaagaacctcatccaagagttagtaagccacggaattgaaccacatgttacactctaccactatgatcatcctcagtctctggaggatgaatatggaggatggctcaaccacagaatgatcaaagactttactacttatgcagatgtttgcttcagagagtttgggaaccatgtcaaactatggaccacgatcaacgaggctaatatattctctataggaggttacaacgatggggatacaccgcctggtcgttgttccaaaccgagcaaaaactgttcttcagggaactcttccattgaaccatatattgtaggccataatttgttgcttgcgcacgcctctgtttcaagacgatacaaacaaaaatacaaggataagcagggaggttccataggatttagcttattcatattagggcttattcctactacaagctccaaggatgatgccactgcaacccaaagagcccaagatttctacgtcggctggttccttagacctcttttatttggagactatcctgatacaatgaaaagaaccattggatcaagactgccagttttctctgagaaagaatcagaacaagttaaaggctcatgtgactttgtaggagtcatacactatcatgcggcttctgtcactaacatcaaatccaaaccttctctgtccggaaacccggatttctactcatacatggagacagattttggaaaaagtttagattttcagtatgctaatactccatgggctatggaagttgtgctggagtatataaagcagagctatggaaatcctcctgtctacattcttgagagtgctaaattcactttccaatggcaacaaataggtacaccgatgaagcaagattcgcagctgaaacagaaggatataccaagggtggaatacttgcatgcctacattggtggtgtgctcaaatccataaggaatggatcagacacgagaggctacttcgtatggtcatttatggatttatacgagcttctagggggatatgaggttggttttgggttgtacactgtcaatttcagcgatcctcatcgcaagagatctcccaaactctctgcttattggtactctgattttctcaagggtgaatctgcctttcttgattcccaaggcatcaaggaattgcagagcaaatactcttcttccttctag

SEQ ID NO: 90229 - protein, 512 aa, Arabidopsis thaliana
  peptide (1)..(512): Ceres Seq. ID no. 12723160
MEQILALFAIFLAFAFSGKCSDVFSRSDYPEGFVFGAGTSAYQWEGAAAEDGRKPSLWDTLCHSRDQGNGDIACDGYHKYKDDVKLMVDTNLDAFRFSISWSRLIPNGRGPVNQKGLQFYKNLIQELVSHGIEPHVTLYHYDHPQSLEDEYGGWLNHRMIKDFTTYADVCFREFGNHVKLWTTINEANIFSIGGYNDGDTPPGRCSKPSKNCSSGNSSIEPYIVGHNLLLAHASVSRRYKQKYKDKQGGSIGFSLFILGLIPTTSSKDDATATQRAQDFYVGWFLRPLLFGDYPDTMKRTIGSRLPVFSEKESEQVKGSCDFVGVIHYHAASVTNIKSKPSLSGNPDFYSYMETDFGKSLDFQYANTPWAMEVVLEYIKQSYGNPPVYILESAKFTFQWQQIGTPMKQDSQLKQKDIPRVEYLHAYIGGVLKSIRNGSDTRGYFVWSFMDLYELLGGYEVGFGLYTVNFSDPHRKRSPKLSAYWYSDFLKGESAFLDSQGIKELQSKYSSSF

SEQ ID NO: 90230 - protein, 426 aa, Arabidopsis thaliana
  peptide (1)..(426): Ceres Seq. ID no. 12723161
MVDTNLDAFRFSISWSRLIPNGRGPVNQKGLQFYKNLIQELVSHGIEPHVTLYHYDHPQSLEDEYGGWLNHRMIKDFTTYADVCFREFGNHVKLWTTINEANIFSIGGYNDGDTPPGRCSKPSKNCSSGNSSIEPYIVGHNLLLAHASVSRRYKQKYKDKQGGSIGFSLFILGLIPTTSSKDDATATQRAQDFYVGWFLRPLLFGDYPDTMKRTIGSRLPVFSEKESEQVKGSCDFVGVIHYHAASVTNIKSKPSLSGNPDFYSYMETDFGKSLDFQYANTPWAMEVVLEYIKQSYGNPPVYILESAKFTFQWQQIGTPMKQDSQLKQKDIPRVEYLHAYIGGVLKSIRNGSDTRGYFVWSFMDLYELLGGYEVGFGLYTVNFSDPHRKRSPKLSAYWYSDFLKGESAFLDSQGIKELQSKYSSSF

SEQ ID NO: 90231 - protein, 354 aa, Arabidopsis thaliana
  peptide (1)..(354): Ceres Seq. ID no. 12723162
MIKDFTTYADVCFREFGNHVKLWTTINEANIFSIGGYNDGDTPPGRCSKPSKNCSSGNSSIEPYIVGHNLLLAHASVSRRYKQKYKDKQGGSIGFSLFILGLIPTTSSKDDATATQRAQDFYVGWFLRPLLFGDYPDTMKRTIGSRLPVFSEKESEQVKGSCDFVGVIHYHAASVTNIKSKPSLSGNPDFYSYMETDFGKSLDFQYANTPWAMEVVLEYIKQSYGNPPVYILESAKFTFQWQQIGTPMKQDSQLKQKDIPRVEYLHAYIGGVLKSIRNGSDTRGYFVWSFMDLYELLGGYEVGFGLYTVNFSDPHRKRSPKLSAYWYSDFLKGESAFLDSQGIKELQSKYSSSF

SEQ ID NO: 90232 - DNA, 2586 bp, Arabidopsis thaliana
  misc_feature (1)..(2586): Ceres Seq. ID no. 12723163
  misc_feature (1)..(2586): Ortholog of  Ceres SEQ ID NO 15168977 as cited in SEQ ID NO 20587
atggggtcaaaatcatttggaaatctattagacttggcctctggggatcttttggacattcctcagactccgagatatcttccaagagtgatgactgttcctggcattatctctgacgttgatggatatggaattagtgatggcgattcagatgtcatttcattaccttgccgtgagcggaaaatcattgtggccaattttcttcctttgaatggtaaaaaggattcagaaactggaaagtggaaattcagtctcgacaatgattctcccctgttacatctcaaggatggtttttctccagagactgaagtcatttatgttggatcgctcaagacgcatgttgatgttagtgagcaagacgaggtttcccataatctttttgaggaattcaattgtgtagcgactttcctcccacaagatgtgcataaaaaattctaccttggcttttgtaaacagcaactatggccacttttccattacatgttacccatgtgtcctgatcatggtgaacggtttgatcgtggtctttggcaggcatatgtttctgccaacaagatatttgcagataaggtaatgggtgtgattaatcttgaagaagattatatctggattcatgactatcatttaatggttctcccaacatttttgagaaggcggtttcacagggttaagcttggtttcttcctccacagtccattcccttcttcagaaatttatcgaaccttacctgttcgagaggaactactaagagggctcttaaattgtgacttaattggttttcacacgtttgattatgcacggcatttcttgtcatgctgctgtagaatgcttggattggagtatgaatctaagagagggcatattgctcttgactacttgggacgtacagtttttctgaagattcttcctataggtattcacatgggaaggctggaatccgttctgaatcttcctgctacagctgaaaagctgaaagagattcaagaaaagtatcggggtaaaaagataattctcggtgttgatgacatggatatattcaaaggtttaagtcttaaaattttggcctttgaacacctccttcagcaatatcctagcatgctagggaaaatagttcttattcagattgtgaacccagccagaggctcaggtaaagacgttcaggaagcgaggaaagaaacgtatgatactgttaaaagaatcaacgagcgttatggttcacatgattatgagccagtggttctgattgatcgccctgttcctcggtttgagaagtctgcctattatgccctggcagaatgctgcatagtcaatgcagtgagggatgggatgaacttagttccgtacaagtacactgtttgtcggcagggaactcctagtatgaataagtctttgggagtaagtgatgatttgcctcgcacaagcacccttgttctgtccgagttcattggttgctcgccttctctaagtggtgcgattagggttaatccttgggacgttgacgcggtagccgattcactatattctgctattaccatgtctgattttgagaagcaactacgacataaaaaacactttcactacattagtacacatgatgtgggttattgggcgcgcagcttttcgcaggatttggagagggcatctcgagatcattacagtaaacggtgctggggtgtgggttggggtttgggtttcaggcttgtcgctctctctcctaatttcagaaggctatccattgagcaaactgttagtgcttacagaagatcgagcaagagagcaatatttcttgattatgatggtactttagttcctgagacctcgattgtaaaggacccaagtgctgaagttatatctgcgttgaaggcactgtgtagtgatcctaacaacactatatttattgttagcgggaggggaaaagtttctttgagcgagtggcttgcgccatgtgagaatcttggaatagcggctgaacatggttactttacaaggtggaataagtcttctgactgggaaacaagcggcttatctgatgaccttgagtggaagaaagttgtggaacctattatgagactttatacagagactactgatggatccaatatagaagcaaaagagagtgctttagtctggcatcaccaagatgctgacccagactttggttcttgtcaagccaaggaactactggaccatctagaaactgttcttgtgaatgaaccagttattgtgaacagaggccaccaaatcgttgaagttaagcctcagggagtaagcaaagggcttgtcaccgggaaaattcttagccgaatgcttgaagatgggatagcgccagattttgtggtatgcattggggatgatagatcagacgaggagatgtttgaaaacatatcaacaaccctctcagctcaatcatcgtcaatgtctacagagatattcgcgtgtactgtgggaagaaaaccgagcaaagccaaatacttcctcgatgaagtaagcgacgtggtgaagttgcttcaaggacttgccaacacttcgagcccaaagcctaggtacccttctcacctcagagtctccttcgaaagcgtggtatga

SEQ ID NO: 90233 - protein, 861 aa, Arabidopsis thaliana
  peptide (1)..(861): Ceres Seq. ID no. 12723164
MGSKSFGNLLDLASGDLLDIPQTPRYLPRVMTVPGIISDVDGYGISDGDSDVISLPCRERKIIVANFLPLNGKKDSETGKWKFSLDNDSPLLHLKDGFSPETEVIYVGSLKTHVDVSEQDEVSHNLFEEFNCVATFLPQDVHKKFYLGFCKQQLWPLFHYMLPMCPDHGERFDRGLWQAYVSANKIFADKVMGVINLEEDYIWIHDYHLMVLPTFLRRRFHRVKLGFFLHSPFPSSEIYRTLPVREELLRGLLNCDLIGFHTFDYARHFLSCCCRMLGLEYESKRGHIALDYLGRTVFLKILPIGIHMGRLESVLNLPATAEKLKEIQEKYRGKKIILGVDDMDIFKGLSLKILAFEHLLQQYPSMLGKIVLIQIVNPARGSGKDVQEARKETYDTVKRINERYGSHDYEPVVLIDRPVPRFEKSAYYALAECCIVNAVRDGMNLVPYKYTVCRQGTPSMNKSLGVSDDLPRTSTLVLSEFIGCSPSLSGAIRVNPWDVDAVADSLYSAITMSDFEKQLRHKKHFHYISTHDVGYWARSFSQDLERASRDHYSKRCWGVGWGLGFRLVALSPNFRRLSIEQTVSAYRRSSKRAIFLDYDGTLVPETSIVKDPSAEVISALKALCSDPNNTIFIVSGRGKVSLSEWLAPCENLGIAAEHGYFTRWNKSSDWETSGLSDDLEWKKVVEPIMRLYTETTDGSNIEAKESALVWHHQDADPDFGSCQAKELLDHLETVLVNEPVIVNRGHQIVEVKPQGVSKGLVTGKILSRMLEDGIAPDFVVCIGDDRSDEEMFENISTTLSAQSSSMSTEIFACTVGRKPSKAKYFLDEVSDVVKLLQGLANTSSPKPRYPSHLRVSFESVV

SEQ ID NO: 90234 - protein, 831 aa, Arabidopsis thaliana
  peptide (1)..(831): Ceres Seq. ID no. 12723165
MTVPGIISDVDGYGISDGDSDVISLPCRERKIIVANFLPLNGKKDSETGKWKFSLDNDSPLLHLKDGFSPETEVIYVGSLKTHVDVSEQDEVSHNLFEEFNCVATFLPQDVHKKFYLGFCKQQLWPLFHYMLPMCPDHGERFDRGLWQAYVSANKIFADKVMGVINLEEDYIWIHDYHLMVLPTFLRRRFHRVKLGFFLHSPFPSSEIYRTLPVREELLRGLLNCDLIGFHTFDYARHFLSCCCRMLGLEYESKRGHIALDYLGRTVFLKILPIGIHMGRLESVLNLPATAEKLKEIQEKYRGKKIILGVDDMDIFKGLSLKILAFEHLLQQYPSMLGKIVLIQIVNPARGSGKDVQEARKETYDTVKRINERYGSHDYEPVVLIDRPVPRFEKSAYYALAECCIVNAVRDGMNLVPYKYTVCRQGTPSMNKSLGVSDDLPRTSTLVLSEFIGCSPSLSGAIRVNPWDVDAVADSLYSAITMSDFEKQLRHKKHFHYISTHDVGYWARSFSQDLERASRDHYSKRCWGVGWGLGFRLVALSPNFRRLSIEQTVSAYRRSSKRAIFLDYDGTLVPETSIVKDPSAEVISALKALCSDPNNTIFIVSGRGKVSLSEWLAPCENLGIAAEHGYFTRWNKSSDWETSGLSDDLEWKKVVEPIMRLYTETTDGSNIEAKESALVWHHQDADPDFGSCQAKELLDHLETVLVNEPVIVNRGHQIVEVKPQGVSKGLVTGKILSRMLEDGIAPDFVVCIGDDRSDEEMFENISTTLSAQSSSMSTEIFACTVGRKPSKAKYFLDEVSDVVKLLQGLANTSSPKPRYPSHLRVSFESVV

SEQ ID NO: 90235 - protein, 701 aa, Arabidopsis thaliana
  peptide (1)..(701): Ceres Seq. ID no. 12723166
MLPMCPDHGERFDRGLWQAYVSANKIFADKVMGVINLEEDYIWIHDYHLMVLPTFLRRRFHRVKLGFFLHSPFPSSEIYRTLPVREELLRGLLNCDLIGFHTFDYARHFLSCCCRMLGLEYESKRGHIALDYLGRTVFLKILPIGIHMGRLESVLNLPATAEKLKEIQEKYRGKKIILGVDDMDIFKGLSLKILAFEHLLQQYPSMLGKIVLIQIVNPARGSGKDVQEARKETYDTVKRINERYGSHDYEPVVLIDRPVPRFEKSAYYALAECCIVNAVRDGMNLVPYKYTVCRQGTPSMNKSLGVSDDLPRTSTLVLSEFIGCSPSLSGAIRVNPWDVDAVADSLYSAITMSDFEKQLRHKKHFHYISTHDVGYWARSFSQDLERASRDHYSKRCWGVGWGLGFRLVALSPNFRRLSIEQTVSAYRRSSKRAIFLDYDGTLVPETSIVKDPSAEVISALKALCSDPNNTIFIVSGRGKVSLSEWLAPCENLGIAAEHGYFTRWNKSSDWETSGLSDDLEWKKVVEPIMRLYTETTDGSNIEAKESALVWHHQDADPDFGSCQAKELLDHLETVLVNEPVIVNRGHQIVEVKPQGVSKGLVTGKILSRMLEDGIAPDFVVCIGDDRSDEEMFENISTTLSAQSSSMSTEIFACTVGRKPSKAKYFLDEVSDVVKLLQGLANTSSPKPRYPSHLRVSFESVV

SEQ ID NO: 90236 - DNA, 1815 bp, Arabidopsis thaliana
  misc_feature (1)..(1815): Ceres Seq. ID no. 12723177
  misc_feature (1)..(1815): Ortholog of  Ceres SEQ ID NO 13593834 as cited in SEQ ID NO 53551
atgacgaagaggaagaaggaagtaatagatgtcgattgctccgagaagaaagattttgtgattgattggtcttccgctatggataaggaagacgaagttcccgagctcgagattgttaataccaccaaacctactcctccgccaccgccaacgtttttctccgacgatcaaaccgattctccgaaactcctaaccgatcgtgacctcgacgagcagctagagcgtaaaaaagcgatcctgacattaggtccgggcttacccgacaagggtgagaaaattcgactcaaaatcgctgatctcgaagaggagaagcagcgtagagttttagaaggctcgaaaatgaacatctatgtgttcgagctcatttatgtgtttgaatatgaatatgatgctacaaaagacttttttggcaggaggtggacagaagttctaaggtcgtgtcttcgactagctcaggttcagatgttttaccgcaaggaaatgcagtttcaaaagatacctctagagggaatgcagactcaaaagacacctctagacaagggaatgcagattcaaaagaagtctcacggtcaacattttctgcggttttcaacggattctcagtcaaagaaagcctttggtaaagaactagaagatctgggatgtgaaaggaggaaacacaaggctggtagaaagcctgtaacaaggctgagcaacgggtggcggttgttgccagatgtagggaaagctgagcacagtgcaaagcagtttgattctggacttaaagaatcaaaagggaataagaaatccaaggaaccttatggaaagaaaaggcccatggaatcttcgacttattctctgattgatgatgatgatgatgatgatgatgatgatgacaacgacaccagtggccatgaaactcctagggagtggtcttgggaaaaatctccatcacaaagttcaaggcgccgtaagaaatcagaggacacagtgataaatgtggatgaagaagaagctcagccttcaacagtggcggagcaagcggctgaactgcctgaaggcttacaggaagatatatgctacccaacaagggatgatcctcactttgttcaagtttgtcttaaagatcttgaatgccttgcacctcgagaatatctgacatcgccggttatgaatttctacatgaggttcttgcagcagcagatatcatcatcgaatcaaatctctgctgattgtcacttctttaatacctatttctacaagaagctcagtgacgctgttacgtacaaggggaatgacaaggatgccttctttgtgaggttcaggcggtggtggaagggtattgatctatttcgtaaggcttatattttcataccaatacatgaagatctccactggagccttgtgatagtttgcatccctgataagaaagatgaatcggggttgactatacttcaccttgattctctaggacttcactcgagaaaatcaattgttgaaaatgtaaaaaggtttctaaaagacgaatggaattatttgaatcaagatgactattccttggatctgcctatctcagaaaaagtatggaaaaacctccctcgtaggatcagcgaagctgttgttcaggttccgcagcagaaaaacgattttgattgtggtccgtttgtgctcttcttcattaaacggttcattgaagaggcgcctcaaaggctgaaaaggaaagacctgggaatgttcgacaagaagtggtttagacccgatgaagcctctgctctgagaatcaaaatccgaaacacgctcatcgagctattccgtgtcagtgaccagacagagtaa

SEQ ID NO: 90237 - protein, 604 aa, Arabidopsis thaliana
  peptide (1)..(604): Ceres Seq. ID no. 12723178
MTKRKKEVIDVDCSEKKDFVIDWSSAMDKEDEVPELEIVNTTKPTPPPPPTFFSDDQTDSPKLLTDRDLDEQLERKKAILTLGPGLPDKGEKIRLKIADLEEEKQRRVLEGSKMNIYVFELIYVFEYEYDATKDFFGRRWTEVLRSCLRLAQVQMFYRKEMQFQKIPLEGMQTQKTPLDKGMQIQKKSHGQHFLRFSTDSQSKKAFGKELEDLGCERRKHKAGRKPVTRLSNGWRLLPDVGKAEHSAKQFDSGLKESKGNKKSKEPYGKKRPMESSTYSLIDDDDDDDDDDDNDTSGHETPREWSWEKSPSQSSRRRKKSEDTVINVDEEEAQPSTVAEQAAELPEGLQEDICYPTRDDPHFVQVCLKDLECLAPREYLTSPVMNFYMRFLQQQISSSNQISADCHFFNTYFYKKLSDAVTYKGNDKDAFFVRFRRWWKGIDLFRKAYIFIPIHEDLHWSLVIVCIPDKKDESGLTILHLDSLGLHSRKSIVENVKRFLKDEWNYLNQDDYSLDLPISEKVWKNLPRRISEAVVQVPQQKNDFDCGPFVLFFIKRFIEEAPQRLKRKDLGMFDKKWFRPDEASALRIKIRNTLIELFRVSDQTE

SEQ ID NO: 90238 - protein, 578 aa, Arabidopsis thaliana
  peptide (1)..(578): Ceres Seq. ID no. 12723179
MDKEDEVPELEIVNTTKPTPPPPPTFFSDDQTDSPKLLTDRDLDEQLERKKAILTLGPGLPDKGEKIRLKIADLEEEKQRRVLEGSKMNIYVFELIYVFEYEYDATKDFFGRRWTEVLRSCLRLAQVQMFYRKEMQFQKIPLEGMQTQKTPLDKGMQIQKKSHGQHFLRFSTDSQSKKAFGKELEDLGCERRKHKAGRKPVTRLSNGWRLLPDVGKAEHSAKQFDSGLKESKGNKKSKEPYGKKRPMESSTYSLIDDDDDDDDDDDNDTSGHETPREWSWEKSPSQSSRRRKKSEDTVINVDEEEAQPSTVAEQAAELPEGLQEDICYPTRDDPHFVQVCLKDLECLAPREYLTSPVMNFYMRFLQQQISSSNQISADCHFFNTYFYKKLSDAVTYKGNDKDAFFVRFRRWWKGIDLFRKAYIFIPIHEDLHWSLVIVCIPDKKDESGLTILHLDSLGLHSRKSIVENVKRFLKDEWNYLNQDDYSLDLPISEKVWKNLPRRISEAVVQVPQQKNDFDCGPFVLFFIKRFIEEAPQRLKRKDLGMFDKKWFRPDEASALRIKIRNTLIELFRVSDQTE

SEQ ID NO: 90239 - protein, 491 aa, Arabidopsis thaliana
  peptide (1)..(491): Ceres Seq. ID no. 12723180
MNIYVFELIYVFEYEYDATKDFFGRRWTEVLRSCLRLAQVQMFYRKEMQFQKIPLEGMQTQKTPLDKGMQIQKKSHGQHFLRFSTDSQSKKAFGKELEDLGCERRKHKAGRKPVTRLSNGWRLLPDVGKAEHSAKQFDSGLKESKGNKKSKEPYGKKRPMESSTYSLIDDDDDDDDDDDNDTSGHETPREWSWEKSPSQSSRRRKKSEDTVINVDEEEAQPSTVAEQAAELPEGLQEDICYPTRDDPHFVQVCLKDLECLAPREYLTSPVMNFYMRFLQQQISSSNQISADCHFFNTYFYKKLSDAVTYKGNDKDAFFVRFRRWWKGIDLFRKAYIFIPIHEDLHWSLVIVCIPDKKDESGLTILHLDSLGLHSRKSIVENVKRFLKDEWNYLNQDDYSLDLPISEKVWKNLPRRISEAVVQVPQQKNDFDCGPFVLFFIKRFIEEAPQRLKRKDLGMFDKKWFRPDEASALRIKIRNTLIELFRVSDQTE

SEQ ID NO: 90240 - DNA, 1350 bp, Arabidopsis thaliana
  misc_feature (1)..(1350): Ceres Seq. ID no. 12723189
  misc_feature (1)..(1350): Ortholog of  Ceres SEQ ID NO 13600220 as cited in SEQ ID NO 0
atggaacagttttttgctctgtttaccatttttctatcttttgctttccccgggagatgcagcgacgttttcagcagatctgatttccccgagggattcctcttcggagctggcacttctgcttatcagtgggaaggagctgctgcggaagatggaaggaaacctagcgtgtgggacactctttgttactctcgtaacattggtaacggagatgtaacatgtgatgggtatcacaagtataaggaagatgtgaagctgatggtagacactaacttagatgccttcagattctctatatcttggtctaggctaatacctaatggaagaggctctgttaaccaaaagggtctacagttctacaagaacctcatcagcgaattaataacccatgggattgaaccacatgttacactgtatcactacgatcatcctcagtatcttgaggatgaatatggaggatgggtcaacaatatgatgatcaaagacttcactgcttatgtagatgtttgtttcagagagtttgggaactatgtcaaattctggaccactatcaatgaggctaatgtatttactattggaggttacaacgatggggatacaccgcctggtcgttgttctttaccgggcaaaaactgcttgttagggaactcttctactgaaacatatattgtaggccataacttacttcttgcgcacgcctctgcttcaagactatataagcaaaagtacaaggataagcagggtggttccataggctttggcttatatttaatggggttgactccttctacaagctccaaggatgatgccattgcaactcaaagagccaaagatttctatttcggttggttccttggacctcttatatttggagactatccagatacaatgaaaagaaccattggatcaagactgccagttttctcagaggaagaatcagaacaatatcctgttgctccgtggactatggaagctgtcctagagtatataaagcagagctatgacaatcctcctgtctacattcttgagaatggtacaccgatgacgcaacacaaggatacacatagggtggaatacatgaatgcttacattggtggtgtgctcaaatccataaggaatggatcagacactagaggctattttgtatggtcatttatggatttattcgagcttatagggcggtacgattatggttatggattgtactctgtaaatttcagtgatccacatcgcaagagatctcctagactctctgctcattggtactctgattttctcaagggcaaaacttcttttcttgattccaaaggcatcaaggaattgcagagcaacttctcttcttcctcttag

SEQ ID NO: 90241 - protein, 449 aa, Arabidopsis thaliana
  peptide (1)..(449): Ceres Seq. ID no. 12723190
MEQFFALFTIFLSFAFPGRCSDVFSRSDFPEGFLFGAGTSAYQWEGAAAEDGRKPSVWDTLCYSRNIGNGDVTCDGYHKYKEDVKLMVDTNLDAFRFSISWSRLIPNGRGSVNQKGLQFYKNLISELITHGIEPHVTLYHYDHPQYLEDEYGGWVNNMMIKDFTAYVDVCFREFGNYVKFWTTINEANVFTIGGYNDGDTPPGRCSLPGKNCLLGNSSTETYIVGHNLLLAHASASRLYKQKYKDKQGGSIGFGLYLMGLTPSTSSKDDAIATQRAKDFYFGWFLGPLIFGDYPDTMKRTIGSRLPVFSEEESEQYPVAPWTMEAVLEYIKQSYDNPPVYILENGTPMTQHKDTHRVEYMNAYIGGVLKSIRNGSDTRGYFVWSFMDLFELIGRYDYGYGLYSVNFSDPHRKRSPRLSAHWYSDFLKGKTSFLDSKGIKELQSNFSSSS

SEQ ID NO: 90242 - protein, 363 aa, Arabidopsis thaliana
  peptide (1)..(363): Ceres Seq. ID no. 12723191
MVDTNLDAFRFSISWSRLIPNGRGSVNQKGLQFYKNLISELITHGIEPHVTLYHYDHPQYLEDEYGGWVNNMMIKDFTAYVDVCFREFGNYVKFWTTINEANVFTIGGYNDGDTPPGRCSLPGKNCLLGNSSTETYIVGHNLLLAHASASRLYKQKYKDKQGGSIGFGLYLMGLTPSTSSKDDAIATQRAKDFYFGWFLGPLIFGDYPDTMKRTIGSRLPVFSEEESEQYPVAPWTMEAVLEYIKQSYDNPPVYILENGTPMTQHKDTHRVEYMNAYIGGVLKSIRNGSDTRGYFVWSFMDLFELIGRYDYGYGLYSVNFSDPHRKRSPRLSAHWYSDFLKGKTSFLDSKGIKELQSNFSSSS

SEQ ID NO: 90243 - protein, 292 aa, Arabidopsis thaliana
  peptide (1)..(292): Ceres Seq. ID no. 12723192
MMIKDFTAYVDVCFREFGNYVKFWTTINEANVFTIGGYNDGDTPPGRCSLPGKNCLLGNSSTETYIVGHNLLLAHASASRLYKQKYKDKQGGSIGFGLYLMGLTPSTSSKDDAIATQRAKDFYFGWFLGPLIFGDYPDTMKRTIGSRLPVFSEEESEQYPVAPWTMEAVLEYIKQSYDNPPVYILENGTPMTQHKDTHRVEYMNAYIGGVLKSIRNGSDTRGYFVWSFMDLFELIGRYDYGYGLYSVNFSDPHRKRSPRLSAHWYSDFLKGKTSFLDSKGIKELQSNFSSSS

SEQ ID NO: 90244 - DNA, 1005 bp, Arabidopsis thaliana
  misc_feature (1)..(1005): Ceres Seq. ID no. 12723239
  misc_feature (1)..(1005): Ortholog of  Ceres SEQ ID NO 13662367 as cited in SEQ ID NO 67774
atggcccctgagatttccgtaaacccgatgtatttatccgaaaaggcgcatcaagcacctccaaggagagcttatgtgacgtttttggcaggaaatggagactacgtgaagggagtggtgggactagcaaagggtttgcgtaaggtcaaaagtgcgtatcctcttgttgttgctatgttacctgatgtgcctgaggaacatagagagatcttgaggtctcaaggctgtgtcgtgcgtgagatcgaacctgtttatcctccagacaaccaagttgagtttgccatggcttattacgttctcaactactcaaaacttcgtatttggaactttgaagagtacagcaagatgatataccttgacgcagatattcaagtctttgacaatatcgatcacctctttgatttgtctgatgcatatttctatgccgtgatggactgtttctgtgagaaaacatggagccactcgctgcagtattcaattgggtattgtcaacagtgcccggagaaggtcacgtggccagaagatatggaatctccacctcctcctctgtatttcaacgccggtatgtttgtgtttgagcctagtcctttgacttatgagagtctccttcagaccctggagatcacaccaccttcaccgtttgcagaacaagattttctcaatatgttctttgagaaagtgtacaaaccgatccctttggtatacaatctggttttggctatgctttggcgtcacccggagaacgtggagctggagaaagtcaaagttgttcactactgtgcagctggatccaagccatggagatacacaggagaagaagctaacatggacagagaagacatcaagatgttagttgataaatggtgggatgtctataatgatgaatctctcgatttcaaatcgaaaatccctgcagatgcggaagaaaccgttacaaaatcaagcatcctagcttccgttcttgaaccagaaatgacctactttcctgctccttctgctgcttga

SEQ ID NO: 90245 - protein, 334 aa, Arabidopsis thaliana
  peptide (1)..(334): Ceres Seq. ID no. 12723240
MAPEISVNPMYLSEKAHQAPPRRAYVTFLAGNGDYVKGVVGLAKGLRKVKSAYPLVVAMLPDVPEEHREILRSQGCVVREIEPVYPPDNQVEFAMAYYVLNYSKLRIWNFEEYSKMIYLDADIQVFDNIDHLFDLSDAYFYAVMDCFCEKTWSHSLQYSIGYCQQCPEKVTWPEDMESPPPPLYFNAGMFVFEPSPLTYESLLQTLEITPPSPFAEQDFLNMFFEKVYKPIPLVYNLVLAMLWRHPENVELEKVKVVHYCAAGSKPWRYTGEEANMDREDIKMLVDKWWDVYNDESLDFKSKIPADAEETVTKSSILASVLEPEMTYFPAPSAA

SEQ ID NO: 90246 - protein, 325 aa, Arabidopsis thaliana
  peptide (1)..(325): Ceres Seq. ID no. 12723241
MYLSEKAHQAPPRRAYVTFLAGNGDYVKGVVGLAKGLRKVKSAYPLVVAMLPDVPEEHREILRSQGCVVREIEPVYPPDNQVEFAMAYYVLNYSKLRIWNFEEYSKMIYLDADIQVFDNIDHLFDLSDAYFYAVMDCFCEKTWSHSLQYSIGYCQQCPEKVTWPEDMESPPPPLYFNAGMFVFEPSPLTYESLLQTLEITPPSPFAEQDFLNMFFEKVYKPIPLVYNLVLAMLWRHPENVELEKVKVVHYCAAGSKPWRYTGEEANMDREDIKMLVDKWWDVYNDESLDFKSKIPADAEETVTKSSILASVLEPEMTYFPAPSAA

SEQ ID NO: 90247 - protein, 276 aa, Arabidopsis thaliana
  peptide (1)..(276): Ceres Seq. ID no. 12723242
MLPDVPEEHREILRSQGCVVREIEPVYPPDNQVEFAMAYYVLNYSKLRIWNFEEYSKMIYLDADIQVFDNIDHLFDLSDAYFYAVMDCFCEKTWSHSLQYSIGYCQQCPEKVTWPEDMESPPPPLYFNAGMFVFEPSPLTYESLLQTLEITPPSPFAEQDFLNMFFEKVYKPIPLVYNLVLAMLWRHPENVELEKVKVVHYCAAGSKPWRYTGEEANMDREDIKMLVDKWWDVYNDESLDFKSKIPADAEETVTKSSILASVLEPEMTYFPAPSAA

SEQ ID NO: 90248 - DNA, 1406 bp, Arabidopsis thaliana
  misc_feature (1)..(1406): Ceres Seq. ID no. 12723259
  misc_feature (1)..(1406): Ortholog of  Ceres SEQ ID NO 13596585 as cited in SEQ ID NO 62424
  misc_feature (1)..(1406): Ortholog of  Ceres SEQ ID NO 15225240 as cited in SEQ ID NO 66495
gttttatgaaattgaagaacgaaattgaagtgaaaagtgaaatcgtgcaattttcatcttcctcttctccttaaaccctgatttcggattctcacaatcgaacttggctgcagagaaggatggggactaacgaagtaacaaggattgtgactgatgaagaaaagagagaagcgaagaacttcaacatatttgatctccctgacgttcctaccggacttcctccgcatcttgagctccagcgaactcgcgttgtctgtaagaaggattctaatattcatcctacggctatcactttctcgggtgcctattcctctatgggagtggacaacagtgtgagactagaaaacttctctgaggatttcaaagttgatgtgattagtctcacagagacagatatggtattcgatatgatcggtgtccatgcaggaatcgctaatgctttccgaagaatcctcttagctgagcttccttcaatggctattgaaaaagtgtatgtagcaaacaacacatcggttattcaagacgaagttcttgctcacaggttgggtcttattccaattgccgcagatccgagactctttgaatatttatctgaaaacgatcagccaaatgaaaagaacaccattgttttcaaactccatgtgaaatgtctaaaaggtgacccgcgtcgtaaagtcttaacaagcgaattgaaatggttaccaaatggaagtgagcttatcaaagaatctggaggttcaaccacaacgccaaaaacttacacttcattcaaccatagccaagattccttccctgaatttgctgaaaatcctatcaggccaaccttaaaagatatcttgatagcaaaacttggccctggccaggaaatcgagcttgaggctcatgccgttaagggcattggtaaaacacatgcaaagtggtccccagtagcaacggcttggtatcgaatgcttcctgaggtggttctactaaaggaattcgagggtaaacatgccgaagaactcgtaaaagtctgccccaagaaagtttttgacattgaagacatgggccaaggtaggaagagggcaacagtagctcggccgcgtgattgttcgttgtgtagagaatgcataagagatggagtggaatgggaggaccaagtggatctgcgccgtgtcaagaaccattttatatttacaattgagtccacgggatcacagcctccggaggttcttttcaacgaagcagtgaagatattggaagataaatgtgaaagagtaatctctgaactctcctgaaaagagattaaattggtttagctctaccggcttggttccggtttagttcagttttgggttttgtatcgaagttaatacaaagaacattgaaatttatatatacttggtttcggctcggttcaaatttag

SEQ ID NO: 90249 - protein, 385 aa, Arabidopsis thaliana
  peptide (1)..(385): Ceres Seq. ID no. 12723260
MGTNEVTRIVTDEEKREAKNFNIFDLPDVPTGLPPHLELQRTRVVCKKDSNIHPTAITFSGAYSSMGVDNSVRLENFSEDFKVDVISLTETDMVFDMIGVHAGIANAFRRILLAELPSMAIEKVYVANNTSVIQDEVLAHRLGLIPIAADPRLFEYLSENDQPNEKNTIVFKLHVKCLKGDPRRKVLTSELKWLPNGSELIKESGGSTTTPKTYTSFNHSQDSFPEFAENPIRPTLKDILIAKLGPGQEIELEAHAVKGIGKTHAKWSPVATAWYRMLPEVVLLKEFEGKHAEELVKVCPKKVFDIEDMGQGRKRATVARPRDCSLCRECIRDGVEWEDQVDLRRVKNHFIFTIESTGSQPPEVLFNEAVKILEDKCERVISELS

SEQ ID NO: 90250 - protein, 320 aa, Arabidopsis thaliana
  peptide (1)..(320): Ceres Seq. ID no. 12723261
MGVDNSVRLENFSEDFKVDVISLTETDMVFDMIGVHAGIANAFRRILLAELPSMAIEKVYVANNTSVIQDEVLAHRLGLIPIAADPRLFEYLSENDQPNEKNTIVFKLHVKCLKGDPRRKVLTSELKWLPNGSELIKESGGSTTTPKTYTSFNHSQDSFPEFAENPIRPTLKDILIAKLGPGQEIELEAHAVKGIGKTHAKWSPVATAWYRMLPEVVLLKEFEGKHAEELVKVCPKKVFDIEDMGQGRKRATVARPRDCSLCRECIRDGVEWEDQVDLRRVKNHFIFTIESTGSQPPEVLFNEAVKILEDKCERVISELS

SEQ ID NO: 90251 - protein, 293 aa, Arabidopsis thaliana
  peptide (1)..(293): Ceres Seq. ID no. 12723262
MVFDMIGVHAGIANAFRRILLAELPSMAIEKVYVANNTSVIQDEVLAHRLGLIPIAADPRLFEYLSENDQPNEKNTIVFKLHVKCLKGDPRRKVLTSELKWLPNGSELIKESGGSTTTPKTYTSFNHSQDSFPEFAENPIRPTLKDILIAKLGPGQEIELEAHAVKGIGKTHAKWSPVATAWYRMLPEVVLLKEFEGKHAEELVKVCPKKVFDIEDMGQGRKRATVARPRDCSLCRECIRDGVEWEDQVDLRRVKNHFIFTIESTGSQPPEVLFNEAVKILEDKCERVISELS

SEQ ID NO: 90252 - DNA, 849 bp, Arabidopsis thaliana
  misc_feature (1)..(849): Ceres Seq. ID no. 12723267
  misc_feature (1)..(849): Ortholog of  Ceres SEQ ID NO 13597380 as cited in SEQ ID NO 64054
  misc_feature (1)..(849): Ortholog of  Ceres SEQ ID NO 12625474 as cited in SEQ ID NO 64169
atggatacaggaaataacaataatcttcccactcttctaaagtgtaactttcctccatatggaaaagattatcctggaggcttcgctactggaagattttctgatggaagagttccttctgatcttattgcggaaaagttgggattggctaagacattaccagcatatatgaatccgtatttgaagccagaggatcttcttaaaggtgtaacatttgcatctggaggaactggttatgatccattgacagcaaaaattatgtcagtaatatcggtgtgggatcaactcataaatttcaaagaatatatatcaaagatcaagaggcatttcggagaagaaaaagccaaagatatcttggaacatagtttctttcttgtggtgtctagtagcaatgaccttgctcacacttatttagctcaaactcatcgatatgatcgtacctcttatgccaatttcttggctgactctgctgtccatttcgtgagagaattacataagcttggagctcggaaaataggagtgtttagtgcagtccccgtcggttgtgttccactccaaagaacagtttttggagataaagagctagatggtgttatcctttacattaatgtttatgatactcttttcgacatgatccaacaccctaaaaaatacggttttgaggtagctgatagaggatgttgcggtaaaggattgcttgcgatatcctatttgtgtaactcattgaacccatttacgtgttctaattcttcagcatacatattttgggatagctatcatccatctgaaagagcttatcaagttatcgtcgacaatttactcgacaaatatttgagcaaagtctattga

SEQ ID NO: 90253 - protein, 282 aa, Arabidopsis thaliana
  peptide (1)..(282): Ceres Seq. ID no. 12723268
MDTGNNNNLPTLLKCNFPPYGKDYPGGFATGRFSDGRVPSDLIAEKLGLAKTLPAYMNPYLKPEDLLKGVTFASGGTGYDPLTAKIMSVISVWDQLINFKEYISKIKRHFGEEKAKDILEHSFFLVVSSSNDLAHTYLAQTHRYDRTSYANFLADSAVHFVRELHKLGARKIGVFSAVPVGCVPLQRTVFGDKELDGVILYINVYDTLFDMIQHPKKYGFEVADRGCCGKGLLAISYLCNSLNPFTCSNSSAYIFWDSYHPSERAYQVIVDNLLDKYLSKVY

SEQ ID NO: 90254 - protein, 226 aa, Arabidopsis thaliana
  peptide (1)..(226): Ceres Seq. ID no. 12723269
MNPYLKPEDLLKGVTFASGGTGYDPLTAKIMSVISVWDQLINFKEYISKIKRHFGEEKAKDILEHSFFLVVSSSNDLAHTYLAQTHRYDRTSYANFLADSAVHFVRELHKLGARKIGVFSAVPVGCVPLQRTVFGDKELDGVILYINVYDTLFDMIQHPKKYGFEVADRGCCGKGLLAISYLCNSLNPFTCSNSSAYIFWDSYHPSERAYQVIVDNLLDKYLSKVY

SEQ ID NO: 90255 - protein, 196 aa, Arabidopsis thaliana
  peptide (1)..(196): Ceres Seq. ID no. 12723270
MSVISVWDQLINFKEYISKIKRHFGEEKAKDILEHSFFLVVSSSNDLAHTYLAQTHRYDRTSYANFLADSAVHFVRELHKLGARKIGVFSAVPVGCVPLQRTVFGDKELDGVILYINVYDTLFDMIQHPKKYGFEVADRGCCGKGLLAISYLCNSLNPFTCSNSSAYIFWDSYHPSERAYQVIVDNLLDKYLSKVY

SEQ ID NO: 90256 - DNA, 676 bp, Arabidopsis thaliana
  misc_feature (1)..(676): Ceres Seq. ID no. 12723283
  misc_feature (1)..(676): Ortholog of  Ceres SEQ ID NO 12610954 as cited in SEQ ID NO 55930
  misc_feature (1)..(676): Ortholog of  Ceres SEQ ID NO 12625335 as cited in SEQ ID NO 63326
  misc_feature (1)..(676): Ortholog of  Ceres SEQ ID NO 12566590 as cited in SEQ ID NO 0
  misc_feature (1)..(676): Ortholog of  Ceres SEQ ID NO 14305152 as cited in SEQ ID NO 0
  misc_feature (1)..(676): Ortholog of  Ceres SEQ ID NO 15179949 as cited in SEQ ID NO 0
aagtcaaaactcttctattttcccctgtcttcatatccaacagagatctcttcatggctccaattactgtcggcgatgttgtaccagacggaactatctctttcttcgatgaaaatgatcagcttcagaccgtctctgttcactctatcgccgccggtaaaaaagtcattctctttggtgttcctggtgctttcactcccacatgcagcatgagccatgtgcctggattcattgggaaagcagaggagctgaagtcaaagggtatcgatgagatcatttgctttagtgtgaatgatccatttgtgatgaaggcatggggaaagacataccaagagaacaagcatgtgaagtttgtagcagatgggtctggagaatacacacatcttcttggacttgagcttgatctcaaggacaagggtcttggtattaggtcaaggagatttgctctgttgcttgataaccttaaggtaactgtagccaatgtcgaaaatggtggcgagttcacggtttccagcgcagaggatatccttaaggctctctaagaaacattatcattcgcttgttgtattgtgaatctaaaccgctgtatgtgaagaagagaattatatagcctgatttcaatcaacaagcaagtgtattgacttgcttggcataataaagtatttggttttaatgt

SEQ ID NO: 90257 - protein, 179 aa, Arabidopsis thaliana
  peptide (1)..(179): Ceres Seq. ID no. 12723284
VKTLLFSPVFISNRDLFMAPITVGDVVPDGTISFFDENDQLQTVSVHSIAAGKKVILFGVPGAFTPTCSMSHVPGFIGKAEELKSKGIDEIICFSVNDPFVMKAWGKTYQENKHVKFVADGSGEYTHLLGLELDLKDKGLGIRSRRFALLLDNLKVTVANVENGGEFTVSSAEDILKAL

SEQ ID NO: 90258 - protein, 162 aa, Arabidopsis thaliana
  peptide (1)..(162): Ceres Seq. ID no. 12723285
MAPITVGDVVPDGTISFFDENDQLQTVSVHSIAAGKKVILFGVPGAFTPTCSMSHVPGFIGKAEELKSKGIDEIICFSVNDPFVMKAWGKTYQENKHVKFVADGSGEYTHLLGLELDLKDKGLGIRSRRFALLLDNLKVTVANVENGGEFTVSSAEDILKAL

SEQ ID NO: 90259 - protein, 110 aa, Arabidopsis thaliana
  peptide (1)..(110): Ceres Seq. ID no. 12723286
MSHVPGFIGKAEELKSKGIDEIICFSVNDPFVMKAWGKTYQENKHVKFVADGSGEYTHLLGLELDLKDKGLGIRSRRFALLLDNLKVTVANVENGGEFTVSSAEDILKAL

SEQ ID NO: 90260 - DNA, 993 bp, Arabidopsis thaliana
  misc_feature (1)..(993): Ceres Seq. ID no. 12723287
  misc_feature (1)..(993): Ortholog of  Ceres SEQ ID NO 13623732 as cited in SEQ ID NO 0
atggcagaggaagcttgtcaagtgcgtaggatgaagttagggagtcaaggtcttgaggtttcggctcagggacttggctgcatgggtctctccgacttttacggtgctccgacacctgagactaacgccgtcgctctcctccgtcacgccatcaacgctggggtcacatttctcgatacctccgacatctacggtcccgagacaaacgagctgcttcttggaaaggctttgaaagatggtttgagagataaagtggaattagcgacaaagtttgggatcactgcttctgaagatggaaaatttggtttcaggggagatccagagtatgtaaggattgcttgtgaagcaagcttaaagcgtcttggtgtaacctgcattgatctttattaccagcatcgaattgataccactctgcccatcgaaatcacgattggagagctgaagaagctagttgaagaaggcaaaataaagtacatcggtttgtcagaagcttcggcttcaactataagaagagcacatgctgttcacccgataaccgctgtgcaaatagaatggtccttatggtcgagagacgtggaagaagatatcattccaacctgcagggaacttgggattggaattgtagcttatagccctctaggaagaggcttcttaggtttaccaagattccaacaggagaatctagaaaacaacaagattctctacgagaaagtccaagcgatggcgacaaagaaaagttgcactcctgcacaactagctctagcgtgggttcaccatcaaggagatgatgtatgtccaattccaggaacctccaagatccaaaacctcaaccaaaacattggagctttatccgtgaagctcactcctgaagagatggttgagcttgaagccattgctcaaccggatttcgtgaaaggtgaacggtatgacaacaacatggttacttacaaagactcagagactccaccattgtcttcttggaaagcaagataa

SEQ ID NO: 90261 - protein, 330 aa, Arabidopsis thaliana
  peptide (1)..(330): Ceres Seq. ID no. 12723288
MAEEACQVRRMKLGSQGLEVSAQGLGCMGLSDFYGAPTPETNAVALLRHAINAGVTFLDTSDIYGPETNELLLGKALKDGLRDKVELATKFGITASEDGKFGFRGDPEYVRIACEASLKRLGVTCIDLYYQHRIDTTLPIEITIGELKKLVEEGKIKYIGLSEASASTIRRAHAVHPITAVQIEWSLWSRDVEEDIIPTCRELGIGIVAYSPLGRGFLGLPRFQQENLENNKILYEKVQAMATKKSCTPAQLALAWVHHQGDDVCPIPGTSKIQNLNQNIGALSVKLTPEEMVELEAIAQPDFVKGERYDNNMVTYKDSETPPLSSWKAR

SEQ ID NO: 90262 - protein, 320 aa, Arabidopsis thaliana
  peptide (1)..(320): Ceres Seq. ID no. 12723289
MKLGSQGLEVSAQGLGCMGLSDFYGAPTPETNAVALLRHAINAGVTFLDTSDIYGPETNELLLGKALKDGLRDKVELATKFGITASEDGKFGFRGDPEYVRIACEASLKRLGVTCIDLYYQHRIDTTLPIEITIGELKKLVEEGKIKYIGLSEASASTIRRAHAVHPITAVQIEWSLWSRDVEEDIIPTCRELGIGIVAYSPLGRGFLGLPRFQQENLENNKILYEKVQAMATKKSCTPAQLALAWVHHQGDDVCPIPGTSKIQNLNQNIGALSVKLTPEEMVELEAIAQPDFVKGERYDNNMVTYKDSETPPLSSWKAR

SEQ ID NO: 90263 - protein, 303 aa, Arabidopsis thaliana
  peptide (1)..(303): Ceres Seq. ID no. 12723290
MGLSDFYGAPTPETNAVALLRHAINAGVTFLDTSDIYGPETNELLLGKALKDGLRDKVELATKFGITASEDGKFGFRGDPEYVRIACEASLKRLGVTCIDLYYQHRIDTTLPIEITIGELKKLVEEGKIKYIGLSEASASTIRRAHAVHPITAVQIEWSLWSRDVEEDIIPTCRELGIGIVAYSPLGRGFLGLPRFQQENLENNKILYEKVQAMATKKSCTPAQLALAWVHHQGDDVCPIPGTSKIQNLNQNIGALSVKLTPEEMVELEAIAQPDFVKGERYDNNMVTYKDSETPPLSSWKAR

SEQ ID NO: 90264 - DNA, 1689 bp, Arabidopsis thaliana
  misc_feature (1)..(1689): Ceres Seq. ID no. 12723294
  misc_feature (1)..(1689): Ortholog of  Ceres SEQ ID NO 15177858 as cited in SEQ ID NO 51624
  misc_feature (1)..(1689): Ortholog of  Ceres SEQ ID NO 15171249 as cited in SEQ ID NO 52276
  misc_feature (1)..(1689): Ortholog of  Ceres SEQ ID NO 13594189 as cited in SEQ ID NO 58890
aaggatcgataacgaaatcatcagatcgccagaaaaaaaaaaaaaattgcgaaatggagaatctgagctgcagatctgcgtcaatctccatctagatgttgttgctacttcttcctctatagaaccataatttcatcagatctcgctgattaatcatccccatttggatctgatcgaaactcttagggaagaacatggcaggagctgcctccgcgctgtttctgcttgatatcaagggacgcgttctcgtctggcgtgattatcgtggcgatgtctccgctgctcaagccgagcgattcttcactaagctcatcgagaaagagggtgattcacagtcaaatgatccagttgcttacgataatggggtgacttatatgtttgtacaacatagtaatgtatacttgatgatagcatccaggcagaattgtaatgctgccagtcttctcttctttcttcaccgcgttgtcgatgttttcaagcattacttcgaggagttagaagaggaatcattgagggataactttgtggtagtgtatgagctacttgacgagatgatggactttggttaccctcagtataccgaagcaagaattctcagtgaattcatcaagactgatgcatatagaatggaagttacacagagacctccaatggctgtgacgaatgctgtctcctggaggagtgagggaatacagtacaagaagaatgaagttttcttggatgttattgagaatgtaaatattcttgtcaacagtaatgggcaaattgtcaggtctgatgttgttggagcgctgaagatgcgaacttacttgactggaatgccagagtgtaagttaggactgaatgatagagtattgctggaagcgcagggacgagcaactaagggaaaagccattgatttggaggacatcaaatttcatcagtgtgttcgattggcccgttttgaaaacgataggacgatatctttcataccacctgatggggcttttgatctgatgacatatagactcagcactcaggtaaagccacttatatgggtggaagcacaaatagaaagtcattcaagaagtcgtgttgagatgctcataaaagctagaagtcagttcaaggaacgaagcaccgcaacgaacgttgagattgagttgcctgtaccaaccgatgcatctaaccccaccgttaggacatctctagggtctgcctcttatgctcctgaaaaagatgcgttagtctggaaaatcaaatctttcccggggaacaaggagtacatgttaagggcagagttccatcttccaagtatcactgcagaggaagcaactcctgagcgaaaggctcctatccgtgtcaaatttgagatcccttatttcactgtttcagggattcaggttcggtacctaaagattattgagaagagtgggtaccaagcacttccatgggtgagatacataaccatggctggtgagtacgaactaagactcgtgtaatgcacatttagtttcatcgtctatgtcaattgtgattcccacatccctcaaggaattgcctgaatcaaagaagcaaaacgaaacaggacaaaagtagagggaaaagaaaacgttttgaaacattttagctgatcaaattttcctttaatttgttttagaagccatattcttgtgaatttgtctttatggtgattctattttattttac

SEQ ID NO: 90265 - protein, 428 aa, Arabidopsis thaliana
  peptide (1)..(428): Ceres Seq. ID no. 12723295
MAGAASALFLLDIKGRVLVWRDYRGDVSAAQAERFFTKLIEKEGDSQSNDPVAYDNGVTYMFVQHSNVYLMIASRQNCNAASLLFFLHRVVDVFKHYFEELEEESLRDNFVVVYELLDEMMDFGYPQYTEARILSEFIKTDAYRMEVTQRPPMAVTNAVSWRSEGIQYKKNEVFLDVIENVNILVNSNGQIVRSDVVGALKMRTYLTGMPECKLGLNDRVLLEAQGRATKGKAIDLEDIKFHQCVRLARFENDRTISFIPPDGAFDLMTYRLSTQVKPLIWVEAQIESHSRSRVEMLIKARSQFKERSTATNVEIELPVPTDASNPTVRTSLGSASYAPEKDALVWKIKSFPGNKEYMLRAEFHLPSITAEEATPERKAPIRVKFEIPYFTVSGIQVRYLKIIEKSGYQALPWVRYITMAGEYELRLV

SEQ ID NO: 90266 - protein, 368 aa, Arabidopsis thaliana
  peptide (1)..(368): Ceres Seq. ID no. 12723296
MFVQHSNVYLMIASRQNCNAASLLFFLHRVVDVFKHYFEELEEESLRDNFVVVYELLDEMMDFGYPQYTEARILSEFIKTDAYRMEVTQRPPMAVTNAVSWRSEGIQYKKNEVFLDVIENVNILVNSNGQIVRSDVVGALKMRTYLTGMPECKLGLNDRVLLEAQGRATKGKAIDLEDIKFHQCVRLARFENDRTISFIPPDGAFDLMTYRLSTQVKPLIWVEAQIESHSRSRVEMLIKARSQFKERSTATNVEIELPVPTDASNPTVRTSLGSASYAPEKDALVWKIKSFPGNKEYMLRAEFHLPSITAEEATPERKAPIRVKFEIPYFTVSGIQVRYLKIIEKSGYQALPWVRYITMAGEYELRLV

SEQ ID NO: 90267 - protein, 358 aa, Arabidopsis thaliana
  peptide (1)..(358): Ceres Seq. ID no. 12723297
MIASRQNCNAASLLFFLHRVVDVFKHYFEELEEESLRDNFVVVYELLDEMMDFGYPQYTEARILSEFIKTDAYRMEVTQRPPMAVTNAVSWRSEGIQYKKNEVFLDVIENVNILVNSNGQIVRSDVVGALKMRTYLTGMPECKLGLNDRVLLEAQGRATKGKAIDLEDIKFHQCVRLARFENDRTISFIPPDGAFDLMTYRLSTQVKPLIWVEAQIESHSRSRVEMLIKARSQFKERSTATNVEIELPVPTDASNPTVRTSLGSASYAPEKDALVWKIKSFPGNKEYMLRAEFHLPSITAEEATPERKAPIRVKFEIPYFTVSGIQVRYLKIIEKSGYQALPWVRYITMAGEYELRLV

SEQ ID NO: 90268 - DNA, 2566 bp, Arabidopsis thaliana
  misc_feature (1)..(2566): Ceres Seq. ID no. 12723302
  misc_feature (1)..(2566): Ortholog of  Ceres SEQ ID NO 13655640 as cited in SEQ ID NO 63844
  misc_feature (1)..(2566): Ortholog of  Ceres SEQ ID NO 13584744 as cited in SEQ ID NO 69137
accaaagtcataaaaatgatataaaatataaaccaagaagcactattagtatcactcatcactcaatagctttttttttttcagatctctaggaaaatttctcagactttcagagcattttggtgcttttgttttgcttggtttctcgggaaaattctcttcacacttttagagttttctctctcttctctatctcttgtcacagctcgtttagcattcattctcttaatcgtttcttcattcaaaaattctctctttctaagctgagtaacttgcaagtcgtcatttttcaattggggtcttctcctttttacttcctttgaattgaaatcacagagaaagagaggttccattgctggaaaatggattgctcaaattagtttctgtgtctaaataaagacagagaagaagaaaagtagacaaaagctaagtttttttttcagatatgggagagagaaaaatgagttggtgggttctttgaaacttgtttttgttcagaccaaagttgattgctttaagaagggatatggaaggtgtgagatttgtggtgtggagattaggatttctggtttttgtatggttctttgatatctcttctgctacactttctcctactggtgtaaactatgaagtgacagctttggttgctgtgaagaatgaattgaatgatccgtacaaagttcttgagaattgggatgtgaattcagttgatccttgtagctggagaatggtttcttgcactgatggctatgtctcttcactggatcttcctagccaaagcttgtctggtacattgtctcctagaatcggaaacctcacctatttacaatcagtggtgttgcaaaacaatgcaatcactggtccaattccggaaacgattgggaggttggagaagcttcagtcacttgatctttcgaacaattcattcaccggggagataccggcctcacttggagaactcaagaacttgaattacttgcggttaaacaataacagtcttataggaacttgccctgagtctctatccaagattgagggactcactctagtcgacatttcgtataacaatcttagtggttcgctgccaaaagtttctgccagaactttcaaggtaattggtaatgcgttaatctgtggcccaaaagctgtttcaaactgttctgctgttcccgagcctctcacgcttccacaagatggtccagatgaatcaggaactcgtaccaatggccatcacgttgctcttgcatttgccgcaagcttcagtgcagcattttttgttttctttacaagcggaatgtttctttggtggagatatcgccgtaacaagcaaatattttttgacgttaatgaacaatatgatccagaagtgagtttagggcacttgaagaggtatacattcaaagagcttagatctgccaccaatcatttcaactcgaagaacattctcggaagaggcggatacgggattgtgtacaaaggacacttaaacgatggaactttggtggctgtcaaacgtctcaaggactgtaacattgcgggtggagaagtccagtttcagacagaagtagagactataagtttggctcttcatcgcaatctcctccggctccgcggtttctgtagtagcaaccaggagagaattttagtctacccttacatgccaaatgggagtgtcgcatcacgcttaaaagataatatccgtggagagccagcattagactggtcgagaaggaagaagatagcggttgggacagcgagaggactagtttacctacacgagcaatgtgacccgaagattatacaccgcgatgtgaaagcagctaacattctgttagatgaggacttcgaagcagttgttggtgattttgggttagctaagcttctagaccatagagactctcatgtcacaactgcagtccgtggaactgttggccacattgcacctgagtacttatccacgggtcagtcctcagagaagactgatgtctttggctttggcatacttctccttgagctcattactggtcagaaagctcttgattttggcagatccgcacaccagaaaggtgtaatgcttgactgggtgaagaagctgcaccaagaagggaaactaaagcagttaatagacaaagatctaaatgacaagttcgatagagtagaactcgaagaaatcgttcaagttgcgctactctgcactcaattcaatccatctcatcgaccgaaaatgtcagaagttatgaagatgcttgaaggtgacggtttggctgagagatgggaagcgacgcagaacggtactggtgagcatcagccaccgccattgccaccggggatggtgagttcttcgccgcgtgtgaggtattactcggattatattcaggaatcgtctcttgtagtagaagccattgagctctcgggtcctcgatgattatgactcactgtttttaaaaaatttcttttcttgggtttgttttttatttgtcgttttataatgttgatatagatgtgaagttgagtgtgtaatttttatgtaaagaaaaaatatgaaatgcaaaagaaaatgttgatt

SEQ ID NO: 90269 - protein, 632 aa, Arabidopsis thaliana
  peptide (1)..(632): Ceres Seq. ID no. 12723303
MEGVRFVVWRLGFLVFVWFFDISSATLSPTGVNYEVTALVAVKNELNDPYKVLENWDVNSVDPCSWRMVSCTDGYVSSLDLPSQSLSGTLSPRIGNLTYLQSVVLQNNAITGPIPETIGRLEKLQSLDLSNNSFTGEIPASLGELKNLNYLRLNNNSLIGTCPESLSKIEGLTLVDISYNNLSGSLPKVSARTFKVIGNALICGPKAVSNCSAVPEPLTLPQDGPDESGTRTNGHHVALAFAASFSAAFFVFFTSGMFLWWRYRRNKQIFFDVNEQYDPEVSLGHLKRYTFKELRSATNHFNSKNILGRGGYGIVYKGHLNDGTLVAVKRLKDCNIAGGEVQFQTEVETISLALHRNLLRLRGFCSSNQERILVYPYMPNGSVASRLKDNIRGEPALDWSRRKKIAVGTARGLVYLHEQCDPKIIHRDVKAANILLDEDFEAVVGDFGLAKLLDHRDSHVTTAVRGTVGHIAPEYLSTGQSSEKTDVFGFGILLLELITGQKALDFGRSAHQKGVMLDWVKKLHQEGKLKQLIDKDLNDKFDRVELEEIVQVALLCTQFNPSHRPKMSEVMKMLEGDGLAERWEATQNGTGEHQPPPLPPGMVSSSPRVRYYSDYIQESSLVVEAIELSGPR

SEQ ID NO: 90270 - protein, 565 aa, Arabidopsis thaliana
  peptide (1)..(565): Ceres Seq. ID no. 12723304
MVSCTDGYVSSLDLPSQSLSGTLSPRIGNLTYLQSVVLQNNAITGPIPETIGRLEKLQSLDLSNNSFTGEIPASLGELKNLNYLRLNNNSLIGTCPESLSKIEGLTLVDISYNNLSGSLPKVSARTFKVIGNALICGPKAVSNCSAVPEPLTLPQDGPDESGTRTNGHHVALAFAASFSAAFFVFFTSGMFLWWRYRRNKQIFFDVNEQYDPEVSLGHLKRYTFKELRSATNHFNSKNILGRGGYGIVYKGHLNDGTLVAVKRLKDCNIAGGEVQFQTEVETISLALHRNLLRLRGFCSSNQERILVYPYMPNGSVASRLKDNIRGEPALDWSRRKKIAVGTARGLVYLHEQCDPKIIHRDVKAANILLDEDFEAVVGDFGLAKLLDHRDSHVTTAVRGTVGHIAPEYLSTGQSSEKTDVFGFGILLLELITGQKALDFGRSAHQKGVMLDWVKKLHQEGKLKQLIDKDLNDKFDRVELEEIVQVALLCTQFNPSHRPKMSEVMKMLEGDGLAERWEATQNGTGEHQPPPLPPGMVSSSPRVRYYSDYIQESSLVVEAIELSGPR

SEQ ID NO: 90271 - protein, 376 aa, Arabidopsis thaliana
  peptide (1)..(376): Ceres Seq. ID no. 12723305
MFLWWRYRRNKQIFFDVNEQYDPEVSLGHLKRYTFKELRSATNHFNSKNILGRGGYGIVYKGHLNDGTLVAVKRLKDCNIAGGEVQFQTEVETISLALHRNLLRLRGFCSSNQERILVYPYMPNGSVASRLKDNIRGEPALDWSRRKKIAVGTARGLVYLHEQCDPKIIHRDVKAANILLDEDFEAVVGDFGLAKLLDHRDSHVTTAVRGTVGHIAPEYLSTGQSSEKTDVFGFGILLLELITGQKALDFGRSAHQKGVMLDWVKKLHQEGKLKQLIDKDLNDKFDRVELEEIVQVALLCTQFNPSHRPKMSEVMKMLEGDGLAERWEATQNGTGEHQPPPLPPGMVSSSPRVRYYSDYIQESSLVVEAIELSGPR

SEQ ID NO: 90272 - DNA, 1457 bp, Arabidopsis thaliana
  misc_feature (1)..(1457): Ceres Seq. ID no. 12723306
  misc_feature (1)..(1457): Ortholog of  Ceres SEQ ID NO 14308099 as cited in SEQ ID NO 58651
  misc_feature (1)..(1457): Ortholog of  Ceres SEQ ID NO 13596893 as cited in SEQ ID NO 62932
atcgaattagtttgctaactaacgaagctgtagctacctcctctctcaacgtatggctcggaagaagatcagagagtatgactcaaagagactggtgaaagaacacttcaaaagactctctggtcaagaattgcctatcagatccgttcagattaaccaagagactgatctaaatgagctagtagagagagagccttggctctcatctgagaagcttgtggtgaaacctgatatgttgttcggaaagcgtggcaaaagcggtttggttgcattgaacttagatttcgctgatgttgcaactttcgtgaaagaacgcttaggcaaagaggtagagatgagtggatgcaaaggacccataacaacattcattgttgaaccatttgtcccacacaatgaagagttctatcttaatattgtctctgatagacttggctgcagcattagcttttcggagtgtggaggaattgacatcgaggagaactgggacaaggtcaagaccataactataccaacaggtgcttccctgacatttgagatatgtgcacctcttgttgcaacccttcctctagagatcaaaggggaacttgaagattttattcaagtcatttttaccctattcgaagatcttgatttcactttcttggagatgaatcctttcacattggttgatggaaagccttatcctctggatatgaggggtgagcttgatgacaccgctgctttcaaaaactttaagaagtggggcgacattgaatttcccatgccatttggaagagtgatgagttcaacagagagcttcatccacggtctagatgagaagacaagtgcctctttgaagttcactgttctgaatcccaagggaagaatttggactatggtagctggaggaggtgcaagtgtcatctatgctgataccgttggagatctcgggtatgcatctgagcttggcaattatgctgaatacagtggagcacccaaagaagacgaggttttgcagtatgccagagttgtcattgattgtgctacagcgaatccggatggaaaaagcagggctctggtaattggaggtggaattgctaacttcaccgatgttgctgctaccttcaatggcataatccgagctctcaaggaaaaagaagcaaagctgaaagcagcaaggatgcatatatttgtgaggagaggaggaccaaactaccaaaagggacttgctaaaatgagatcacttggagacgaaatcggtgtccccatcgaggtgtatggtcctgaagcaacaatgacaggtatatgcaaggaggcaatccagtacatcacagcggctgcataagcctttacaatcttatcacttactttcaaaatactctttagcgtctcttgagtttgagacgtgtttggattatgtttcacttctaatgtatcttactattcataaataaagaacaagtatcttcttttttctt

SEQ ID NO: 90273 - protein, 423 aa, Arabidopsis thaliana
  peptide (1)..(423): Ceres Seq. ID no. 12723307
MARKKIREYDSKRLVKEHFKRLSGQELPIRSVQINQETDLNELVEREPWLSSEKLVVKPDMLFGKRGKSGLVALNLDFADVATFVKERLGKEVEMSGCKGPITTFIVEPFVPHNEEFYLNIVSDRLGCSISFSECGGIDIEENWDKVKTITIPTGASLTFEICAPLVATLPLEIKGELEDFIQVIFTLFEDLDFTFLEMNPFTLVDGKPYPLDMRGELDDTAAFKNFKKWGDIEFPMPFGRVMSSTESFIHGLDEKTSASLKFTVLNPKGRIWTMVAGGGASVIYADTVGDLGYASELGNYAEYSGAPKEDEVLQYARVVIDCATANPDGKSRALVIGGGIANFTDVAATFNGIIRALKEKEAKLKAARMHIFVRRGGPNYQKGLAKMRSLGDEIGVPIEVYGPEATMTGICKEAIQYITAAA

SEQ ID NO: 90274 - protein, 363 aa, Arabidopsis thaliana
  peptide (1)..(363): Ceres Seq. ID no. 12723308
MLFGKRGKSGLVALNLDFADVATFVKERLGKEVEMSGCKGPITTFIVEPFVPHNEEFYLNIVSDRLGCSISFSECGGIDIEENWDKVKTITIPTGASLTFEICAPLVATLPLEIKGELEDFIQVIFTLFEDLDFTFLEMNPFTLVDGKPYPLDMRGELDDTAAFKNFKKWGDIEFPMPFGRVMSSTESFIHGLDEKTSASLKFTVLNPKGRIWTMVAGGGASVIYADTVGDLGYASELGNYAEYSGAPKEDEVLQYARVVIDCATANPDGKSRALVIGGGIANFTDVAATFNGIIRALKEKEAKLKAARMHIFVRRGGPNYQKGLAKMRSLGDEIGVPIEVYGPEATMTGICKEAIQYITAAA

SEQ ID NO: 90275 - protein, 329 aa, Arabidopsis thaliana
  peptide (1)..(329): Ceres Seq. ID no. 12723309
MSGCKGPITTFIVEPFVPHNEEFYLNIVSDRLGCSISFSECGGIDIEENWDKVKTITIPTGASLTFEICAPLVATLPLEIKGELEDFIQVIFTLFEDLDFTFLEMNPFTLVDGKPYPLDMRGELDDTAAFKNFKKWGDIEFPMPFGRVMSSTESFIHGLDEKTSASLKFTVLNPKGRIWTMVAGGGASVIYADTVGDLGYASELGNYAEYSGAPKEDEVLQYARVVIDCATANPDGKSRALVIGGGIANFTDVAATFNGIIRALKEKEAKLKAARMHIFVRRGGPNYQKGLAKMRSLGDEIGVPIEVYGPEATMTGICKEAIQYITAAA

SEQ ID NO: 90276 - DNA, 725 bp, Arabidopsis thaliana
  misc_feature (1)..(725): Ceres Seq. ID no. 12723324
  misc_feature (1)..(725): Ortholog of  Ceres SEQ ID NO 15172913 as cited in SEQ ID NO 51824
  misc_feature (1)..(725): Ortholog of  Ceres SEQ ID NO 13654659 as cited in SEQ ID NO 61998
ctctgccaaagtccaaaggagagtttttctttattactagggcattctctgcagatttcttctccttaagccatggaattgcccccaaaagtgaaaaacatcttgcttttggattctgaaggaaagcgtgtagcggttaagtattactcagatgactggccaacaaattcagctcaggaagcgttcgaaaaatccgtgtttacaaagactcagaaaacaaatgctaggaccgaagtggaagtgacagcactggagaacaacattgttgtgtacaaatttgtgcaagatctccatttctttgttacgggcggtgaagaggaaaacgagcttatcttagccagtgtgcttgagggactctttgatgcagtgacccttctccttagaagcaatgttgataagagagaggcactagacaaccttgatctcatctttctaagctttgatgaaattatcgatggcggtattgttctggagacggatgcaaatgtaatagcaggtaaagcagggatcaatagcactgaccctaacgctcctctatccgagcagacgataagtcaagcactcgcgactgcaagagaacatttgacaaggtcacttatgaaatgatgtgtgttttgctcttcggtaataatggttgtttttgtcatggtgaatgtgtgttttgtctcttgtagttgagtgactatactcttaaatataaaagttactttgcacttgggagatag

SEQ ID NO: 90277 - protein, 177 aa, Arabidopsis thaliana
  peptide (1)..(177): Ceres Seq. ID no. 12723325
MELPPKVKNILLLDSEGKRVAVKYYSDDWPTNSAQEAFEKSVFTKTQKTNARTEVEVTALENNIVVYKFVQDLHFFVTGGEEENELILASVLEGLFDAVTLLLRSNVDKREALDNLDLIFLSFDEIIDGGIVLETDANVIAGKAGINSTDPNAPLSEQTISQALATAREHLTRSLMK

SEQ ID NO: 90278 - DNA, 2724 bp, Arabidopsis thaliana
  misc_feature (1)..(2724): Ceres Seq. ID no. 12723338
  misc_feature (1)..(2724): Ortholog of  Ceres SEQ ID NO 13624427 as cited in SEQ ID NO 0
atgttgttcggtcgtaaatcatcaagcaagttacagcctgtaaaagggcaagcatcacctaaagttagcaagagtagcaagcaggatgttaaaacttcttcttcttcacctaaaccttcttcgtcacctataccgattagatcatctaagtcaatattatccgggagttacttaacatcatcaagacgtgtttcatcgcctataggcaacctcaagaatatttctgttaaagaagctaggagccccaagacgagcagctcgcctaaatggacaggaaattttattcttatggtcgagcttcgcaggaagatctttacctttagagacatcattgatctttctacccttgatggttctccttccataaccgatgtgcgtaaaccgcaaccttatatccttatggtgatgcatacaatgaaagatctccagaaaatttgtcctgagatcattcatagctcccatatcatggaaattagacgtgcaaatgtagataaggttcttgaccatttctttaatgctttgaaatccattggagattcatggattgataaccctgaatggatagctaaatccaagtattggagtagcagcgtcgggaagaatcagtctgatcgcttagtggaaaaagtgttagctgcattagatggactgattaagatgtccaaagagaggtttgatatgatggagattgatgaagaagaagagaagaaagagtccactagtccacagacaggtaaaacatcgagcagtcgagttttatcgccatccgaatcattctccgatagcaaatcatcctttggtagcagaaactcgttttgcgggtcaccgaccacgccaagatcagttctaccagaatcgatgatgggttcaccgggaagagttggagactttgcaaactctgcatctcatcttttatggaatatgagagttcaagcacttgaaaagcttagtcctatcgatgttaaacgactcgctatccacatcttgtcacagaaagaagctcaggaaccaaacgaaagcaatgatgaagatgtgattagtgttgttgaagagatcaagcagaagaaggatgaaatagagagcattgatgtgaaaatggagacagaagaatctgttaatcttgatgaagaatccgttgttcttaatggcgaacaagacactatcatgaagatctcttcattggagtcaacatctgaatccaaactcaatcattcagaaaaatatgaaaattcatcacaacttttcccgccaccgccgcctcctcctcctcctcctccactatcctttataaaaactgcttctttacctcttccatcaccacctcctactccgccaattgctgacatcgcaatatcaatgccacctcctccgccaccaccaccgcctcctccagcagttatgcctttgaaacactttgctccaccaccaccaccaccgcttccaccagcagttatgcctttgaaacactttgctccaccaccaccgactccaccagcatttaagcctttaaaaggctctgctccaccaccaccgccacctcctccacttccaacaactatagcggctccacctccaccgcctccacctccaagagctgcagtggccccaccaccacctcctccacctccaggaactgcagcggcaccaccaccgcctcctccacctccaggaactcaagcggcaccaccaccgcctcctcctccacctatgcaaaacagagcaccatctccacctccaatgcctatgggaaatagtggaagtggtggaccaccccctccaccacctcctatgcctctagctaatggagcaacaccgccaccgccgccacctcctatggctatggcaaacggagcagcaggaccgcctccgccaccacctcgaatgggtatggcgaatggagcagctggtccaccaccgccaccaggagctgcaagaagcttgcgtcccaagaaagctgccacaaagctgaaaaggtcaacacaactaggaaacctttatagaatccttaaagggaaagtagaagggcgtgatcctaacgcaaaaaccggcagcggaagcggaagaaaagctggagccggaagcgctccagctggtggaaagcaaggaatggctgatgctcttgctgagatcacaaagaaatctgcatattttttgcaaatacaagccgatattgcaaagtacatgacgtcaataaatgagctgaagattgagatcactaagttccagactaaagacatgactgagcttcttagcttccaccgtcgcgtcgaatcagttcttgaaaacctaacagacgagtcacaggttcttgcccgatgcgaagggtttccgcagaagaaactcgaagcaatgagaatggctgttgcattgtacacgaaactacacggtatgatcaccgagctacagaacatgaaaatagaacctcctttgaaccagcttcttgataaagtagaacgttacttcaccaagatcaaagaaacaatggttgatatctcatcaaattgcatggaacttgcattgaaggaaaagagagacgaaaagctcgtgtcccccgatgcaaagccgagtttgaagaagacagtaggatctgctaaaatgctttggcgggcatttcagtttgcattcaaagtctacacatttgcaggaggacacgacgatcgtgctgattctctaaccagagagttggctcatgagatccaaactgattctgatccgaacccatga

SEQ ID NO: 90279 - protein, 907 aa, Arabidopsis thaliana
  peptide (1)..(907): Ceres Seq. ID no. 12723339
MLFGRKSSSKLQPVKGQASPKVSKSSKQDVKTSSSSPKPSSSPIPIRSSKSILSGSYLTSSRRVSSPIGNLKNISVKEARSPKTSSSPKWTGNFILMVELRRKIFTFRDIIDLSTLDGSPSITDVRKPQPYILMVMHTMKDLQKICPEIIHSSHIMEIRRANVDKVLDHFFNALKSIGDSWIDNPEWIAKSKYWSSSVGKNQSDRLVEKVLAALDGLIKMSKERFDMMEIDEEEEKKESTSPQTGKTSSSRVLSPSESFSDSKSSFGSRNSFCGSPTTPRSVLPESMMGSPGRVGDFANSASHLLWNMRVQALEKLSPIDVKRLAIHILSQKEAQEPNESNDEDVISVVEEIKQKKDEIESIDVKMETEESVNLDEESVVLNGEQDTIMKISSLESTSESKLNHSEKYENSSQLFPPPPPPPPPPPLSFIKTASLPLPSPPPTPPIADIAISMPPPPPPPPPPPAVMPLKHFAPPPPPPLPPAVMPLKHFAPPPPTPPAFKPLKGSAPPPPPPPPLPTTIAAPPPPPPPPRAAVAPPPPPPPPGTAAAPPPPPPPPGTQAAPPPPPPPPMQNRAPSPPPMPMGNSGSGGPPPPPPPMPLANGATPPPPPPPMAMANGAAGPPPPPPRMGMANGAAGPPPPPGAARSLRPKKAATKLKRSTQLGNLYRILKGKVEGRDPNAKTGSGSGRKAGAGSAPAGGKQGMADALAEITKKSAYFLQIQADIAKYMTSINELKIEITKFQTKDMTELLSFHRRVESVLENLTDESQVLARCEGFPQKKLEAMRMAVALYTKLHGMITELQNMKIEPPLNQLLDKVERYFTKIKETMVDISSNCMELALKEKRDEKLVSPDAKPSLKKTVGSAKMLWRAFQFAFKVYTFAGGHDDRADSLTRELAHEIQTDSDPNP

SEQ ID NO: 90280 - protein, 811 aa, Arabidopsis thaliana
  peptide (1)..(811): Ceres Seq. ID no. 12723340
MVELRRKIFTFRDIIDLSTLDGSPSITDVRKPQPYILMVMHTMKDLQKICPEIIHSSHIMEIRRANVDKVLDHFFNALKSIGDSWIDNPEWIAKSKYWSSSVGKNQSDRLVEKVLAALDGLIKMSKERFDMMEIDEEEEKKESTSPQTGKTSSSRVLSPSESFSDSKSSFGSRNSFCGSPTTPRSVLPESMMGSPGRVGDFANSASHLLWNMRVQALEKLSPIDVKRLAIHILSQKEAQEPNESNDEDVISVVEEIKQKKDEIESIDVKMETEESVNLDEESVVLNGEQDTIMKISSLESTSESKLNHSEKYENSSQLFPPPPPPPPPPPLSFIKTASLPLPSPPPTPPIADIAISMPPPPPPPPPPPAVMPLKHFAPPPPPPLPPAVMPLKHFAPPPPTPPAFKPLKGSAPPPPPPPPLPTTIAAPPPPPPPPRAAVAPPPPPPPPGTAAAPPPPPPPPGTQAAPPPPPPPPMQNRAPSPPPMPMGNSGSGGPPPPPPPMPLANGATPPPPPPPMAMANGAAGPPPPPPRMGMANGAAGPPPPPGAARSLRPKKAATKLKRSTQLGNLYRILKGKVEGRDPNAKTGSGSGRKAGAGSAPAGGKQGMADALAEITKKSAYFLQIQADIAKYMTSINELKIEITKFQTKDMTELLSFHRRVESVLENLTDESQVLARCEGFPQKKLEAMRMAVALYTKLHGMITELQNMKIEPPLNQLLDKVERYFTKIKETMVDISSNCMELALKEKRDEKLVSPDAKPSLKKTVGSAKMLWRAFQFAFKVYTFAGGHDDRADSLTRELAHEIQTDSDPNP

SEQ ID NO: 90281 - protein, 774 aa, Arabidopsis thaliana
  peptide (1)..(774): Ceres Seq. ID no. 12723341
MVMHTMKDLQKICPEIIHSSHIMEIRRANVDKVLDHFFNALKSIGDSWIDNPEWIAKSKYWSSSVGKNQSDRLVEKVLAALDGLIKMSKERFDMMEIDEEEEKKESTSPQTGKTSSSRVLSPSESFSDSKSSFGSRNSFCGSPTTPRSVLPESMMGSPGRVGDFANSASHLLWNMRVQALEKLSPIDVKRLAIHILSQKEAQEPNESNDEDVISVVEEIKQKKDEIESIDVKMETEESVNLDEESVVLNGEQDTIMKISSLESTSESKLNHSEKYENSSQLFPPPPPPPPPPPLSFIKTASLPLPSPPPTPPIADIAISMPPPPPPPPPPPAVMPLKHFAPPPPPPLPPAVMPLKHFAPPPPTPPAFKPLKGSAPPPPPPPPLPTTIAAPPPPPPPPRAAVAPPPPPPPPGTAAAPPPPPPPPGTQAAPPPPPPPPMQNRAPSPPPMPMGNSGSGGPPPPPPPMPLANGATPPPPPPPMAMANGAAGPPPPPPRMGMANGAAGPPPPPGAARSLRPKKAATKLKRSTQLGNLYRILKGKVEGRDPNAKTGSGSGRKAGAGSAPAGGKQGMADALAEITKKSAYFLQIQADIAKYMTSINELKIEITKFQTKDMTELLSFHRRVESVLENLTDESQVLARCEGFPQKKLEAMRMAVALYTKLHGMITELQNMKIEPPLNQLLDKVERYFTKIKETMVDISSNCMELALKEKRDEKLVSPDAKPSLKKTVGSAKMLWRAFQFAFKVYTFAGGHDDRADSLTRELAHEIQTDSDPNP

SEQ ID NO: 90282 - DNA, 2013 bp, Arabidopsis thaliana
  misc_feature (1)..(2013): Ceres Seq. ID no. 12723362
  misc_feature (1)..(2013): Ortholog of  Ceres SEQ ID NO 15180309 as cited in SEQ ID NO 1272
accgagaaacgccagctccgtcaaatattaccaaactctcttcccctctctctctttcctcaaaacccattaaccattactgataacccaacgagattacctgtgaaagtcttcgtcttcccatcattttccctctaatatcctcactttctgaagatgagtttgctttaaaaccactttgataagaacaagaaagaagaagactttatcaaccaaaatgggtgaagaagcttgtgaggaatcatcaaaagcaagcatagagaaagcaatcgaagcaatatcttcattgatttcactctctcactcaatcaaatccttcaacatcaaatggcaactcataagaaccaaactccaagagctttactctggtctcgattctctccgaaatctcaattctggattcgacccatctctctcaagcttaatctccgccattctaatctctctcaaagacacttacgatctcgctactcgctgcgttaacgtctccttcagtggtaagcttctgatgcaaagcgatttagatgttatggcggggaaattcgatggacatacgaggaatctatctcggatttactcagctgggattctaagtcatggatttgcgatcgttgtgttgaagcctaatggtaatgcttgtaaagatgacatgaggttttacattagggatttgttaacgagaatgaagattggagatctggagatgaagaaacaagctttggttaagctgaatgaagctatggaggaagatgatagatatgttaagattctgattgagattagtgatatggttaatgttcttgttgggtttcttgattctgagattgggattcaagaagaatctgccaaagctgtgttttttatatctgggtttggttcttatagggatgttttgatcagatcaggtgtgattggtcctttggttagggttcttgagaatgggaatggtgttggtagagaagcgtctgcaaggtgtttgatgaaattaactgagaattctgagaatgcttggtctgtttctgctcatggaggtgtttcagctttgttgaagatttgttcttgtagtgattttggtggtgaattgattggtacttcgtgtggtgtgttgagaaatctcgttggtgttgaagagatcaagaggtttatgattgaagaagatcatactgttgctactttcatcaagcttattggatcaaaggaggagattgttcaggtaaattctattgatttactgttgagtatgtgttgtaaagacgaacaaacccgggacatcttggttagagaaggaggaattcaggagctagtgagtgtgttatcagatcccaattcgttgtcttcttcgaaatctaaggagatagcattaagggcgattgataacttatgtttcgggtctgcgggttgtttgaatgcattgatgggttgcaaattcttggatcatttgctgaatctgctaagaaatggggagatttctgttcaagaatcagccttgaaggtcacatctaggctatgtagtttacaagaagaggttaagaggataatgggagaggcgggttttatgcccgagctagttaaatttctcgacgccaaatcgatagatgtacgagaaatggcgagcgtggcactgtactgtttgatctcggttccaaggaacaggaagaagtttgcacaagacgactttaacattagctacattctccagttgctagaccatgaagatgggagcaatgtgagcagcgattcaggtaacacaaagtttttgatatcgatattgatgtctttaacgagctgcaatagcgcgagaagaaagattgcgagttcagggtatttgaaaagcatagagaagctagcagaaactgaaggttcagatgctaagaaacttgtgaagaagctatcaatgaacagattccgcagcatactcagtggtatttggcattcctaattttattttgtttccttatagttttttttttgtgaatttttcttgagtgtatatttttacaaaggtgtttttgt

SEQ ID NO: 90283 - protein, 573 aa, Arabidopsis thaliana
  peptide (1)..(573): Ceres Seq. ID no. 12723363
MGEEACEESSKASIEKAIEAISSLISLSHSIKSFNIKWQLIRTKLQELYSGLDSLRNLNSGFDPSLSSLISAILISLKDTYDLATRCVNVSFSGKLLMQSDLDVMAGKFDGHTRNLSRIYSAGILSHGFAIVVLKPNGNACKDDMRFYIRDLLTRMKIGDLEMKKQALVKLNEAMEEDDRYVKILIEISDMVNVLVGFLDSEIGIQEESAKAVFFISGFGSYRDVLIRSGVIGPLVRVLENGNGVGREASARCLMKLTENSENAWSVSAHGGVSALLKICSCSDFGGELIGTSCGVLRNLVGVEEIKRFMIEEDHTVATFIKLIGSKEEIVQVNSIDLLLSMCCKDEQTRDILVREGGIQELVSVLSDPNSLSSSKSKEIALRAIDNLCFGSAGCLNALMGCKFLDHLLNLLRNGEISVQESALKVTSRLCSLQEEVKRIMGEAGFMPELVKFLDAKSIDVREMASVALYCLISVPRNRKKFAQDDFNISYILQLLDHEDGSNVSSDSGNTKFLISILMSLTSCNSARRKIASSGYLKSIEKLAETEGSDAKKLVKKLSMNRFRSILSGIWHS

SEQ ID NO: 90284 - protein, 476 aa, Arabidopsis thaliana
  peptide (1)..(476): Ceres Seq. ID no. 12723364
MQSDLDVMAGKFDGHTRNLSRIYSAGILSHGFAIVVLKPNGNACKDDMRFYIRDLLTRMKIGDLEMKKQALVKLNEAMEEDDRYVKILIEISDMVNVLVGFLDSEIGIQEESAKAVFFISGFGSYRDVLIRSGVIGPLVRVLENGNGVGREASARCLMKLTENSENAWSVSAHGGVSALLKICSCSDFGGELIGTSCGVLRNLVGVEEIKRFMIEEDHTVATFIKLIGSKEEIVQVNSIDLLLSMCCKDEQTRDILVREGGIQELVSVLSDPNSLSSSKSKEIALRAIDNLCFGSAGCLNALMGCKFLDHLLNLLRNGEISVQESALKVTSRLCSLQEEVKRIMGEAGFMPELVKFLDAKSIDVREMASVALYCLISVPRNRKKFAQDDFNISYILQLLDHEDGSNVSSDSGNTKFLISILMSLTSCNSARRKIASSGYLKSIEKLAETEGSDAKKLVKKLSMNRFRSILSGIWHS

SEQ ID NO: 90285 - protein, 469 aa, Arabidopsis thaliana
  peptide (1)..(469): Ceres Seq. ID no. 12723365
MAGKFDGHTRNLSRIYSAGILSHGFAIVVLKPNGNACKDDMRFYIRDLLTRMKIGDLEMKKQALVKLNEAMEEDDRYVKILIEISDMVNVLVGFLDSEIGIQEESAKAVFFISGFGSYRDVLIRSGVIGPLVRVLENGNGVGREASARCLMKLTENSENAWSVSAHGGVSALLKICSCSDFGGELIGTSCGVLRNLVGVEEIKRFMIEEDHTVATFIKLIGSKEEIVQVNSIDLLLSMCCKDEQTRDILVREGGIQELVSVLSDPNSLSSSKSKEIALRAIDNLCFGSAGCLNALMGCKFLDHLLNLLRNGEISVQESALKVTSRLCSLQEEVKRIMGEAGFMPELVKFLDAKSIDVREMASVALYCLISVPRNRKKFAQDDFNISYILQLLDHEDGSNVSSDSGNTKFLISILMSLTSCNSARRKIASSGYLKSIEKLAETEGSDAKKLVKKLSMNRFRSILSGIWHS

SEQ ID NO: 90286 - DNA, 2415 bp, Arabidopsis thaliana
  misc_feature (1)..(2415): Ceres Seq. ID no. 12723377
  misc_feature (1)..(2415): Ortholog of  Ceres SEQ ID NO 13582534 as cited in SEQ ID NO 57409
atgatgacgaggtttgcttgtttgcacctctttaccatgttcttgtttaccttgctctcaggttcaagttctgcagttataacgacagaaagtcctttgtcaatgggacaaactctcagctccgctaatgaggtttatgaattggggttcttcagtcctaataacacccaagatcagtatgttggaatctggttcaaggataccattccccgggttgttgtgtgggtggccaatagagagaagcctgttacagactctacggcatatctagctataagcagcagtggaagtcttctgttacttaatggcaaacatggcactgtgtggtctagtggagtaactttttcctctagcgggtgtcgtgcagagctttcagatagcggaaatcttaaggtcatagataatgtttcggaaagagctctgtggcaaagctttgatcatcttggggatacactgctacatacctcatccctgacgtataacctcgccaccgctgagaagcgggtgttgacttcttggaaaagttacaccgatccatcacctggcgactttttgggccagattacacctcaagtgccatcacaggggttcgttatgagagggtcaacgccttactggagaagcggtccatgggctaaaacaaggttcactgggataccgtttatggatgaatcatacacaggtccattcacccttcaccaggatgtaaacgggtcaggatacttgacttattttcaaagagactacaaactttcacgtataactttaacatcagagggatcaataaagatgtttcgggataatggaatgggctgggaattgtactatgaggctccaaaaaaattatgcgatttttatggtgcgtgtggaccatttgggttgtgtgttatgtcaccttctcccatgtgtaaatgcttcagaggttttgtaccaaaatctgttgaggagtggaaaaggggaaactggactggtggttgtgtgaggcataccgaactagattgtctaggaaactctactggcgaagatgcagatgacttccatcaaattgccaacataaagcctccagacttttatgaatttgcaagttctgtgaatgctgaagaatgccaccaacgttgcgtccacaattgttcttgcttggcatttgcttatattaagggaatagggtgcctagtgtggaaccaggacctaatggatgccgtacaattttctgcaacaggagaacttctttccattcgtcttgcacgatctgagctagatggaaataagcgcaagaagactattgttgctagtatagtgagcctgactctattcatgatcttgggcttcactgcgtttggtgtctggagatgcagagtggaacatatcgctcatatatcaaaggatgcatggaagaatgatctgaaaccacaagatgtcccaggtttagatttctttgatatgcataccattcaaaacgccaccaataattttagtctatcaaacaaactcggacaaggtggatttggttcagtttacaagggaaagctgcaagatgggaaagaaattgctgttaaacggctttctagcagctctggacagggaaaagaggagtttatgaatgaaatagtactcatctcaaaactccaacacagaaacttagtcagggttttgggatgttgcatcgaagaagaagagaagctattgatttatgagtttatggtgaacaaaagccttgatacctttctctttgattcaagaaaaaggctggagattgattggccaaaaagatttgatatcattcaaggtattgcacgtggacttctctatctccaccatgactcacgcctcagagttattcaccgagacctgaaggtcagcaacatccttctggatgagaaaatgaacccaaaaatatcagattttggattggctcggatgtatcaggggaccgaatatcaggataacactcgcagggttgtaggaactctaggatatatgtctccagagtatgcatggactgggatgttctctgagaaatctgacatctacagcttcggagttctaatgttagaaatcatcagtggagagaagatctcaagattcagctatggcgtagaaggaaaaacccttattgcatatgcgtgggaatcttggtctgaatacagaggaattgatcttttggaccaagatcttgctgattcatgtcacccattagaagttgggagatgtattcaaatcggcttgctctgtgtacaacaccaacctgcagacagacccaacacacttgagttgctggctatgctcaccacaacatcagatcttccatcaccaaaacaacccacatttgcatttcacacgagagatgacgaatcactgtctaacgatttgatcaccgtcaatgggatgacgcaatctgtgatccttgggcgttaa

SEQ ID NO: 90287 - protein, 804 aa, Arabidopsis thaliana
  peptide (1)..(804): Ceres Seq. ID no. 12723378
MMTRFACLHLFTMFLFTLLSGSSSAVITTESPLSMGQTLSSANEVYELGFFSPNNTQDQYVGIWFKDTIPRVVVWVANREKPVTDSTAYLAISSSGSLLLLNGKHGTVWSSGVTFSSSGCRAELSDSGNLKVIDNVSERALWQSFDHLGDTLLHTSSLTYNLATAEKRVLTSWKSYTDPSPGDFLGQITPQVPSQGFVMRGSTPYWRSGPWAKTRFTGIPFMDESYTGPFTLHQDVNGSGYLTYFQRDYKLSRITLTSEGSIKMFRDNGMGWELYYEAPKKLCDFYGACGPFGLCVMSPSPMCKCFRGFVPKSVEEWKRGNWTGGCVRHTELDCLGNSTGEDADDFHQIANIKPPDFYEFASSVNAEECHQRCVHNCSCLAFAYIKGIGCLVWNQDLMDAVQFSATGELLSIRLARSELDGNKRKKTIVASIVSLTLFMILGFTAFGVWRCRVEHIAHISKDAWKNDLKPQDVPGLDFFDMHTIQNATNNFSLSNKLGQGGFGSVYKGKLQDGKEIAVKRLSSSSGQGKEEFMNEIVLISKLQHRNLVRVLGCCIEEEEKLLIYEFMVNKSLDTFLFDSRKRLEIDWPKRFDIIQGIARGLLYLHHDSRLRVIHRDLKVSNILLDEKMNPKISDFGLARMYQGTEYQDNTRRVVGTLGYMSPEYAWTGMFSEKSDIYSFGVLMLEIISGEKISRFSYGVEGKTLIAYAWESWSEYRGIDLLDQDLADSCHPLEVGRCIQIGLLCVQHQPADRPNTLELLAMLTTTSDLPSPKQPTFAFHTRDDESLSNDLITVNGMTQSVILGR

SEQ ID NO: 90288 - protein, 803 aa, Arabidopsis thaliana
  peptide (1)..(803): Ceres Seq. ID no. 12723379
MTRFACLHLFTMFLFTLLSGSSSAVITTESPLSMGQTLSSANEVYELGFFSPNNTQDQYVGIWFKDTIPRVVVWVANREKPVTDSTAYLAISSSGSLLLLNGKHGTVWSSGVTFSSSGCRAELSDSGNLKVIDNVSERALWQSFDHLGDTLLHTSSLTYNLATAEKRVLTSWKSYTDPSPGDFLGQITPQVPSQGFVMRGSTPYWRSGPWAKTRFTGIPFMDESYTGPFTLHQDVNGSGYLTYFQRDYKLSRITLTSEGSIKMFRDNGMGWELYYEAPKKLCDFYGACGPFGLCVMSPSPMCKCFRGFVPKSVEEWKRGNWTGGCVRHTELDCLGNSTGEDADDFHQIANIKPPDFYEFASSVNAEECHQRCVHNCSCLAFAYIKGIGCLVWNQDLMDAVQFSATGELLSIRLARSELDGNKRKKTIVASIVSLTLFMILGFTAFGVWRCRVEHIAHISKDAWKNDLKPQDVPGLDFFDMHTIQNATNNFSLSNKLGQGGFGSVYKGKLQDGKEIAVKRLSSSSGQGKEEFMNEIVLISKLQHRNLVRVLGCCIEEEEKLLIYEFMVNKSLDTFLFDSRKRLEIDWPKRFDIIQGIARGLLYLHHDSRLRVIHRDLKVSNILLDEKMNPKISDFGLARMYQGTEYQDNTRRVVGTLGYMSPEYAWTGMFSEKSDIYSFGVLMLEIISGEKISRFSYGVEGKTLIAYAWESWSEYRGIDLLDQDLADSCHPLEVGRCIQIGLLCVQHQPADRPNTLELLAMLTTTSDLPSPKQPTFAFHTRDDESLSNDLITVNGMTQSVILGR

SEQ ID NO: 90289 - protein, 792 aa, Arabidopsis thaliana
  peptide (1)..(792): Ceres Seq. ID no. 12723380
MFLFTLLSGSSSAVITTESPLSMGQTLSSANEVYELGFFSPNNTQDQYVGIWFKDTIPRVVVWVANREKPVTDSTAYLAISSSGSLLLLNGKHGTVWSSGVTFSSSGCRAELSDSGNLKVIDNVSERALWQSFDHLGDTLLHTSSLTYNLATAEKRVLTSWKSYTDPSPGDFLGQITPQVPSQGFVMRGSTPYWRSGPWAKTRFTGIPFMDESYTGPFTLHQDVNGSGYLTYFQRDYKLSRITLTSEGSIKMFRDNGMGWELYYEAPKKLCDFYGACGPFGLCVMSPSPMCKCFRGFVPKSVEEWKRGNWTGGCVRHTELDCLGNSTGEDADDFHQIANIKPPDFYEFASSVNAEECHQRCVHNCSCLAFAYIKGIGCLVWNQDLMDAVQFSATGELLSIRLARSELDGNKRKKTIVASIVSLTLFMILGFTAFGVWRCRVEHIAHISKDAWKNDLKPQDVPGLDFFDMHTIQNATNNFSLSNKLGQGGFGSVYKGKLQDGKEIAVKRLSSSSGQGKEEFMNEIVLISKLQHRNLVRVLGCCIEEEEKLLIYEFMVNKSLDTFLFDSRKRLEIDWPKRFDIIQGIARGLLYLHHDSRLRVIHRDLKVSNILLDEKMNPKISDFGLARMYQGTEYQDNTRRVVGTLGYMSPEYAWTGMFSEKSDIYSFGVLMLEIISGEKISRFSYGVEGKTLIAYAWESWSEYRGIDLLDQDLADSCHPLEVGRCIQIGLLCVQHQPADRPNTLELLAMLTTTSDLPSPKQPTFAFHTRDDESLSNDLITVNGMTQSVILGR

SEQ ID NO: 90290 - DNA, 1942 bp, Arabidopsis thaliana
  misc_feature (1)..(1942): Ceres Seq. ID no. 12723381
  misc_feature (1)..(1942): Ortholog of  Ceres SEQ ID NO 14307682 as cited in SEQ ID NO 54529
ctgtgagttctaatggcggatcaagttaaagaaaagacattggaggaaacttctacatgggccgtcgcggtggtttgcttcgtcttgcttctgatttcgatcgttattgaaaaacttattcataaaattggatcctggtttaaaaagaagaacaaaaaagctctatatgaagcacttgaaaaagtgaaagcagagcttatgctgatgggattcatatcactacttctaacaattggacaaggatatatctcaaatatttgcatccctaagaacatcgcagcatcgatgcacccttgtagtgcatccgaagaagcaagaaagtatggtaagaaagatgtcccaaaggaagatgaagaagaaaacttgcgtcgaaagcttctacagttagttgattctcttattcctcgaaggagtttggctactaaaggttatgataagtgtgcagagaagggaaaagtcgcttttgtatcggcttatggcatgcatcagctgcatatattcatctttgttcttgcggtttgtcatgtgatctactgcattgttacttatgctttgggaaagaccaaaatgagaaggtggaagaagtgggaagaggagactaagactatcgaatatcagtattcacacgatcccgagaggtttaggtttgcgcgggatacatctttcgggcgtagacatctgagtttctggagcaaatcaactattacgctgtggattgtatgtttcttcaggcagttctttagatctgtaaccaaagttgattacttaacactgagacatggtttcatcatggcccatttggctcctgggagcgacgcaaggttcgatttccgaaagtatattcagagatcactagaggaagacttcaaaaccattgtcgagatcaaccctgtgatctggttcatagctgtgctattcctcctgacaaacacaaacggattgaattcttacctctggctaccgttcattcccttcatcgtgattcttattgttggaacaaaacttcaagtgataataacaaaactaggacttagaatccaagagaaaggcgacgtagtgaaaggcacaccgctagttcaacccggtgatcatttcttctggttcggtcgtccacgtttcattctcttcctcattcacttagtcctcttcacgaacgcgtttcaactagctttctttgtctggagtacgtatgaattcggtctaaagaactgtttccatgaaagcagagttgacgtgatcatcagaatctcaatcggacttttagttcagattctttgcagctacgttactcttcctctatatgctcttgttactcaaatgggttcaaagatgaaaccaacagtgttcaacgagagagtagcaacagcgttaaagagttggcatcacacagctaagaaaaatatcaaacatggaagaacttcagaatcaacaacacctttctctagtagaccaacaacaccaactcatggttcttctccgattcatctccttcgtaatgctcctcacaaacgaagcagaagcgttgacgaaagctttgcgaattcgttttctccgagaaactctgatttcgattcgtgggatcctgagtctcaacatgaaactgctgagacttcgaattcgaatcatcgttctaggtttggagaagaagaatcggagaaaaagtttgtttcttcatcagtggaacttcctcctggacctggacaaatacgaacacagcatgagattagtactataagcttaagggatttttcgtttaagcgatgatttaatgttttcttaattcattatttagtgatttgttaatatgctaaatgaaaccagttcttgtaaattttctatactatgtttgttaaaaccagcccttgaagctttaatttctcaatgtaaaagtctgatgattttggattttaagactatggagattcatgggtagttggtgaag

SEQ ID NO: 90291 - protein, 583 aa, Arabidopsis thaliana
  peptide (1)..(583): Ceres Seq. ID no. 12723382
MADQVKEKTLEETSTWAVAVVCFVLLLISIVIEKLIHKIGSWFKKKNKKALYEALEKVKAELMLMGFISLLLTIGQGYISNICIPKNIAASMHPCSASEEARKYGKKDVPKEDEEENLRRKLLQLVDSLIPRRSLATKGYDKCAEKGKVAFVSAYGMHQLHIFIFVLAVCHVIYCIVTYALGKTKMRRWKKWEEETKTIEYQYSHDPERFRFARDTSFGRRHLSFWSKSTITLWIVCFFRQFFRSVTKVDYLTLRHGFIMAHLAPGSDARFDFRKYIQRSLEEDFKTIVEINPVIWFIAVLFLLTNTNGLNSYLWLPFIPFIVILIVGTKLQVIITKLGLRIQEKGDVVKGTPLVQPGDHFFWFGRPRFILFLIHLVLFTNAFQLAFFVWSTYEFGLKNCFHESRVDVIIRISIGLLVQILCSYVTLPLYALVTQMGSKMKPTVFNERVATALKSWHHTAKKNIKHGRTSESTTPFSSRPTTPTHGSSPIHLLRNAPHKRSRSVDESFANSFSPRNSDFDSWDPESQHETAETSNSNHRSRFGEEESEKKFVSSSVELPPGPGQIRTQHEISTISLRDFSFKR

SEQ ID NO: 90292 - protein, 521 aa, Arabidopsis thaliana
  peptide (1)..(521): Ceres Seq. ID no. 12723383
MLMGFISLLLTIGQGYISNICIPKNIAASMHPCSASEEARKYGKKDVPKEDEEENLRRKLLQLVDSLIPRRSLATKGYDKCAEKGKVAFVSAYGMHQLHIFIFVLAVCHVIYCIVTYALGKTKMRRWKKWEEETKTIEYQYSHDPERFRFARDTSFGRRHLSFWSKSTITLWIVCFFRQFFRSVTKVDYLTLRHGFIMAHLAPGSDARFDFRKYIQRSLEEDFKTIVEINPVIWFIAVLFLLTNTNGLNSYLWLPFIPFIVILIVGTKLQVIITKLGLRIQEKGDVVKGTPLVQPGDHFFWFGRPRFILFLIHLVLFTNAFQLAFFVWSTYEFGLKNCFHESRVDVIIRISIGLLVQILCSYVTLPLYALVTQMGSKMKPTVFNERVATALKSWHHTAKKNIKHGRTSESTTPFSSRPTTPTHGSSPIHLLRNAPHKRSRSVDESFANSFSPRNSDFDSWDPESQHETAETSNSNHRSRFGEEESEKKFVSSSVELPPGPGQIRTQHEISTISLRDFSFKR

SEQ ID NO: 90293 - protein, 519 aa, Arabidopsis thaliana
  peptide (1)..(519): Ceres Seq. ID no. 12723384
MGFISLLLTIGQGYISNICIPKNIAASMHPCSASEEARKYGKKDVPKEDEEENLRRKLLQLVDSLIPRRSLATKGYDKCAEKGKVAFVSAYGMHQLHIFIFVLAVCHVIYCIVTYALGKTKMRRWKKWEEETKTIEYQYSHDPERFRFARDTSFGRRHLSFWSKSTITLWIVCFFRQFFRSVTKVDYLTLRHGFIMAHLAPGSDARFDFRKYIQRSLEEDFKTIVEINPVIWFIAVLFLLTNTNGLNSYLWLPFIPFIVILIVGTKLQVIITKLGLRIQEKGDVVKGTPLVQPGDHFFWFGRPRFILFLIHLVLFTNAFQLAFFVWSTYEFGLKNCFHESRVDVIIRISIGLLVQILCSYVTLPLYALVTQMGSKMKPTVFNERVATALKSWHHTAKKNIKHGRTSESTTPFSSRPTTPTHGSSPIHLLRNAPHKRSRSVDESFANSFSPRNSDFDSWDPESQHETAETSNSNHRSRFGEEESEKKFVSSSVELPPGPGQIRTQHEISTISLRDFSFKR

SEQ ID NO: 90294 - DNA, 1863 bp, Arabidopsis thaliana
  misc_feature (1)..(1863): Ceres Seq. ID no. 12723420
  misc_feature (1)..(1863): Ortholog of  Ceres SEQ ID NO 14303423 as cited in SEQ ID NO 54243
  misc_feature (1)..(1863): Ortholog of  Ceres SEQ ID NO 12611314 as cited in SEQ ID NO 56535
  misc_feature (1)..(1863): Ortholog of  Ceres SEQ ID NO 15178046 as cited in SEQ ID NO 60380
  misc_feature (1)..(1863): Ortholog of  Ceres SEQ ID NO 14312016 as cited in SEQ ID NO 60412
  misc_feature (1)..(1863): Ortholog of  Ceres SEQ ID NO 13661438 as cited in SEQ ID NO 61414
agcttagctttctggtttttcttcttctgcaccttaaatatacgcccagaaaattcctctggtcaccaaaccaaaccaaaaccgactctttctttgaatttctgaaaggaaacgataagggtttcgagaaaaatcattcctttttgacttaaaagacgcgtttccacatttttggcgtttcttctctgggtttgttttgtctctagacgaagacgatcacgggttttaacatattcgtgtgtacgcgtgtatctccaattttgcgaatagggtttgaagtaatcgttttgtttgtgaggataacgactcgcggggttacgcatagcaggttcctggcttctctactgtcaggaggggccttgagtctttggagttaccacagtagacagaaccccagtgggtgactttttgaaaagtcttcttgatttagtgctgcacattttcgctgtggagctacaatcagaatattagagaagatatgggaatcttttcacgcagttcaattagtaggaaatcaaaagatggaatgaagatcattgcaacggcattttttggagtaacatttggctttctgattggaatatcttttccatcattatcaatcactaaggtgagtctccctacaaactttcttccttcaaacgatctctcatatatcgaggaaaagggttcgaaaattgcaactccagaaagtcataaagcttggtcatcatcaaagggtaacgatagcagctcatctactccgattgacaaatcaaagatctgggtaccttctaatcctcgtggtgctgaaatgttgccaccgggtatggttgctgctgaatcagacttctatttgcgcagattatggggtttaccgcatgaggatttgaaaagtgaaccaagatacctcgcaacatttacagtgggtattaatcagaaagcaaatatcgatgcttgtgtcaagaagttttcagaaaacttcactattgtcctgtttcactatgacggccgggtaactgagtgggatgagtttgaatggtcaaagactgctatacacattagcgtacgaaagcagacaaaatggtggtatgcaaagaggtttttgcaccctgatattgtagcaagatatgattatatcttcgtctgggatgaagacctgggtgtcgagcattttaacgcagaagagtacgtaaagatggtgaagaagcacggcctggagatttcccaacctggcttggaaccaaaccagggactaacgtggcaaatgacaaagagacgaggagatatggaagttcacaagataacagaagaaagacctggatggtgctcagatcctcatctccctccatgtgctgcattcgtagagatcatggctcctgtattttcaagaaatgcctggcgatgcgtgtggcatgtgatccagaatgatttggtacacggttggggtcttgactttgcactcagaagatgtgttgagcctgcacatgagaagataggagtagttgattctcaatgggtcgttcatcaatcttttccttcccttggcaaccaaggtgaggcgacagacgggaaagcaccatggcaaggggtgagggatagatgcaaaaaggaatggacaatgttccagagtagaatggctaacgcagagaaggattatttcaaatccttacaagtagaaggctcctcaaattcaacagccacaaccatttaataggagagttcttaaagtagctagacgctgacagattcagttttactagtgcgttcttgcatttacatatagagtctgtatatgttaatgtagtagatattacccatcactacaaaatcatcaccaaccttccatcgaataaacaaaaaaagatgaatgttttgaaccgc

SEQ ID NO: 90295 - protein, 404 aa, Arabidopsis thaliana
  peptide (1)..(404): Ceres Seq. ID no. 12723421
MGIFSRSSISRKSKDGMKIIATAFFGVTFGFLIGISFPSLSITKVSLPTNFLPSNDLSYIEEKGSKIATPESHKAWSSSKGNDSSSSTPIDKSKIWVPSNPRGAEMLPPGMVAAESDFYLRRLWGLPHEDLKSEPRYLATFTVGINQKANIDACVKKFSENFTIVLFHYDGRVTEWDEFEWSKTAIHISVRKQTKWWYAKRFLHPDIVARYDYIFVWDEDLGVEHFNAEEYVKMVKKHGLEISQPGLEPNQGLTWQMTKRRGDMEVHKITEERPGWCSDPHLPPCAAFVEIMAPVFSRNAWRCVWHVIQNDLVHGWGLDFALRRCVEPAHEKIGVVDSQWVVHQSFPSLGNQGEATDGKAPWQGVRDRCKKEWTMFQSRMANAEKDYFKSLQVEGSSNSTATTI

SEQ ID NO: 90296 - protein, 388 aa, Arabidopsis thaliana
  peptide (1)..(388): Ceres Seq. ID no. 12723422
MKIIATAFFGVTFGFLIGISFPSLSITKVSLPTNFLPSNDLSYIEEKGSKIATPESHKAWSSSKGNDSSSSTPIDKSKIWVPSNPRGAEMLPPGMVAAESDFYLRRLWGLPHEDLKSEPRYLATFTVGINQKANIDACVKKFSENFTIVLFHYDGRVTEWDEFEWSKTAIHISVRKQTKWWYAKRFLHPDIVARYDYIFVWDEDLGVEHFNAEEYVKMVKKHGLEISQPGLEPNQGLTWQMTKRRGDMEVHKITEERPGWCSDPHLPPCAAFVEIMAPVFSRNAWRCVWHVIQNDLVHGWGLDFALRRCVEPAHEKIGVVDSQWVVHQSFPSLGNQGEATDGKAPWQGVRDRCKKEWTMFQSRMANAEKDYFKSLQVEGSSNSTATTI

SEQ ID NO: 90297 - protein, 299 aa, Arabidopsis thaliana
  peptide (1)..(299): Ceres Seq. ID no. 12723423
MLPPGMVAAESDFYLRRLWGLPHEDLKSEPRYLATFTVGINQKANIDACVKKFSENFTIVLFHYDGRVTEWDEFEWSKTAIHISVRKQTKWWYAKRFLHPDIVARYDYIFVWDEDLGVEHFNAEEYVKMVKKHGLEISQPGLEPNQGLTWQMTKRRGDMEVHKITEERPGWCSDPHLPPCAAFVEIMAPVFSRNAWRCVWHVIQNDLVHGWGLDFALRRCVEPAHEKIGVVDSQWVVHQSFPSLGNQGEATDGKAPWQGVRDRCKKEWTMFQSRMANAEKDYFKSLQVEGSSNSTATTI

SEQ ID NO: 90298 - DNA, 2202 bp, Arabidopsis thaliana
  misc_feature (1)..(2202): Ceres Seq. ID no. 12723428
  misc_feature (1)..(2202): Ortholog of  Ceres SEQ ID NO 14306279 as cited in SEQ ID NO 56860
atgaaagactttacagatacaatatcggagtcggagtgcgacgatgagataagtatagttccacaagtggaactaacggtgcccaaaaccgacgatccaacttcaccgacggttacgtttaggatgtgggttcttggcataaccgcttgtgttctcttgtcatttcttaaccagtttttctggtacagaaccaatcctttgaccatctcctctgtttcggctcagattgctgttgttcccattggtcatctcatggctaaagttcttcccacaaggagattcttcgaagggacgaggtggtctttcacgatgaatcctggtccctttagcaccaaggaacatgttcttataactgtgtttgcaaactcaggctctggggctgtttacgctactcatattcttagtgctgttaagctttattacaagagaaggcttgatttcttacccgctttgctcgttatgatcaccactcaggtattgggatttggttgggctggtttgtataggaaacatttagttgagccaggtgaaatgtggtggccaagcaatctcgttcaagtgtctctcttcagagcattgcatgagaaagagaacaaatcgaaatggggaattagtcgaaatcagttctttgtcatcactctcatcactagcttctcctattatctcctacctggttatctcttcacggtcttaaccaccgtctcttggttatgttggattagccctaaatcgattctagtaaaccagcttggttcagggtcagcaggtcttggtatcggttcctttggtctggactggtcaaccatcgcgtcataccttggaagtccactcgctagcccattctttgcctctgcaaatattgcggccgggttctttcttgtgatgtacgtaatcacacctctctgttactatcttgatttgtacaacgccaaaaccttcccaatctactccggtaaactctttgtagccagtgggaaagaatacaaagtaacgagcatcatcgatgccaatttccgcctggatcgtcaggcttacgcagagaccggaccagtccacatgagcactttctttgccgtgacctatggactaggtttcgcgaccttgtctgctagtattttccatgtcctgattttcaacggcaaagatctctggactcaaaccagaggagcgtttggaaaaaacaagaaaatggatatacatacaaagatcatgaagaggaattataaagaagttcctctctggtggttcctttcgattttcgcggtgaatcttgcagttattgtcttcatatgtatttactataagacacagattcagcttccatggtggggagctttcttggcttgtttgatagctatcttcttcactcctctcgttggtgtgatcatggccactactaaccaggctccgggtctgaacattatcacggagtacataattggatatgcatatccagagagaccagttgctaacatatgcttcaagacttacggatacatcagcatgtctcaatctttgactttcctctctgatttaaagcttggaacttacatgaagatcccaccaagaaccatgttcatggcacaggttgtgggcactttagttgcagttatcgcttacgcaggcacggcttggtggctaatggctgaaatcccaaatctctgcgacactaatctgcttccaccgggaagtcaatggacttgtccatcggatcgagtcttcttcgacgcatcagtgatttggggactagtaggaccaagaagaatgtttggtgatcttggagaatactcgaacataaactggttcttcgtaggaggtgcaatagctccagcattggtatacttagcctcaagactcttcccaaacaagaaatggatctcagacattcacatccctgttctgattggagccacagctataatgccaccagcttctgcggtgaacttcacgagctggctcgttatggcgtttgtgtttggacatttcgtgtttaagtacagaagagaatggtggcagcgatataactatgttctgtctggaggaatggatgcaggaactggattcatgtcagtgcttttgtttcttgcgttgcaacgtagtgagattgcgattgattggtggggaaattctggagaaggttgtcctgttgctaaatgtccaactgctaaaggtgttgttgttcatggttgtcctgttttctaa

SEQ ID NO: 90299 - protein, 733 aa, Arabidopsis thaliana
  peptide (1)..(733): Ceres Seq. ID no. 12723429
MKDFTDTISESECDDEISIVPQVELTVPKTDDPTSPTVTFRMWVLGITACVLLSFLNQFFWYRTNPLTISSVSAQIAVVPIGHLMAKVLPTRRFFEGTRWSFTMNPGPFSTKEHVLITVFANSGSGAVYATHILSAVKLYYKRRLDFLPALLVMITTQVLGFGWAGLYRKHLVEPGEMWWPSNLVQVSLFRALHEKENKSKWGISRNQFFVITLITSFSYYLLPGYLFTVLTTVSWLCWISPKSILVNQLGSGSAGLGIGSFGLDWSTIASYLGSPLASPFFASANIAAGFFLVMYVITPLCYYLDLYNAKTFPIYSGKLFVASGKEYKVTSIIDANFRLDRQAYAETGPVHMSTFFAVTYGLGFATLSASIFHVLIFNGKDLWTQTRGAFGKNKKMDIHTKIMKRNYKEVPLWWFLSIFAVNLAVIVFICIYYKTQIQLPWWGAFLACLIAIFFTPLVGVIMATTNQAPGLNIITEYIIGYAYPERPVANICFKTYGYISMSQSLTFLSDLKLGTYMKIPPRTMFMAQVVGTLVAVIAYAGTAWWLMAEIPNLCDTNLLPPGSQWTCPSDRVFFDASVIWGLVGPRRMFGDLGEYSNINWFFVGGAIAPALVYLASRLFPNKKWISDIHIPVLIGATAIMPPASAVNFTSWLVMAFVFGHFVFKYRREWWQRYNYVLSGGMDAGTGFMSVLLFLALQRSEIAIDWWGNSGEGCPVAKCPTAKGVVVHGCPVF

SEQ ID NO: 90300 - protein, 692 aa, Arabidopsis thaliana
  peptide (1)..(692): Ceres Seq. ID no. 12723430
MWVLGITACVLLSFLNQFFWYRTNPLTISSVSAQIAVVPIGHLMAKVLPTRRFFEGTRWSFTMNPGPFSTKEHVLITVFANSGSGAVYATHILSAVKLYYKRRLDFLPALLVMITTQVLGFGWAGLYRKHLVEPGEMWWPSNLVQVSLFRALHEKENKSKWGISRNQFFVITLITSFSYYLLPGYLFTVLTTVSWLCWISPKSILVNQLGSGSAGLGIGSFGLDWSTIASYLGSPLASPFFASANIAAGFFLVMYVITPLCYYLDLYNAKTFPIYSGKLFVASGKEYKVTSIIDANFRLDRQAYAETGPVHMSTFFAVTYGLGFATLSASIFHVLIFNGKDLWTQTRGAFGKNKKMDIHTKIMKRNYKEVPLWWFLSIFAVNLAVIVFICIYYKTQIQLPWWGAFLACLIAIFFTPLVGVIMATTNQAPGLNIITEYIIGYAYPERPVANICFKTYGYISMSQSLTFLSDLKLGTYMKIPPRTMFMAQVVGTLVAVIAYAGTAWWLMAEIPNLCDTNLLPPGSQWTCPSDRVFFDASVIWGLVGPRRMFGDLGEYSNINWFFVGGAIAPALVYLASRLFPNKKWISDIHIPVLIGATAIMPPASAVNFTSWLVMAFVFGHFVFKYRREWWQRYNYVLSGGMDAGTGFMSVLLFLALQRSEIAIDWWGNSGEGCPVAKCPTAKGVVVHGCPVF

SEQ ID NO: 90301 - protein, 649 aa, Arabidopsis thaliana
  peptide (1)..(649): Ceres Seq. ID no. 12723431
MAKVLPTRRFFEGTRWSFTMNPGPFSTKEHVLITVFANSGSGAVYATHILSAVKLYYKRRLDFLPALLVMITTQVLGFGWAGLYRKHLVEPGEMWWPSNLVQVSLFRALHEKENKSKWGISRNQFFVITLITSFSYYLLPGYLFTVLTTVSWLCWISPKSILVNQLGSGSAGLGIGSFGLDWSTIASYLGSPLASPFFASANIAAGFFLVMYVITPLCYYLDLYNAKTFPIYSGKLFVASGKEYKVTSIIDANFRLDRQAYAETGPVHMSTFFAVTYGLGFATLSASIFHVLIFNGKDLWTQTRGAFGKNKKMDIHTKIMKRNYKEVPLWWFLSIFAVNLAVIVFICIYYKTQIQLPWWGAFLACLIAIFFTPLVGVIMATTNQAPGLNIITEYIIGYAYPERPVANICFKTYGYISMSQSLTFLSDLKLGTYMKIPPRTMFMAQVVGTLVAVIAYAGTAWWLMAEIPNLCDTNLLPPGSQWTCPSDRVFFDASVIWGLVGPRRMFGDLGEYSNINWFFVGGAIAPALVYLASRLFPNKKWISDIHIPVLIGATAIMPPASAVNFTSWLVMAFVFGHFVFKYRREWWQRYNYVLSGGMDAGTGFMSVLLFLALQRSEIAIDWWGNSGEGCPVAKCPTAKGVVVHGCPVF

SEQ ID NO: 90302 - DNA, 642 bp, Arabidopsis thaliana
  misc_feature (1)..(642): Ceres Seq. ID no. 12723445
  misc_feature (1)..(642): Ortholog of  Ceres SEQ ID NO 14303374 as cited in SEQ ID NO 54088
atgtctcaaatctccataacttctccaaaacattgcgccaagaaaggagggattaacatcaacaatcgccacaagaaactatttttcacattctcaactttcttctctggccttctcctcatcatcttcctcgtttggctcatcctccaccccgagagacccgagttctccctcacagaagccgatatatacagcctcaacctcaccacctcctccactcatctcctcaactcttcagtccaactaactctcttctccaaaaaccctaacaaaaaagtcgggatctactacgacaagctactcgtatatgcagcgtataggggacaacaaatcacatcagaggcctctctaccgcctttttatcaatcccatgaagaaatcaatctcttgacagcgtttcttcaagggactgagctacccgttgcccagtcctttggttatcaaatcagtcgtgaacggtcaactggtaaaataatcatcggtatgaagatggacgggaaactacggtggaagatcgggacatgggtctcgggtgcataccggtttaatgtgaattgtcttgcaattgtggcttttggaatgaacatgaccactcctcccttagcttcattacaagggactcgttgctctacaactatatga

SEQ ID NO: 90303 - protein, 213 aa, Arabidopsis thaliana
  peptide (1)..(213): Ceres Seq. ID no. 12723446
MSQISITSPKHCAKKGGININNRHKKLFFTFSTFFSGLLLIIFLVWLILHPERPEFSLTEADIYSLNLTTSSTHLLNSSVQLTLFSKNPNKKVGIYYDKLLVYAAYRGQQITSEASLPPFYQSHEEINLLTAFLQGTELPVAQSFGYQISRERSTGKIIIGMKMDGKLRWKIGTWVSGAYRFNVNCLAIVAFGMNMTTPPLASLQGTRCSTTI

SEQ ID NO: 90304 - DNA, 1113 bp, Arabidopsis thaliana
  misc_feature (1)..(1113): Ceres Seq. ID no. 12723453
  misc_feature (1)..(1113): Ortholog of  Ceres SEQ ID NO 13594852 as cited in SEQ ID NO 51956
atgtcggcgatcatgaaaagtctctgtttctccttccttatcctcgcttcatttgcaactttcttctccgttgctgatgcatggaggtttaacgtcggaggtaacggcgcttgggttacaaatcctcaagaaaactacaatacttgggctgaaagaaaccgtttccaagtcaatgactctctctattttaagtacgcgaagggatcagactctgttcaacaagtgatgaaagcagattttgatggatgcaacgttagaaatccgatcaagaacttcgaaaatggtgaatctgtggttactcttgatcgatctggtgctttttatttcataagcggtaatcaagatcactgtcaaaagggacagaaattgatcgtcgttgtcctcgccgtcagaaatcaaccttcggctccggctcattcccctgttccttcagtttctcctactcaacctcctaaatctcattcccctgtttctcccgttgctccagcgtctgctccttcaaaatctcagccacctagatcctctgtttctccagcacaaccacctaaatcttcttcccctatttctcacacaccagctctctcaccgtcgcatgctacatctcactctccagctactccatctccgtcaccaaaatctccctcccctgtttctcactcaccatctcactctccggcacataccccatctcactctccggcacataccccatctcactctccggcacatgccccatctcactccccggcgcatgctccatctcactctccggcgcatgctccatctcactccccggcgcattctccatctcactcaccggcgactccaaaatccccatctccttcttcttctccagctcagtctccggccactccatctccgatgacaccacaatccccatcccctgtttcttccccatcacctgatcagtctgctgctccctctgaccagtctacacccttggcaccttctccttccgaaacaactccgaccgccgataacatcactgcgccggctcctagtcccaggacaaactcagcaagtggtttagccgttacttcggttatgtctacactatttagtgcgacttttacctttctgatgtttgcttaa

SEQ ID NO: 90305 - protein, 370 aa, Arabidopsis thaliana
  peptide (1)..(370): Ceres Seq. ID no. 12723454
MSAIMKSLCFSFLILASFATFFSVADAWRFNVGGNGAWVTNPQENYNTWAERNRFQVNDSLYFKYAKGSDSVQQVMKADFDGCNVRNPIKNFENGESVVTLDRSGAFYFISGNQDHCQKGQKLIVVVLAVRNQPSAPAHSPVPSVSPTQPPKSHSPVSPVAPASAPSKSQPPRSSVSPAQPPKSSSPISHTPALSPSHATSHSPATPSPSPKSPSPVSHSPSHSPAHTPSHSPAHTPSHSPAHAPSHSPAHAPSHSPAHAPSHSPAHSPSHSPATPKSPSPSSSPAQSPATPSPMTPQSPSPVSSPSPDQSAAPSDQSTPLAPSPSETTPTADNITAPAPSPRTNSASGLAVTSVMSTLFSATFTFLMFA

SEQ ID NO: 90306 - protein, 366 aa, Arabidopsis thaliana
  peptide (1)..(366): Ceres Seq. ID no. 12723455
MKSLCFSFLILASFATFFSVADAWRFNVGGNGAWVTNPQENYNTWAERNRFQVNDSLYFKYAKGSDSVQQVMKADFDGCNVRNPIKNFENGESVVTLDRSGAFYFISGNQDHCQKGQKLIVVVLAVRNQPSAPAHSPVPSVSPTQPPKSHSPVSPVAPASAPSKSQPPRSSVSPAQPPKSSSPISHTPALSPSHATSHSPATPSPSPKSPSPVSHSPSHSPAHTPSHSPAHTPSHSPAHAPSHSPAHAPSHSPAHAPSHSPAHSPSHSPATPKSPSPSSSPAQSPATPSPMTPQSPSPVSSPSPDQSAAPSDQSTPLAPSPSETTPTADNITAPAPSPRTNSASGLAVTSVMSTLFSATFTFLMFA

SEQ ID NO: 90307 - protein, 295 aa, Arabidopsis thaliana
  peptide (1)..(295): Ceres Seq. ID no. 12723456
MKADFDGCNVRNPIKNFENGESVVTLDRSGAFYFISGNQDHCQKGQKLIVVVLAVRNQPSAPAHSPVPSVSPTQPPKSHSPVSPVAPASAPSKSQPPRSSVSPAQPPKSSSPISHTPALSPSHATSHSPATPSPSPKSPSPVSHSPSHSPAHTPSHSPAHTPSHSPAHAPSHSPAHAPSHSPAHAPSHSPAHSPSHSPATPKSPSPSSSPAQSPATPSPMTPQSPSPVSSPSPDQSAAPSDQSTPLAPSPSETTPTADNITAPAPSPRTNSASGLAVTSVMSTLFSATFTFLMFA

SEQ ID NO: 90308 - DNA, 1558 bp, Arabidopsis thaliana
  misc_feature (1)..(1558): Ceres Seq. ID no. 12723483
  misc_feature (1)..(1558): Ortholog of  Ceres SEQ ID NO 14306538 as cited in SEQ ID NO 53117
acatcaaaatcaaaaccttctcttcttcttcttcttgcgagttgcaccgaaacactcaacaaaaccaaatcatccaaattgggtaaaacaaaagaaactaacaagaagaagatcgaattcaagaagaagagatggagaatggagcaacgacgacgagcacaattaccatcaaagggattctgagtttgctaatggaaagcatcacaacagaggaagatgaaggaggaaagagagtaatatctctgggaatgggagacccaacactctactcgtgttttcgtacaacacaagtctctcttcaagctgtttctgattctcttctctccaacaagttccatggttactctcctaccgtcggtcttccccaagctcgaagggcaatagcagagtatctatcgcgtgatcttccatacaaactttcacaggatgatgtgtttatcacatcgggttgcacgcaagcgatcgatgtagcattgtcgatgttagctcgtcccagggctaatatacttcttccaaggcctggtttcccaatctatgaactctgtgctaagtttagacaccttgaagttcgctacgtcgatcttcttccggaaaatggatgggagatcgatcttgatgctgtcgaggctcttgcagacgaaaacacggttgctttggttgttataaaccctggtaatccttgcgggaatgtctatagctaccagcatttgatgaagattgcggaatcggcgaaaaaactagggtttcttgtgattgctgatgaggtttacggtcatcttgcttttggtagcaaaccgtttgtgccaatgggtgtgtttggatctattgttcctgtgcttactcttggctctttatcaaagagatggatagttccaggttggcgactcgggtggtttgtcaccactgatccttctggttcctttaaggaccctaagatcattgagaggtttaagaaatactttgatattcttggtggaccagctacatttattcaggctgcagttcccactattttggaacagacggatgagtctttcttcaagaaaaccttgaactcgttgaagaactcttcggatatttgttgtgactggatcaaggagattccttgcattgattcctcgcatcgaccagaaggatccatggcaatgatggttaagctgaatctctcattacttgaagatgtaagtgacgatatcgacttctgtttcaagttagctagggaagaatcagtcatccttcttcctgggaccgcggtggggctgaagaactggctgaggataacgtttgcagcagatgcaacttcgattgaagaagcttttaaaaggatcaaatgtttctatcttagacatgccaagactcaatatccaaccatatagttgatttctgattttggtatggtcataaattgttcttaaattacatgtttaaaaacacagatacagtacagtgtctttttgttctccctatataagtgttgatataaaatttctttattgtaataagattaactcttaattaaaaacatcaactaaacgaataaacagaaaaatgttaactt

SEQ ID NO: 90309 - protein, 414 aa, Arabidopsis thaliana
  peptide (1)..(414): Ceres Seq. ID no. 12723484
MENGATTTSTITIKGILSLLMESITTEEDEGGKRVISLGMGDPTLYSCFRTTQVSLQAVSDSLLSNKFHGYSPTVGLPQARRAIAEYLSRDLPYKLSQDDVFITSGCTQAIDVALSMLARPRANILLPRPGFPIYELCAKFRHLEVRYVDLLPENGWEIDLDAVEALADENTVALVVINPGNPCGNVYSYQHLMKIAESAKKLGFLVIADEVYGHLAFGSKPFVPMGVFGSIVPVLTLGSLSKRWIVPGWRLGWFVTTDPSGSFKDPKIIERFKKYFDILGGPATFIQAAVPTILEQTDESFFKKTLNSLKNSSDICCDWIKEIPCIDSSHRPEGSMAMMVKLNLSLLEDVSDDIDFCFKLAREESVILLPGTAVGLKNWLRITFAADATSIEEAFKRIKCFYLRHAKTQYPTI

SEQ ID NO: 90310 - protein, 394 aa, Arabidopsis thaliana
  peptide (1)..(394): Ceres Seq. ID no. 12723485
MESITTEEDEGGKRVISLGMGDPTLYSCFRTTQVSLQAVSDSLLSNKFHGYSPTVGLPQARRAIAEYLSRDLPYKLSQDDVFITSGCTQAIDVALSMLARPRANILLPRPGFPIYELCAKFRHLEVRYVDLLPENGWEIDLDAVEALADENTVALVVINPGNPCGNVYSYQHLMKIAESAKKLGFLVIADEVYGHLAFGSKPFVPMGVFGSIVPVLTLGSLSKRWIVPGWRLGWFVTTDPSGSFKDPKIIERFKKYFDILGGPATFIQAAVPTILEQTDESFFKKTLNSLKNSSDICCDWIKEIPCIDSSHRPEGSMAMMVKLNLSLLEDVSDDIDFCFKLAREESVILLPGTAVGLKNWLRITFAADATSIEEAFKRIKCFYLRHAKTQYPTI

SEQ ID NO: 90311 - protein, 375 aa, Arabidopsis thaliana
  peptide (1)..(375): Ceres Seq. ID no. 12723486
MGDPTLYSCFRTTQVSLQAVSDSLLSNKFHGYSPTVGLPQARRAIAEYLSRDLPYKLSQDDVFITSGCTQAIDVALSMLARPRANILLPRPGFPIYELCAKFRHLEVRYVDLLPENGWEIDLDAVEALADENTVALVVINPGNPCGNVYSYQHLMKIAESAKKLGFLVIADEVYGHLAFGSKPFVPMGVFGSIVPVLTLGSLSKRWIVPGWRLGWFVTTDPSGSFKDPKIIERFKKYFDILGGPATFIQAAVPTILEQTDESFFKKTLNSLKNSSDICCDWIKEIPCIDSSHRPEGSMAMMVKLNLSLLEDVSDDIDFCFKLAREESVILLPGTAVGLKNWLRITFAADATSIEEAFKRIKCFYLRHAKTQYPTI

SEQ ID NO: 90312 - DNA, 1050 bp, Arabidopsis thaliana
  misc_feature (1)..(1050): Ceres Seq. ID no. 12723494
  misc_feature (1)..(1050): Ortholog of  Ceres SEQ ID NO 13582350 as cited in SEQ ID NO 56734
  misc_feature (1)..(1050): Ortholog of  Ceres SEQ ID NO 12582113 as cited in SEQ ID NO 58349
  misc_feature (1)..(1050): Ortholog of  Ceres SEQ ID NO 12615466 as cited in SEQ ID NO 62761
  misc_feature (1)..(1050): Ortholog of  Ceres SEQ ID NO 14314080 as cited in SEQ ID NO 63105
  misc_feature (1)..(1050): Ortholog of  Ceres SEQ ID NO 13597295 as cited in SEQ ID NO 63743
  misc_feature (1)..(1050): Ortholog of  Ceres SEQ ID NO 12617090 as cited in SEQ ID NO 64005
  misc_feature (1)..(1050): Ortholog of  Ceres SEQ ID NO 13597439 as cited in SEQ ID NO 64081
  misc_feature (1)..(1050): Ortholog of  Ceres SEQ ID NO 13597233 as cited in SEQ ID NO 64370
  misc_feature (1)..(1050): Ortholog of  Ceres SEQ ID NO 13598327 as cited in SEQ ID NO 68040
  misc_feature (1)..(1050): Ortholog of  Ceres SEQ ID NO 13599438 as cited in SEQ ID NO 0
atggagaaaccaaagttgaagacagtccaagaggtggtcgcagctggcgaaaaactaccggaaagatacctctacacacccaccggcgacggcgaaggtgatcaacctttcaatggtttgttgccagagatgaaaatttcgatcatcgatcttaatctccttttctcttcttctgacgacggtcgagaagagttgagtaaacttcactcggcgatctctacatggggcgttgttcaggtgatgaatcatggaatttcagaagccttgctcgacaagattcacgagctaacgaagcagttctttgtacttccgaccaaagagaaacagaagtacgcaagagagataagtagttttcaaggatttggaaacgacatgattctgtctgatgatcaagttctcgattgggtcgaccgcttgtacctcattacgtaccctgaagatcaacgacagcttaaattctggcctgaaaatccaagcggatttagggaaactttacatgaatacacaatgaagcaacagttagtggttgagaaattcttcaaggcattagctagatcgttggagttggaagataattgctttctagagatgcatggtgaaaatgctacgttggagacaagattcaacatctaccctccatgtccgaggccggacaaggttcttgggctaaaaccgcattctgatggctcagcctttactcttatcctacccgacaaaaatgtagaaggacttcagttcctcaaagatgggaagtggtataaagcttcaattctccctcatacaattctgatcaatgtaggagatactatggaggtaatgagcaatggaatatacaagagtccggttcatagagtggtgcttaacggaaaaaaggaaaggatatatgtggcaacattttgtaatgctgatgaagacaaagagattcaacctttaaatgggcttgtgtctgaggctagaccaaggttgtacaaagcagttaagaagtctgagaaaaacttcttcgattactatcaacaaggtcgaagaccgatcgaagctgcaatgatctga

SEQ ID NO: 90313 - protein, 349 aa, Arabidopsis thaliana
  peptide (1)..(349): Ceres Seq. ID no. 12723495
MEKPKLKTVQEVVAAGEKLPERYLYTPTGDGEGDQPFNGLLPEMKISIIDLNLLFSSSDDGREELSKLHSAISTWGVVQVMNHGISEALLDKIHELTKQFFVLPTKEKQKYAREISSFQGFGNDMILSDDQVLDWVDRLYLITYPEDQRQLKFWPENPSGFRETLHEYTMKQQLVVEKFFKALARSLELEDNCFLEMHGENATLETRFNIYPPCPRPDKVLGLKPHSDGSAFTLILPDKNVEGLQFLKDGKWYKASILPHTILINVGDTMEVMSNGIYKSPVHRVVLNGKKERIYVATFCNADEDKEIQPLNGLVSEARPRLYKAVKKSEKNFFDYYQQGRRPIEAAMI

SEQ ID NO: 90314 - protein, 306 aa, Arabidopsis thaliana
  peptide (1)..(306): Ceres Seq. ID no. 12723496
MKISIIDLNLLFSSSDDGREELSKLHSAISTWGVVQVMNHGISEALLDKIHELTKQFFVLPTKEKQKYAREISSFQGFGNDMILSDDQVLDWVDRLYLITYPEDQRQLKFWPENPSGFRETLHEYTMKQQLVVEKFFKALARSLELEDNCFLEMHGENATLETRFNIYPPCPRPDKVLGLKPHSDGSAFTLILPDKNVEGLQFLKDGKWYKASILPHTILINVGDTMEVMSNGIYKSPVHRVVLNGKKERIYVATFCNADEDKEIQPLNGLVSEARPRLYKAVKKSEKNFFDYYQQGRRPIEAAMI

SEQ ID NO: 90315 - protein, 269 aa, Arabidopsis thaliana
  peptide (1)..(269): Ceres Seq. ID no. 12723497
MNHGISEALLDKIHELTKQFFVLPTKEKQKYAREISSFQGFGNDMILSDDQVLDWVDRLYLITYPEDQRQLKFWPENPSGFRETLHEYTMKQQLVVEKFFKALARSLELEDNCFLEMHGENATLETRFNIYPPCPRPDKVLGLKPHSDGSAFTLILPDKNVEGLQFLKDGKWYKASILPHTILINVGDTMEVMSNGIYKSPVHRVVLNGKKERIYVATFCNADEDKEIQPLNGLVSEARPRLYKAVKKSEKNFFDYYQQGRRPIEAAMI

SEQ ID NO: 90316 - DNA, 1362 bp, Arabidopsis thaliana
  misc_feature (1)..(1362): Ceres Seq. ID no. 12723498
  misc_feature (1)..(1362): Ortholog of  Ceres SEQ ID NO 13582281 as cited in SEQ ID NO 51014
  misc_feature (1)..(1362): Ortholog of  Ceres SEQ ID NO 15176795 as cited in SEQ ID NO 54453
  misc_feature (1)..(1362): Ortholog of  Ceres SEQ ID NO 14310508 as cited in SEQ ID NO 58965
  misc_feature (1)..(1362): Ortholog of  Ceres SEQ ID NO 12617417 as cited in SEQ ID NO 65089
atggggtcaaagtttcatgcttttatgttcccatggtttggttttggtcacatgactgcatttttgcatctggctaacaaactagcggagaaagaccacaaaataactttcttgctccccaagaaagctcgaaagcaacttgaatctctcaatctcttcccagactgcattgtctttcagactcttaccatcccatctgtagatggcctccctgatggtgctgagacaacctcggatatcccgatctcgttaggcagttttctcgcctcggctatggatcggacacgcattcaggtcaaagaagcagtttctgttggtaaaccggatctgattttcttcgattttgctcactggattccggaaatagctagagagtatggagtcaagagtgtcaatttcataacgatttctgcagcatgtgtagctatttcgttcgtccctggtcgtagtcaagatgacttgggtagtactccaccgggatacccttcctccaaggtgttgcttcggggacacgaaaccaacagtttgtcgttcctctcctatccgtttggagatggaactagtttttacgaacggatcatgataggacttaagaactgcgatgtcatttcgataaggacatgccaagaaatggaaggaaagttctgcgatttcatcgaaaaccaatttcaaagaaaagttctcttgacaggtccaatgcttcctgagccggacaatagcaaaccgctagaagatcaatggcgtcagtggcttagcaagttcgatccgggatcagtaatatattgtgcattgggcagccaaatcattcttgaaaaggatcaattccaagaactctgtttaggaatggagctgacaggtttaccatttcttgtagcggtaaagccaccaaaaggttcatcgacaatccaagaagccttaccaaaagggtttgaagagagggttaaagcacgtggagtggtttggggaggatgggtgcagcaaccattgatattagctcatccatcaataggctgctttgtgagccattgtggtttcgggtcaatgtgggaggctctagtgaatgactgccaaatagtgtttattccacatttgggtgagcaaatattgaacacaagactgatgagcgaggaactcaaggtctcggtagaggtgaaaagagaggaaacgggatggttttcgaaggagagcttgagcggtgcggtcaggtctgtgatggacagagatagcgagctcgggaattgggcgaggaggaaccacgtaaagtggaaggagtctctgcttcgtcatggactaatgagtggttatcttaataagttcgtagaagcattggagaaactagtccaaaatataaatcttgaatga

SEQ ID NO: 90317 - protein, 453 aa, Arabidopsis thaliana
  peptide (1)..(453): Ceres Seq. ID no. 12723499
MGSKFHAFMFPWFGFGHMTAFLHLANKLAEKDHKITFLLPKKARKQLESLNLFPDCIVFQTLTIPSVDGLPDGAETTSDIPISLGSFLASAMDRTRIQVKEAVSVGKPDLIFFDFAHWIPEIAREYGVKSVNFITISAACVAISFVPGRSQDDLGSTPPGYPSSKVLLRGHETNSLSFLSYPFGDGTSFYERIMIGLKNCDVISIRTCQEMEGKFCDFIENQFQRKVLLTGPMLPEPDNSKPLEDQWRQWLSKFDPGSVIYCALGSQIILEKDQFQELCLGMELTGLPFLVAVKPPKGSSTIQEALPKGFEERVKARGVVWGGWVQQPLILAHPSIGCFVSHCGFGSMWEALVNDCQIVFIPHLGEQILNTRLMSEELKVSVEVKREETGWFSKESLSGAVRSVMDRDSELGNWARRNHVKWKESLLRHGLMSGYLNKFVEALEKLVQNINLE

SEQ ID NO: 90318 - protein, 445 aa, Arabidopsis thaliana
  peptide (1)..(445): Ceres Seq. ID no. 12723500
MFPWFGFGHMTAFLHLANKLAEKDHKITFLLPKKARKQLESLNLFPDCIVFQTLTIPSVDGLPDGAETTSDIPISLGSFLASAMDRTRIQVKEAVSVGKPDLIFFDFAHWIPEIAREYGVKSVNFITISAACVAISFVPGRSQDDLGSTPPGYPSSKVLLRGHETNSLSFLSYPFGDGTSFYERIMIGLKNCDVISIRTCQEMEGKFCDFIENQFQRKVLLTGPMLPEPDNSKPLEDQWRQWLSKFDPGSVIYCALGSQIILEKDQFQELCLGMELTGLPFLVAVKPPKGSSTIQEALPKGFEERVKARGVVWGGWVQQPLILAHPSIGCFVSHCGFGSMWEALVNDCQIVFIPHLGEQILNTRLMSEELKVSVEVKREETGWFSKESLSGAVRSVMDRDSELGNWARRNHVKWKESLLRHGLMSGYLNKFVEALEKLVQNINLE

SEQ ID NO: 90319 - protein, 436 aa, Arabidopsis thaliana
  peptide (1)..(436): Ceres Seq. ID no. 12723501
MTAFLHLANKLAEKDHKITFLLPKKARKQLESLNLFPDCIVFQTLTIPSVDGLPDGAETTSDIPISLGSFLASAMDRTRIQVKEAVSVGKPDLIFFDFAHWIPEIAREYGVKSVNFITISAACVAISFVPGRSQDDLGSTPPGYPSSKVLLRGHETNSLSFLSYPFGDGTSFYERIMIGLKNCDVISIRTCQEMEGKFCDFIENQFQRKVLLTGPMLPEPDNSKPLEDQWRQWLSKFDPGSVIYCALGSQIILEKDQFQELCLGMELTGLPFLVAVKPPKGSSTIQEALPKGFEERVKARGVVWGGWVQQPLILAHPSIGCFVSHCGFGSMWEALVNDCQIVFIPHLGEQILNTRLMSEELKVSVEVKREETGWFSKESLSGAVRSVMDRDSELGNWARRNHVKWKESLLRHGLMSGYLNKFVEALEKLVQNINLE

SEQ ID NO: 90320 - DNA, 1254 bp, Arabidopsis thaliana
  misc_feature (1)..(1254): Ceres Seq. ID no. 12723511
  misc_feature (1)..(1254): Ortholog of  Ceres SEQ ID NO 13596921 as cited in SEQ ID NO 62368
  misc_feature (1)..(1254): Ortholog of  Ceres SEQ ID NO 13600673 as cited in SEQ ID NO 0
aatacaagaaatagaaacggtgtaggaagctactatgacggcaattccaaacgtcgtcgatattgaatcttcttcctcttcgctttgtcaagagacggcaacggagaccgtcaccgttgaaagaggctcgtctgattcatcttcaaagccagacgacgtcgttttactaatcaaggaagaggaggatgacgccgttaacttgtcacttggtttttggaaattgcacgagataggtttaataacaccgttcttgagaaagacgtttgagatcgtcgatgacaaagtaacagacccggttgtatcatggagcccgacccgtaaaagctttatcatttgggattcttacgagttctcagagaatctacttcccaaatacttcaagcacaagaacttctccagttttattcgtcagcttaactcttacggttttaaaaaggtcgattcagataggtgggaatttgctaacgaagggtttcaaggagggaagaaacatttgcttaagaacatcaagaggagaagcaaaaacactaaatgttgtaacaaggaagcgagtaccaccacgacagagactgaggttgagtcattgaaggaggaacagagtccaatgagattggagatgttgaagctgaaacaacaacaagaagaatctcaacatcagatggtcactgtgcaggagaagatccacggagttgataccgaacaacagcatatgcttagtttctttgcaaagttggctaaagatcaaagatttgtagagagactggtgaagaagagaaagatgaaaatacagagagagctagaagcagctgaattcgtgaagaagctcaagttgcttcaggatcaagaaactcaaaagaacttgttagatgtagaaagagaatttatggccatggctgcaacagaacacaatcccgagcctgacattttggtgaacaatcaaagcgggaatacgagatgtcagcttaactcagaggacctacttgttgacggtggctcaatggatgtaaatgggaggatagagatagagtagagcaaaaccggtaacatagcaatagagaaggtaccaaatcccaaggcttgagatccgaatccgtagcgctttgttgtatggtttcatgtgtatataagcgaaagggacttgtaaaaagcgactcaaggacttgtaaaaaagtgtagctctagtgaaaagggacttgtaaaaaagtgtagctctggttaactgttgccatcgccttccattactaataatttttt

SEQ ID NO: 90321 - protein, 331 aa, Arabidopsis thaliana
  peptide (1)..(331): Ceres Seq. ID no. 12723512
MTAIPNVVDIESSSSSLCQETATETVTVERGSSDSSSKPDDVVLLIKEEEDDAVNLSLGFWKLHEIGLITPFLRKTFEIVDDKVTDPVVSWSPTRKSFIIWDSYEFSENLLPKYFKHKNFSSFIRQLNSYGFKKVDSDRWEFANEGFQGGKKHLLKNIKRRSKNTKCCNKEASTTTTETEVESLKEEQSPMRLEMLKLKQQQEESQHQMVTVQEKIHGVDTEQQHMLSFFAKLAKDQRFVERLVKKRKMKIQRELEAAEFVKKLKLLQDQETQKNLLDVEREFMAMAATEHNPEPDILVNNQSGNTRCQLNSEDLLVDGGSMDVNGRIEIE

SEQ ID NO: 90322 - DNA, 1572 bp, Arabidopsis thaliana
  misc_feature (1)..(1572): Ceres Seq. ID no. 12723521
  misc_feature (1)..(1572): Ortholog of  Ceres SEQ ID NO 15171856 as cited in SEQ ID NO 55120
atggcgagttataatcttcgttcacaagttcgtcttatagcaataacaatagtaatcatcattactctctcaactccgatcacaaccaacacatcaccacaaccatggaatatcctttcacacaacgaattcgccggaaaactcacctcctcctcctcctccgtcgaatcagccgccacagatttcggccacgtcaccaaaatcttcccttccgccgtcttaatcccttcctccgttgaagacatcacagatctcataaaactctcttttgactctcaactgtcttttcctttagccgctcgtggtcacggacacagccaccgtggccaagcctcggctaaagacggagttgtggtcaacatgcggtccatggtaaaccgggatcgaggtatcaaggtgtctaggacctgtttatatgttgacgtggacgctgcgtggctatggattgaggtgttgaataaaactttggagttagggttaacgccggtttcttggacggattatttgtatttaacagtcggtgggacgttatcaaacggcggaattagtggacaaacgtttcggtacggtccacagatcactaatgttctagagatggatgttattactggaaaaggagagattgcaacttgttccaaggacatgaactcggatcttttcttcgcggtgttaggaggtttgggtcaattcggcattataacaagagccagaattaaacttgaagtagctccgaaaagggccaagtggttaaggtttctatacatagatttctccgaattcacaagagatcaagaacgagtgatatcgaaaacggacggtgtagatttcttagaaggttccattatggtggaccatggcccaccggataactggagatccacgtattatccaccgtccgatcacttgaggatcgcctcaatggtcaaacgacatcgtgtcatctactgccttgaagtcgtcaagtattacgacgaaacttctcaatacacagtcaacgaggaaatggaggagttaagcgatagtttaaaccatgtaagagggtttatgtacgagaaagatgtgacgtatatggatttcctaaaccgagttcgaaccggagagctaaacctgaaatccaaaggccaatgggatgttccacatccatggcttaatctcttcgtaccaaaaactcaaatctccaaatttgatgatggtgtttttaagggtattatcctaagaaataacatcactagcggtcctgttcttgtttatcctatgaatcgcaacaagtggaatgatcggatgtctgccgctatacccgaggaagatgtattttatgcggtagggtttttaagatccgcgggttttgacaattgggaggcttttgatcaagaaaacatggaaatactgaagttttgtgaggatgctaatatgggggttatacaatatcttccttatcattcatcacaagaaggatgggttagacattttggtccgaggtggaatattttcgtagagagaaaatataaatatgatcccaaaatgatattatcaccgggacaaaatatatttcaaaaaataaactcgagttag

SEQ ID NO: 90323 - protein, 523 aa, Arabidopsis thaliana
  peptide (1)..(523): Ceres Seq. ID no. 12723522
MASYNLRSQVRLIAITIVIIITLSTPITTNTSPQPWNILSHNEFAGKLTSSSSSVESAATDFGHVTKIFPSAVLIPSSVEDITDLIKLSFDSQLSFPLAARGHGHSHRGQASAKDGVVVNMRSMVNRDRGIKVSRTCLYVDVDAAWLWIEVLNKTLELGLTPVSWTDYLYLTVGGTLSNGGISGQTFRYGPQITNVLEMDVITGKGEIATCSKDMNSDLFFAVLGGLGQFGIITRARIKLEVAPKRAKWLRFLYIDFSEFTRDQERVISKTDGVDFLEGSIMVDHGPPDNWRSTYYPPSDHLRIASMVKRHRVIYCLEVVKYYDETSQYTVNEEMEELSDSLNHVRGFMYEKDVTYMDFLNRVRTGELNLKSKGQWDVPHPWLNLFVPKTQISKFDDGVFKGIILRNNITSGPVLVYPMNRNKWNDRMSAAIPEEDVFYAVGFLRSAGFDNWEAFDQENMEILKFCEDANMGVIQYLPYHSSQEGWVRHFGPRWNIFVERKYKYDPKMILSPGQNIFQKINSS

SEQ ID NO: 90324 - protein, 403 aa, Arabidopsis thaliana
  peptide (1)..(403): Ceres Seq. ID no. 12723523
MRSMVNRDRGIKVSRTCLYVDVDAAWLWIEVLNKTLELGLTPVSWTDYLYLTVGGTLSNGGISGQTFRYGPQITNVLEMDVITGKGEIATCSKDMNSDLFFAVLGGLGQFGIITRARIKLEVAPKRAKWLRFLYIDFSEFTRDQERVISKTDGVDFLEGSIMVDHGPPDNWRSTYYPPSDHLRIASMVKRHRVIYCLEVVKYYDETSQYTVNEEMEELSDSLNHVRGFMYEKDVTYMDFLNRVRTGELNLKSKGQWDVPHPWLNLFVPKTQISKFDDGVFKGIILRNNITSGPVLVYPMNRNKWNDRMSAAIPEEDVFYAVGFLRSAGFDNWEAFDQENMEILKFCEDANMGVIQYLPYHSSQEGWVRHFGPRWNIFVERKYKYDPKMILSPGQNIFQKINSS

SEQ ID NO: 90325 - protein, 400 aa, Arabidopsis thaliana
  peptide (1)..(400): Ceres Seq. ID no. 12723524
MVNRDRGIKVSRTCLYVDVDAAWLWIEVLNKTLELGLTPVSWTDYLYLTVGGTLSNGGISGQTFRYGPQITNVLEMDVITGKGEIATCSKDMNSDLFFAVLGGLGQFGIITRARIKLEVAPKRAKWLRFLYIDFSEFTRDQERVISKTDGVDFLEGSIMVDHGPPDNWRSTYYPPSDHLRIASMVKRHRVIYCLEVVKYYDETSQYTVNEEMEELSDSLNHVRGFMYEKDVTYMDFLNRVRTGELNLKSKGQWDVPHPWLNLFVPKTQISKFDDGVFKGIILRNNITSGPVLVYPMNRNKWNDRMSAAIPEEDVFYAVGFLRSAGFDNWEAFDQENMEILKFCEDANMGVIQYLPYHSSQEGWVRHFGPRWNIFVERKYKYDPKMILSPGQNIFQKINSS

SEQ ID NO: 90326 - DNA, 1886 bp, Arabidopsis thaliana
  misc_feature (1)..(1886): Ceres Seq. ID no. 12723537
  misc_feature (1)..(1886): Ortholog of  Ceres SEQ ID NO 13638136 as cited in SEQ ID NO 58644
  misc_feature (1)..(1886): Ortholog of  Ceres SEQ ID NO 13596868 as cited in SEQ ID NO 62806
  misc_feature (1)..(1886): Ortholog of  Ceres SEQ ID NO 14302836 as cited in SEQ ID NO 65013
  misc_feature (1)..(1886): Ortholog of  Ceres SEQ ID NO 12566239 as cited in SEQ ID NO 0
gtgctagctaaggttgtcttcactttcctctaatgagtcatgagtttcttgtcttcatcttcatctaataaagttaacaacactctcatcaatttttattatgttcaaatctgtctgacttttcgttcttttctcttacacccaagcgttttaacaatctaacatctgtctctttgaatacttagatatccaacttcaatttctctcctttctcttcccaactttgattcctgatttgggtttttgttaaagttcaagaaagttcttttttctttttttttcctcctttaatggacgaagtttctcctgcagtcgctgttccattcagaccattcactgaccctcacgccggacttagaggctattgcaacggtgaatctagggttactttaccggaaagttcttgttctggcgacggagctatgaaagattcttcctttgagatcaatacaagacaagattcattgacatcatcatcatctgctatggcaggtgtggatatctccgccggagatgaaatcaacggttcagatgagtttgatccgagatcgatgaatcagagtgagaagaaagtacttagtagaacagagagtagaagtctgtttgagttcaagtgtgttcctttatatggagtgacttcgatttgtggtagacgaccagagatggaagattctgtctcaacgattcctagattccttcaagtttcttctagttcgttgcttgatggtcgagtcactaatggatttaatcctcacttgagtgctcatttctttggtgtttacgatggccatggcggttctcaggtagcgaattattgtcgtgagaggatgcatctggctttgacggaggagatagtgaaggagaaaccggagttttgtgacggtgacacgtggcaagagaagtggaagaaggctttgttcaactcttttatgagagttgactcggagattgaaactgtggctcatgctccggaaactgttgggtctacctcggtggttgcggttgtctttccgactcacatctttgtcgcgaattgcggcgactctagggcggttttgtgtcgcggcaaaacgccactcgcgttgtcggttgatcacaaaccggatagggatgatgaagcggcgaggatagaagctgccggtgggaaagtaatccggtggaacggggctcgtgtatttggtgttctcgcaatgtcaagatccattggcgatagataccttaaaccgtcagtaattccggatccagaagtgacttcagtgcggcgagtaaaagaagatgattgtctcatcttagcaagtgatggtctttgggatgtaatgacaaacgaagaagtgtgcgatttggctcggaaacggattttactatggcataagaagaacgcgatggccggagaggctttgcttccggcggagaaaagaggagaaggaaaagatcctgcagcaatgtccgcggcagagtatttgtcgaagatggctttgcaaaaaggaagcaaagacaatataagtgtggtagtggttgatttgaagggaataaggaaattcaagagcaaatccttgaattgaaaaagaaggtttggaagaaaagtgaaaaaaaaagttttgatggtgggtaaaaattctctttagtgaaaaaagaaagataaaacaacaggtaataattacattgtaatattaatttcctgcttaaatttgttatttactttcttagtcttcccaccattatttaatctttttatatttattttactaacatgatatatataatgtacatgggaatagtgtaacttccaaacaaaaagcccccttgtatttttttttatcttggggttagttgtaataacactacattcgtctacgtaaatatttagtgttattatttgatgtttc

SEQ ID NO: 90327 - protein, 423 aa, Arabidopsis thaliana
  peptide (1)..(423): Ceres Seq. ID no. 12723538
MDEVSPAVAVPFRPFTDPHAGLRGYCNGESRVTLPESSCSGDGAMKDSSFEINTRQDSLTSSSSAMAGVDISAGDEINGSDEFDPRSMNQSEKKVLSRTESRSLFEFKCVPLYGVTSICGRRPEMEDSVSTIPRFLQVSSSSLLDGRVTNGFNPHLSAHFFGVYDGHGGSQVANYCRERMHLALTEEIVKEKPEFCDGDTWQEKWKKALFNSFMRVDSEIETVAHAPETVGSTSVVAVVFPTHIFVANCGDSRAVLCRGKTPLALSVDHKPDRDDEAARIEAAGGKVIRWNGARVFGVLAMSRSIGDRYLKPSVIPDPEVTSVRRVKEDDCLILASDGLWDVMTNEEVCDLARKRILLWHKKNAMAGEALLPAEKRGEGKDPAAMSAAEYLSKMALQKGSKDNISVVVVDLKGIRKFKSKSLN

SEQ ID NO: 90328 - protein, 379 aa, Arabidopsis thaliana
  peptide (1)..(379): Ceres Seq. ID no. 12723539
MKDSSFEINTRQDSLTSSSSAMAGVDISAGDEINGSDEFDPRSMNQSEKKVLSRTESRSLFEFKCVPLYGVTSICGRRPEMEDSVSTIPRFLQVSSSSLLDGRVTNGFNPHLSAHFFGVYDGHGGSQVANYCRERMHLALTEEIVKEKPEFCDGDTWQEKWKKALFNSFMRVDSEIETVAHAPETVGSTSVVAVVFPTHIFVANCGDSRAVLCRGKTPLALSVDHKPDRDDEAARIEAAGGKVIRWNGARVFGVLAMSRSIGDRYLKPSVIPDPEVTSVRRVKEDDCLILASDGLWDVMTNEEVCDLARKRILLWHKKNAMAGEALLPAEKRGEGKDPAAMSAAEYLSKMALQKGSKDNISVVVVDLKGIRKFKSKSLN

SEQ ID NO: 90329 - protein, 358 aa, Arabidopsis thaliana
  peptide (1)..(358): Ceres Seq. ID no. 12723540
MAGVDISAGDEINGSDEFDPRSMNQSEKKVLSRTESRSLFEFKCVPLYGVTSICGRRPEMEDSVSTIPRFLQVSSSSLLDGRVTNGFNPHLSAHFFGVYDGHGGSQVANYCRERMHLALTEEIVKEKPEFCDGDTWQEKWKKALFNSFMRVDSEIETVAHAPETVGSTSVVAVVFPTHIFVANCGDSRAVLCRGKTPLALSVDHKPDRDDEAARIEAAGGKVIRWNGARVFGVLAMSRSIGDRYLKPSVIPDPEVTSVRRVKEDDCLILASDGLWDVMTNEEVCDLARKRILLWHKKNAMAGEALLPAEKRGEGKDPAAMSAAEYLSKMALQKGSKDNISVVVVDLKGIRKFKSKSLN

SEQ ID NO: 90330 - DNA, 1720 bp, Arabidopsis thaliana
  misc_feature (1)..(1720): Ceres Seq. ID no. 12723568
  misc_feature (1)..(1720): Ortholog of  Ceres SEQ ID NO 13594209 as cited in SEQ ID NO 59089
  misc_feature (1)..(1720): Ortholog of  Ceres SEQ ID NO 13502874 as cited in SEQ ID NO 66298
  misc_feature (1)..(1720): Ortholog of  Ceres SEQ ID NO 12614124 as cited in SEQ ID NO 68392
aaaccttctcacaaaaaccaacccaaattctttctatatattaaaaaaaaatcaacacaaaggaaaaaaaaatggattacgttttgattgttttgccacttgcattgtttctcatagcttacaaattcttattctcatccaaaacgcagggcttcaatctcccaccaggaccaactccgtttcctatcgtcggccatctccacctagtgaaaccaccggtccaccgtctcttccgccgcttcgctgaaaaatacggcgacatcttctccctccgttacggctctcgccaagtcgtagtgatctcttcattgcctctcgtaagagaatccttcaccggtcaaaacgacgtcattttaacaaacagaccgcattttctgaccgcgaaatacgtcgcttacgattacaccactataggaaccgccgcttacggtgaccattggcgtaatctccgccgtatttgctctctagaaatcctctcctctaaccgtctcaccggattcctctccgtacgtaaagacgagattcgtcggctgctcacaaaactctcacgtgaatatgacggccgtgttgtcgagcttgaacctcttcttgcagatttgacgttcaataatattgtccgcatggtcacagggagacgctactacggagaccaggttcataacaaggaagaagcgaatctattcaagaaactagtgacggacatcaatgacaacagtggtgcgagccatccaggagattatctaccgattcttaaagtgttcggacacggctacgagaaaaaagtgaaagcactaggcgaagccatggacgctttcttacaacgactgctcgatgaatgtcgaataaatggagagagcaacacaatggttagtcacttgttgtctttacaactagaccaacccaagtattacagtgacgtcatcatcaaagggctcatgctcagtatgatgctagctggaacggatactgcggccgtaacattggaatgggcgatggcaaatttattaaaaaaacctgaagtgttgaaaaaggcaaaagctgagatagacgagaagattggagaagagagattggtcgatgaacctgacattgcgaatctaccttatctccaaaacatagtttccgagacttttcggttgtgtccagctgcaccacttcttgttccacgttctccatctgaagatctcaagattggtggatacgacataccacgtggcactatcgtgctagtgaacgcttgggccatccatagagacccaagactttgggatgagcccgagaagtttatgcctgagcggttcgaagaccaagaagcttcaaagaaactaatggtgtttggtaacggacgaagaacgtgtcctggtgcgactttaggccagaggatggtattgttggctttaggttcgttgattcaatgctttgactgggaaaaagtcaacggtgaagatgttgacatgacagagaatcctggaatggctatgcgtaaactcgtgcaattacgagccgtttgccataaacgtcccattatgactaatctcttggcttaaatatcacattttattgaccaccattttgaagtttaccggtttaagcatttttttgggtttagattttttatatataaatacatgattgttttgaagtttggaaattttaataatgtaagattccatgaaaaatgttgtaatataaaattcgaatcatgaaattaataattcgg

SEQ ID NO: 90331 - protein, 491 aa, Arabidopsis thaliana
  peptide (1)..(491): Ceres Seq. ID no. 12723569
MDYVLIVLPLALFLIAYKFLFSSKTQGFNLPPGPTPFPIVGHLHLVKPPVHRLFRRFAEKYGDIFSLRYGSRQVVVISSLPLVRESFTGQNDVILTNRPHFLTAKYVAYDYTTIGTAAYGDHWRNLRRICSLEILSSNRLTGFLSVRKDEIRRLLTKLSREYDGRVVELEPLLADLTFNNIVRMVTGRRYYGDQVHNKEEANLFKKLVTDINDNSGASHPGDYLPILKVFGHGYEKKVKALGEAMDAFLQRLLDECRINGESNTMVSHLLSLQLDQPKYYSDVIIKGLMLSMMLAGTDTAAVTLEWAMANLLKKPEVLKKAKAEIDEKIGEERLVDEPDIANLPYLQNIVSETFRLCPAAPLLVPRSPSEDLKIGGYDIPRGTIVLVNAWAIHRDPRLWDEPEKFMPERFEDQEASKKLMVFGNGRRTCPGATLGQRMVLLALGSLIQCFDWEKVNGEDVDMTENPGMAMRKLVQLRAVCHKRPIMTNLLA

SEQ ID NO: 90332 - protein, 308 aa, Arabidopsis thaliana
  peptide (1)..(308): Ceres Seq. ID no. 12723570
MVTGRRYYGDQVHNKEEANLFKKLVTDINDNSGASHPGDYLPILKVFGHGYEKKVKALGEAMDAFLQRLLDECRINGESNTMVSHLLSLQLDQPKYYSDVIIKGLMLSMMLAGTDTAAVTLEWAMANLLKKPEVLKKAKAEIDEKIGEERLVDEPDIANLPYLQNIVSETFRLCPAAPLLVPRSPSEDLKIGGYDIPRGTIVLVNAWAIHRDPRLWDEPEKFMPERFEDQEASKKLMVFGNGRRTCPGATLGQRMVLLALGSLIQCFDWEKVNGEDVDMTENPGMAMRKLVQLRAVCHKRPIMTNLLA

SEQ ID NO: 90333 - protein, 247 aa, Arabidopsis thaliana
  peptide (1)..(247): Ceres Seq. ID no. 12723571
MDAFLQRLLDECRINGESNTMVSHLLSLQLDQPKYYSDVIIKGLMLSMMLAGTDTAAVTLEWAMANLLKKPEVLKKAKAEIDEKIGEERLVDEPDIANLPYLQNIVSETFRLCPAAPLLVPRSPSEDLKIGGYDIPRGTIVLVNAWAIHRDPRLWDEPEKFMPERFEDQEASKKLMVFGNGRRTCPGATLGQRMVLLALGSLIQCFDWEKVNGEDVDMTENPGMAMRKLVQLRAVCHKRPIMTNLLA

SEQ ID NO: 90334 - DNA, 483 bp, Arabidopsis thaliana
  misc_feature (1)..(483): Ceres Seq. ID no. 12723572
  misc_feature (1)..(483): Ortholog of  Ceres SEQ ID NO 13596742 as cited in SEQ ID NO 63012
  misc_feature (1)..(483): Ortholog of  Ceres SEQ ID NO 15173334 as cited in SEQ ID NO 63797
atgggagattcaacatttctcgatagaatgcttctccagcttcgctccacttgcaagtattacagcggttaccctaaggatctcgggccatcgcgggttctccattttacatcagaaagagagtttgtccaactccttcaccagggctatcctgtggttgtcgcattcaccataaggagtaactacacacaacatcttgaccggatgcttgaggaagctgctgctgagttctatcccaacataaaatttatgcgtgttgagtgtcccaagtatcccggattctgcataactcgccagaaaaatgaatatcctttcattgaaatattccatagcccacaacatgccggtaatgaaggaaaagtacaggatccaaatatcactcggtattcagtgaaagttgtaccttacaattatgatatgagtccctacggattcagagaattctttaagcgccagggggttcgtacttcggatcccaaatga

SEQ ID NO: 90335 - protein, 160 aa, Arabidopsis thaliana
  peptide (1)..(160): Ceres Seq. ID no. 12723573
MGDSTFLDRMLLQLRSTCKYYSGYPKDLGPSRVLHFTSEREFVQLLHQGYPVVVAFTIRSNYTQHLDRMLEEAAAEFYPNIKFMRVECPKYPGFCITRQKNEYPFIEIFHSPQHAGNEGKVQDPNITRYSVKVVPYNYDMSPYGFREFFKRQGVRTSDPK

SEQ ID NO: 90336 - protein, 151 aa, Arabidopsis thaliana
  peptide (1)..(151): Ceres Seq. ID no. 12723574
MLLQLRSTCKYYSGYPKDLGPSRVLHFTSEREFVQLLHQGYPVVVAFTIRSNYTQHLDRMLEEAAAEFYPNIKFMRVECPKYPGFCITRQKNEYPFIEIFHSPQHAGNEGKVQDPNITRYSVKVVPYNYDMSPYGFREFFKRQGVRTSDPK

SEQ ID NO: 90337 - protein, 92 aa, Arabidopsis thaliana
  peptide (1)..(92): Ceres Seq. ID no. 12723575
MLEEAAAEFYPNIKFMRVECPKYPGFCITRQKNEYPFIEIFHSPQHAGNEGKVQDPNITRYSVKVVPYNYDMSPYGFREFFKRQGVRTSDPK

SEQ ID NO: 90338 - DNA, 2889 bp, Arabidopsis thaliana
  misc_feature (1)..(2889): Ceres Seq. ID no. 12723580
  misc_feature (1)..(2889): Ortholog of  Ceres SEQ ID NO 15227147 as cited in SEQ ID NO 61351
atgacgttttccatgagagatttagatcaggctcttcaaggagctggccagaaatccgggattgaaatatggcgcatcgagaacttcaaacctgtcactgttccacaagagtctcatgggaaatttttcaccggggattcctatatagtcttaaagaccacagcgtcaagaagcggttctttgcatcatgatattcactactggctcggtaaagattccagccaggatgaagcaggtgctgtagccgtcatgactgttgaattagattcagcattaggtggacgtgctgttcagtaccgagaagtacagggtcacgaaaccgagaagtttctttcctacttcaaaccttgcataatacctcaagaaggtggagttgcttcagggttcaaccatgtaaagcccgaggagcatcagacgcgtctgtatatctgcaaaggcaaacatgtcgtccgtgttaaagaggttccgtttgttcgatcgactctcaaccacgaagacgtttttattcttgatacagagtctaaaatttttcaattcagtggttccaagtcgagtattcaagaaagagcaaaagctcttgaggttgttcagtacattaaagacacttaccatgatggaaagtgcgatatcgcagctgttgaggatgggaggatgatggctgatgctgaagctggagagttttggggcttgtttggtgggtttgctccgcttcctaagaaaccagcagtcaatgatgacgaaaccgctgcatctgatggtatcaaacttttcagtgtcgagaagggacagacagatgccgtagaggctgagtgtttgacgaaagagcttctggacactaacaaatgttatattctcgattgcggtcttgaattgttcgtttggaagggacgaagtacttcaatcgaccaaagaaagagcgcaactgaagctgcagaagaatttttccgttcgtctgaaccgccaaaatcaaacctggtcagtgtgatggaagggtatgaaacagtgatgttccgatctaagtttgattcatggccggcttcaagtaccatagctgagccccaacaaggcagaggcaaagtcgcagctcttttgcagcggcaaggagttaacgttcaaggcctggttaagacttcttcttcttcttctaaagacgaaccgaagccatacattgatggtacaggaaatctccaggtctggcgaatcaattgtgaagaaaagatccttctcgaagcagcagagcaatcaaagttctatagcggggattgttatatactccagtactcatacccaggagaagacagagaggaacatctagtgggtacttggtttggcaagcaaagcgttgaggaagacagagcatctgctatttctttggcaaacaagatggttgaatccatgaagtttgtgccggctcaggctcgcattaatgagggaaaagagccaattcagttttttgtgatcatgcaaagcttcatcacatttaagggtggtgtaagtgatgctttcaaaaagtacatagctgagaacgacatccctgatactacttacgaagcagaaggtgttgcactgtttcgggttcaaggttctggacccgagaacatgcaagccatacagatagaagcggcttccgcaggactaaattcttcgcactgttatatattacacggtgattctactgttttcacttggtgtggcaatcttacttcctcggaagatcaagaacttatggaaagaatgttggatttgattaagccaaatgaacccactaaggcacaaaaggaaggctcagagtctgaacagttttgggaattattaggaggcaaatcagaatatccgagccaaaagatcaaaagggatggagagagtgatcctcatctcttttcttgcacatatacaaacgaaagtctgaaggctacagagatcttcaacttcactcaagatgatttgatgactgaagatatcttcatacttgattgtcacactgaggtctttgtctgggtgggacaacaagttgacccaaagaagaaacctcaagctttggacattggagagaactttcttaagcatgatttcctcctagagaatctagcaagtgaaacaccgatatacattgtaacagagggaaacgaacctccatttttcactcggttcttcacctgggactcttctaaatctggaatgcatggagactctttccagagaaagcttgcgatcctgacaaataaaggaaagccgcttctagataaacctaaaaggagagtccctgcatacagtagcaggtccaccgttccagacaaatcgcagcctcggtccagaagtatgacttttagtccagacagggcccgcgtgaggggacggtctccagctttcaacgcacttgcagcaaactttgagaaactaaatataagaaaccaatcaactccaccacctatggttagtccaatggtccggaagctttacccgaaatctcatgccccagacctctcgaagatagctcctaaatccgctatagctgcccgtacagcgctttttgaaaaacctactcctacttctcaagaaccacctactagccccagttcttcagaagctacaaaccaagcagaagcaccaaaatcgacatcagagacaaacgaggaagaagcaatgagcagcatcaatgaagactcaaaagaagaagaagcagaagaagagagcagcctccctactttcccatatgaacgccttaaaaccgactcagaggatcctgtttcagatgtcgacctcactagaagagaggcatacttgacttcagtagagttcaaggagaagtttgagatgacaaagaatgagttctacaaactgcctaaatggaaacaaaacaagctcaaaatgtctgtcaatctcttctaa

SEQ ID NO: 90339 - protein, 962 aa, Arabidopsis thaliana
  peptide (1)..(962): Ceres Seq. ID no. 12723581
MTFSMRDLDQALQGAGQKSGIEIWRIENFKPVTVPQESHGKFFTGDSYIVLKTTASRSGSLHHDIHYWLGKDSSQDEAGAVAVMTVELDSALGGRAVQYREVQGHETEKFLSYFKPCIIPQEGGVASGFNHVKPEEHQTRLYICKGKHVVRVKEVPFVRSTLNHEDVFILDTESKIFQFSGSKSSIQERAKALEVVQYIKDTYHDGKCDIAAVEDGRMMADAEAGEFWGLFGGFAPLPKKPAVNDDETAASDGIKLFSVEKGQTDAVEAECLTKELLDTNKCYILDCGLELFVWKGRSTSIDQRKSATEAAEEFFRSSEPPKSNLVSVMEGYETVMFRSKFDSWPASSTIAEPQQGRGKVAALLQRQGVNVQGLVKTSSSSSKDEPKPYIDGTGNLQVWRINCEEKILLEAAEQSKFYSGDCYILQYSYPGEDREEHLVGTWFGKQSVEEDRASAISLANKMVESMKFVPAQARINEGKEPIQFFVIMQSFITFKGGVSDAFKKYIAENDIPDTTYEAEGVALFRVQGSGPENMQAIQIEAASAGLNSSHCYILHGDSTVFTWCGNLTSSEDQELMERMLDLIKPNEPTKAQKEGSESEQFWELLGGKSEYPSQKIKRDGESDPHLFSCTYTNESLKATEIFNFTQDDLMTEDIFILDCHTEVFVWVGQQVDPKKKPQALDIGENFLKHDFLLENLASETPIYIVTEGNEPPFFTRFFTWDSSKSGMHGDSFQRKLAILTNKGKPLLDKPKRRVPAYSSRSTVPDKSQPRSRSMTFSPDRARVRGRSPAFNALAANFEKLNIRNQSTPPPMVSPMVRKLYPKSHAPDLSKIAPKSAIAARTALFEKPTPTSQEPPTSPSSSEATNQAEAPKSTSETNEEEAMSSINEDSKEEEAEEESSLPTFPYERLKTDSEDPVSDVDLTRREAYLTSVEFKEKFEMTKNEFYKLPKWKQNKLKMSVNLF

SEQ ID NO: 90340 - protein, 958 aa, Arabidopsis thaliana
  peptide (1)..(958): Ceres Seq. ID no. 12723582
MRDLDQALQGAGQKSGIEIWRIENFKPVTVPQESHGKFFTGDSYIVLKTTASRSGSLHHDIHYWLGKDSSQDEAGAVAVMTVELDSALGGRAVQYREVQGHETEKFLSYFKPCIIPQEGGVASGFNHVKPEEHQTRLYICKGKHVVRVKEVPFVRSTLNHEDVFILDTESKIFQFSGSKSSIQERAKALEVVQYIKDTYHDGKCDIAAVEDGRMMADAEAGEFWGLFGGFAPLPKKPAVNDDETAASDGIKLFSVEKGQTDAVEAECLTKELLDTNKCYILDCGLELFVWKGRSTSIDQRKSATEAAEEFFRSSEPPKSNLVSVMEGYETVMFRSKFDSWPASSTIAEPQQGRGKVAALLQRQGVNVQGLVKTSSSSSKDEPKPYIDGTGNLQVWRINCEEKILLEAAEQSKFYSGDCYILQYSYPGEDREEHLVGTWFGKQSVEEDRASAISLANKMVESMKFVPAQARINEGKEPIQFFVIMQSFITFKGGVSDAFKKYIAENDIPDTTYEAEGVALFRVQGSGPENMQAIQIEAASAGLNSSHCYILHGDSTVFTWCGNLTSSEDQELMERMLDLIKPNEPTKAQKEGSESEQFWELLGGKSEYPSQKIKRDGESDPHLFSCTYTNESLKATEIFNFTQDDLMTEDIFILDCHTEVFVWVGQQVDPKKKPQALDIGENFLKHDFLLENLASETPIYIVTEGNEPPFFTRFFTWDSSKSGMHGDSFQRKLAILTNKGKPLLDKPKRRVPAYSSRSTVPDKSQPRSRSMTFSPDRARVRGRSPAFNALAANFEKLNIRNQSTPPPMVSPMVRKLYPKSHAPDLSKIAPKSAIAARTALFEKPTPTSQEPPTSPSSSEATNQAEAPKSTSETNEEEAMSSINEDSKEEEAEEESSLPTFPYERLKTDSEDPVSDVDLTRREAYLTSVEFKEKFEMTKNEFYKLPKWKQNKLKMSVNLF

SEQ ID NO: 90341 - protein, 879 aa, Arabidopsis thaliana; identical to SEQ ID NO: 78691
  peptide (1)..(879): Ceres Seq. ID no. 12723583

SEQ ID NO: 90342 - DNA, 3177 bp, Arabidopsis thaliana
  misc_feature (1)..(3177): Ceres Seq. ID no. 12723584
  misc_feature (1)..(3177): Ortholog of  Ceres SEQ ID NO 13646569 as cited in SEQ ID NO 20745
accttcacttgctctcttttttccgaagaatctggcacagagagaagatggcgagtggcctcgaggatatcgtgaacgagaatgttgatttggagaaaatacctattgaggaagtgttccagcagttgaaatgcagcagagaaggtttatctggagcagaaggagaaaacagactccagatctttggccccaacaaactcgaggagaagaaggaaagcaagttactcaagttcttgggttttatgtggaaccctctctcttgggtcatggaagcagctgcaatcatggctattgccttggctaatggcggtggaaagccaccggattggcaagattttgtcggtatcgtttgtcttttggttatcaattcaactatcagttttgtcgaagaaaacaatgctggaaatgctgctgctgctcttatggctggtcttgctcccaaaactaaggttctaagagatggcaaatggtcagagcaagaagcttctattcttgttcctggagatattgtgagcatcaagcttggtgacatcattcctgctgatgcacgtcttcttgaaggtgatcctttaaaagtcgaccaatctgctttgaccggagaatctcttcccgcaacgaaaggtccaggggaagaagttttctccggttctacctgcaagcaaggtgagattgaagcggttgtgatagccactggagtccatactttcttcggtaaagcggctcatctagtcgacagcacaaaccaagttggacatttccagaaagttcttacggcgattggaaacttctgcatatgttccatagctgttggtattgcgattgagatcgttgtcatgtatccgatccagcgcagacactacagagacggaatcgacaatcttcttgttcttttgattggtggtatccccattgcaatgcctactgtcttgtctgtcacaatggctattggatctcacaagttgtctcaacaaggagctatcacaaaacgaatgaccgccattgaagaaatggctggtatggatgttctgtgcagcgataaaaccgggactctcacgctaaacaagcttagtgttgacaagaatcttattgaggtttattgtaaaggcgttgagaaagatgaagttttgctttttgctgctagagcttcaagagttgagaaccaagatgctattgatgctgctatggttggaatgctcgctgatccaaaagaggcaagagctggaatcagagagattcacttcctaccattcaatccagttgataagcgaaccgctttgacgtttatcgacagcaacggaaactggcaccgagtaagcaaaggagctcccgagcagattcttgatctctgtaacgcgagagctgatctgaggaagagagtccactctacaatcgataagtacgctgagcgtggacttaggtcattagctgtttcaagacagactgtaccagagaaaacaaaagaaagctctggtagtccatgggaatttgttggtgtgttgcctctgtttgatcctccaagacatgatagtgccgaaaccattagaagagctctagacctcggtgtcaatgtcaagatgattactggtgatcaacttgctattgcgaaagagacaggacgtagacttggaatgggatcaaacatgtacccatcctcttctttactcggtaaacacaaagacgaagccatggctcacattcctgttgaggatttgattgagaaagctgatggctttgctggagtcttcccagagcacaaatacgaaattgtgaagaagttgcaagaaaggaagcatatctgtggtatgactggagatggagtgaatgacgctccagcattgaagaaagcggatataggtatcgctgtggcggatgcaactgacgctgcacgaggtgcttctgatattgtcctcaccgagccaggtctcagtgtgatcatcagcgcggttctaaccagtagagccatcttccagagaatgaagaactacacaatatatgcagtctcaattaccattcgtatagtgtttgggtttatgctcattgctctaatatggaagttcgacttttcaccattcatggttttgatcattgctatattaaacgatggaaccatcatgactatctcaaaggacagagtcaagccttctccaacaccagatagctggaaactcaaagaaatcttcgcaaccggcgttgttcttggaggctacatggctataatgactgttgttttcttctgggccgcatacaaaaccgatttcttcccgagaacattccacgtgagagacttgagaggcagtgaacatgagatgatgtctgctttatacttacaagtcagtattgtgagccaagctcttatattcgtcactcgatctagaagctggtcttttacagaacgacctggatatttcttgctaattgctttctgggtagcacaattgattgcaacggctattgcggtttacggtaattgggaatttgcaagaatcaaaggaataggatggggatgggctggagtaatctggctttacagtattgtcttctactttccattagacataatgaaattcgcaatccgttacatactagccggaacagcctggaagaatatcattgacaacaggactgcgtttaccactaagcaaaactatggaatagaggagagggaagcacaatgggctcatgcacaaaggactttacacggtcttcagaacactgaaacagccaacgttgtcccggagagaggtggttacagagaactgtctgagattgcaaatcaagccaagagacgagctgagatcgcaaggcttagggaacttcatacgcttaaaggacatgtagagtcagtggtgaagctaaagggactagacattgagacagctggtcactacaccgtttaataaagatttaacaagaagatgattaaggaagaagaagatccttttgtttaagagatgataatgatgatgattttataacaagagaataaggttttttttctgtgtatgttaagttcctctaaactcctggggtttttcttccttccttattcatggttttagactttaattataaccatgtgtttttgtttcccctctcttgaataaaaaagagaagatactaatatcataggtttaatacgtttatgttttataaaagttcaatagatattgtttttgg

SEQ ID NO: 90343 - protein, 964 aa, Arabidopsis thaliana
  peptide (1)..(964): Ceres Seq. ID no. 12723585
LHLLSFFRRIWHREKMASGLEDIVNENVDLEKIPIEEVFQQLKCSREGLSGAEGENRLQIFGPNKLEEKKESKLLKFLGFMWNPLSWVMEAAAIMAIALANGGGKPPDWQDFVGIVCLLVINSTISFVEENNAGNAAAALMAGLAPKTKVLRDGKWSEQEASILVPGDIVSIKLGDIIPADARLLEGDPLKVDQSALTGESLPATKGPGEEVFSGSTCKQGEIEAVVIATGVHTFFGKAAHLVDSTNQVGHFQKVLTAIGNFCICSIAVGIAIEIVVMYPIQRRHYRDGIDNLLVLLIGGIPIAMPTVLSVTMAIGSHKLSQQGAITKRMTAIEEMAGMDVLCSDKTGTLTLNKLSVDKNLIEVYCKGVEKDEVLLFAARASRVENQDAIDAAMVGMLADPKEARAGIREIHFLPFNPVDKRTALTFIDSNGNWHRVSKGAPEQILDLCNARADLRKRVHSTIDKYAERGLRSLAVSRQTVPEKTKESSGSPWEFVGVLPLFDPPRHDSAETIRRALDLGVNVKMITGDQLAIAKETGRRLGMGSNMYPSSSLLGKHKDEAMAHIPVEDLIEKADGFAGVFPEHKYEIVKKLQERKHICGMTGDGVNDAPALKKADIGIAVADATDAARGASDIVLTEPGLSVIISAVLTSRAIFQRMKNYTIYAVSITIRIVFGFMLIALIWKFDFSPFMVLIIAILNDGTIMTISKDRVKPSPTPDSWKLKEIFATGVVLGGYMAIMTVVFFWAAYKTDFFPRTFHVRDLRGSEHEMMSALYLQVSIVSQALIFVTRSRSWSFTERPGYFLLIAFWVAQLIATAIAVYGNWEFARIKGIGWGWAGVIWLYSIVFYFPLDIMKFAIRYILAGTAWKNIIDNRTAFTTKQNYGIEEREAQWAHAQRTLHGLQNTETANVVPERGGYRELSEIANQAKRRAEIARLRELHTLKGHVESVVKLKGLDIETAGHYTV

SEQ ID NO: 90344 - protein, 949 aa, Arabidopsis thaliana
  peptide (1)..(949): Ceres Seq. ID no. 12723586
MASGLEDIVNENVDLEKIPIEEVFQQLKCSREGLSGAEGENRLQIFGPNKLEEKKESKLLKFLGFMWNPLSWVMEAAAIMAIALANGGGKPPDWQDFVGIVCLLVINSTISFVEENNAGNAAAALMAGLAPKTKVLRDGKWSEQEASILVPGDIVSIKLGDIIPADARLLEGDPLKVDQSALTGESLPATKGPGEEVFSGSTCKQGEIEAVVIATGVHTFFGKAAHLVDSTNQVGHFQKVLTAIGNFCICSIAVGIAIEIVVMYPIQRRHYRDGIDNLLVLLIGGIPIAMPTVLSVTMAIGSHKLSQQGAITKRMTAIEEMAGMDVLCSDKTGTLTLNKLSVDKNLIEVYCKGVEKDEVLLFAARASRVENQDAIDAAMVGMLADPKEARAGIREIHFLPFNPVDKRTALTFIDSNGNWHRVSKGAPEQILDLCNARADLRKRVHSTIDKYAERGLRSLAVSRQTVPEKTKESSGSPWEFVGVLPLFDPPRHDSAETIRRALDLGVNVKMITGDQLAIAKETGRRLGMGSNMYPSSSLLGKHKDEAMAHIPVEDLIEKADGFAGVFPEHKYEIVKKLQERKHICGMTGDGVNDAPALKKADIGIAVADATDAARGASDIVLTEPGLSVIISAVLTSRAIFQRMKNYTIYAVSITIRIVFGFMLIALIWKFDFSPFMVLIIAILNDGTIMTISKDRVKPSPTPDSWKLKEIFATGVVLGGYMAIMTVVFFWAAYKTDFFPRTFHVRDLRGSEHEMMSALYLQVSIVSQALIFVTRSRSWSFTERPGYFLLIAFWVAQLIATAIAVYGNWEFARIKGIGWGWAGVIWLYSIVFYFPLDIMKFAIRYILAGTAWKNIIDNRTAFTTKQNYGIEEREAQWAHAQRTLHGLQNTETANVVPERGGYRELSEIANQAKRRAEIARLRELHTLKGHVESVVKLKGLDIETAGHYTV

SEQ ID NO: 90345 - protein, 884 aa, Arabidopsis thaliana
  peptide (1)..(884): Ceres Seq. ID no. 12723587
MWNPLSWVMEAAAIMAIALANGGGKPPDWQDFVGIVCLLVINSTISFVEENNAGNAAAALMAGLAPKTKVLRDGKWSEQEASILVPGDIVSIKLGDIIPADARLLEGDPLKVDQSALTGESLPATKGPGEEVFSGSTCKQGEIEAVVIATGVHTFFGKAAHLVDSTNQVGHFQKVLTAIGNFCICSIAVGIAIEIVVMYPIQRRHYRDGIDNLLVLLIGGIPIAMPTVLSVTMAIGSHKLSQQGAITKRMTAIEEMAGMDVLCSDKTGTLTLNKLSVDKNLIEVYCKGVEKDEVLLFAARASRVENQDAIDAAMVGMLADPKEARAGIREIHFLPFNPVDKRTALTFIDSNGNWHRVSKGAPEQILDLCNARADLRKRVHSTIDKYAERGLRSLAVSRQTVPEKTKESSGSPWEFVGVLPLFDPPRHDSAETIRRALDLGVNVKMITGDQLAIAKETGRRLGMGSNMYPSSSLLGKHKDEAMAHIPVEDLIEKADGFAGVFPEHKYEIVKKLQERKHICGMTGDGVNDAPALKKADIGIAVADATDAARGASDIVLTEPGLSVIISAVLTSRAIFQRMKNYTIYAVSITIRIVFGFMLIALIWKFDFSPFMVLIIAILNDGTIMTISKDRVKPSPTPDSWKLKEIFATGVVLGGYMAIMTVVFFWAAYKTDFFPRTFHVRDLRGSEHEMMSALYLQVSIVSQALIFVTRSRSWSFTERPGYFLLIAFWVAQLIATAIAVYGNWEFARIKGIGWGWAGVIWLYSIVFYFPLDIMKFAIRYILAGTAWKNIIDNRTAFTTKQNYGIEEREAQWAHAQRTLHGLQNTETANVVPERGGYRELSEIANQAKRRAEIARLRELHTLKGHVESVVKLKGLDIETAGHYTV

SEQ ID NO: 90346 - DNA, 1803 bp, Arabidopsis thaliana
  misc_feature (1)..(1803): Ceres Seq. ID no. 12723588
  misc_feature (1)..(1803): Ortholog of  Ceres SEQ ID NO 13599779 as cited in SEQ ID NO 0
atggattcttcttcgtttgaagataatgaatgcattgagacttgtaaaccaaacgttttgaatgtaagtgaaaggagagaattgatccacgcattgtctaaccagcctgaagaagcttcggagcttttgaattcatggagcagaaatgagatcatgaagatcatatgtgctgagatgggtaaagaaaggaagtacactggtcttaacaaaccaaagctcatagagaatcttctgaatcttgtgtctcgtcctcttggagagacctcttgttctgaccgtagaaactcgaggaagaaggagaagaagatgatcggttacatcatttgctgtgagaatttagcttgtagagctgcgcttggatgcgatgatacgttttgcagaaggtgttcttgctgcatctgtcaaaagtttgatgataataaggatcctagtttatggcttacttgtgatgcttgtggatcgtcttgtcatttggaatgtggtttgaagcaagataggtatgggattgggagtgatgatcttgatggtaggttttattgcgcgtattgcggtaaagataatgacttgctcggatgctggagaaaacaagtgaaggtggcgaaagagacgcggcgtgtggatgtactttgttatcgtctttctttaggacagaagctgttgagaggtaccacgaagtatcggaatctgttggaacttatggatgaggcggtgaagaagctcgaaggtgatgtgggtccgttgtcgggttgggccatgaagatggctcgaggcatcgtcaatagactttcttcgggtgtgcatgtccagaagctgtgttctcaggcaatggaagctctggacaaagtggtctcaccatcagaatctgtttcaggacaaggtgacaagatgaccgtgagagtagaagagattcaagcaagatcagtcactgtgagagtagactccgaggagccgtcttcttctacacaaaacaagatcacaggtttcaggttgttttgtcgaaagtcgaaggacgaagaatgctcgtctcaggggaattgtgttgtttatctacctgagacgacgtctgccatccaaggacttgaacccgacaccgagttctgtctcagagtggtttcctttaacgaggaaggtgacttagatgagtctgagcttcggttcacaacgttgaaggatgatggagatgaagctggggaccagcaaagccctttgacaaactcaagcagtggtctttgtagtaatccatctttaccagaagatgaatctaataatgtcaataaaagctgcagcaaaggaaatggtgacaaggacaacactgaacactgtagtgcaggagaagtagaatctgagcttgaagaagagaggcttgtaaagaggaaagcaaacaagatagatggaagagacttgcttgtaacaccctgcaagagagatatttataaaggaaagcaaggagggaataaaagattcaaatcaagaacagtatccttgaacgagaaacctgagatcaataatgccgcaaatggagtaggagataaagacttgggtcatattgttaagacgattagatgtttagaggaagaaggacatatagacaagagttttagggaaaggttcttgacatggtatagcttaagagctactcaccgagaagtaagagttgtgaagatctttgttgagacgtttatggaggatctgtcttctttgggacaacagcttgtggatacattctcagaaagtatactgagtaagagatcatcgacaaatggtgtagtacctgctgggatctgcctcaagctttggcattaa

SEQ ID NO: 90347 - protein, 600 aa, Arabidopsis thaliana
  peptide (1)..(600): Ceres Seq. ID no. 12723589
MDSSSFEDNECIETCKPNVLNVSERRELIHALSNQPEEASELLNSWSRNEIMKIICAEMGKERKYTGLNKPKLIENLLNLVSRPLGETSCSDRRNSRKKEKKMIGYIICCENLACRAALGCDDTFCRRCSCCICQKFDDNKDPSLWLTCDACGSSCHLECGLKQDRYGIGSDDLDGRFYCAYCGKDNDLLGCWRKQVKVAKETRRVDVLCYRLSLGQKLLRGTTKYRNLLELMDEAVKKLEGDVGPLSGWAMKMARGIVNRLSSGVHVQKLCSQAMEALDKVVSPSESVSGQGDKMTVRVEEIQARSVTVRVDSEEPSSSTQNKITGFRLFCRKSKDEECSSQGNCVVYLPETTSAIQGLEPDTEFCLRVVSFNEEGDLDESELRFTTLKDDGDEAGDQQSPLTNSSSGLCSNPSLPEDESNNVNKSCSKGNGDKDNTEHCSAGEVESELEEERLVKRKANKIDGRDLLVTPCKRDIYKGKQGGNKRFKSRTVSLNEKPEINNAANGVGDKDLGHIVKTIRCLEEEGHIDKSFRERFLTWYSLRATHREVRVVKIFVETFMEDLSSLGQQLVDTFSESILSKRSSTNGVVPAGICLKLWH

SEQ ID NO: 90348 - protein, 549 aa, Arabidopsis thaliana
  peptide (1)..(549): Ceres Seq. ID no. 12723590
MKIICAEMGKERKYTGLNKPKLIENLLNLVSRPLGETSCSDRRNSRKKEKKMIGYIICCENLACRAALGCDDTFCRRCSCCICQKFDDNKDPSLWLTCDACGSSCHLECGLKQDRYGIGSDDLDGRFYCAYCGKDNDLLGCWRKQVKVAKETRRVDVLCYRLSLGQKLLRGTTKYRNLLELMDEAVKKLEGDVGPLSGWAMKMARGIVNRLSSGVHVQKLCSQAMEALDKVVSPSESVSGQGDKMTVRVEEIQARSVTVRVDSEEPSSSTQNKITGFRLFCRKSKDEECSSQGNCVVYLPETTSAIQGLEPDTEFCLRVVSFNEEGDLDESELRFTTLKDDGDEAGDQQSPLTNSSSGLCSNPSLPEDESNNVNKSCSKGNGDKDNTEHCSAGEVESELEEERLVKRKANKIDGRDLLVTPCKRDIYKGKQGGNKRFKSRTVSLNEKPEINNAANGVGDKDLGHIVKTIRCLEEEGHIDKSFRERFLTWYSLRATHREVRVVKIFVETFMEDLSSLGQQLVDTFSESILSKRSSTNGVVPAGICLKLWH

SEQ ID NO: 90349 - protein, 542 aa, Arabidopsis thaliana
  peptide (1)..(542): Ceres Seq. ID no. 12723591
MGKERKYTGLNKPKLIENLLNLVSRPLGETSCSDRRNSRKKEKKMIGYIICCENLACRAALGCDDTFCRRCSCCICQKFDDNKDPSLWLTCDACGSSCHLECGLKQDRYGIGSDDLDGRFYCAYCGKDNDLLGCWRKQVKVAKETRRVDVLCYRLSLGQKLLRGTTKYRNLLELMDEAVKKLEGDVGPLSGWAMKMARGIVNRLSSGVHVQKLCSQAMEALDKVVSPSESVSGQGDKMTVRVEEIQARSVTVRVDSEEPSSSTQNKITGFRLFCRKSKDEECSSQGNCVVYLPETTSAIQGLEPDTEFCLRVVSFNEEGDLDESELRFTTLKDDGDEAGDQQSPLTNSSSGLCSNPSLPEDESNNVNKSCSKGNGDKDNTEHCSAGEVESELEEERLVKRKANKIDGRDLLVTPCKRDIYKGKQGGNKRFKSRTVSLNEKPEINNAANGVGDKDLGHIVKTIRCLEEEGHIDKSFRERFLTWYSLRATHREVRVVKIFVETFMEDLSSLGQQLVDTFSESILSKRSSTNGVVPAGICLKLWH

SEQ ID NO: 90350 - DNA, 1563 bp, Arabidopsis thaliana
  misc_feature (1)..(1563): Ceres Seq. ID no. 12723601
  misc_feature (1)..(1563): Ortholog of  Ceres SEQ ID NO 12612314 as cited in SEQ ID NO 51420
atgaaagagtattggacatcattagcttcactactcggagttttagcattttgtcaaagcttaatgcaatcaatattcccaccggagctccgtttcgctttcctcaaattcttcaacagaatcttccacgtcttctcttcttactgctacttcgacataacagagatcgacggcgtcaacaccaacgaactctacaacgccgttcagctttacttaagctcctccgtctcaatagccggaaaccgtttaagtctaacccgcgccgttaactcttcctccatcactttcggtctctccaacaacgactcaatcgtcgacacctttaacggcgttacagttctatgggaacacgtcgttacacagcgtcaaactcagacttttgcttggagaccattacctgaagagaaacgtggattcactctacgaatcaagaaaaaggacaaaactttgatactcaattcttatcttgattacatcatggagagagctaatgagattcgtcggaaaaaccaagaccggttgctttatactaactcaagaggtgggtctcttgactcaagaggacatccttgggaatctgttccttttaagcatccgagtactttcgaaactttagctatggatccgagaaagaagcaacagatcatggatgatcttaaagattttgctgaaggtcaagtcttttatcagaagactggtagggcttggaagagaggttacttgttgtacgggccaccaggtactggtaagtcgagtatgatcgcagcgatggcgaattatctcggttacgatatttacgatcttgagctcactgaggttcatagtaactcggagttgaggaagttgttgatgaaaacgagttctaagtctattattgttatagaggatattgattgttcgattaatttgactaataggaagaagaatagtagtaatgtatcgtcgcaacggagttattatgatgcggagacaagaaacggttcgggttcaggttcgggtggttcgggagaggaaggtggtaatgggaatactataacgttgtcgggtttgttgaattttacagatgggctttggtcttgttgtggaagtgagaggatctttgtgtttacgaccaatcatatagagaagcttgatcctgcattgcttagaagtgggagaatggatatgcatatctacatgagtttttgtaacttcccatcgttgaagattttgttgaagaattatttggggtatggggtggaagatataaacggcgacgttttgaaggagatggagatggttgtggagaaggctgagatgactcctgctgatgtaagtgaggctttgattaagaataggagggataaagagaaggcgattagggagttgttggaggatttaaaaagtagaggggagagaaatgtgaaagatgggaaattgaggggtggaagtgggaatttgactgaattggaagttgttgaggaacaagagaagagggcaatagatagtcaaaatgaagatgaggatcatgatgaagaagagattgagcttgaggataacatttgtaagactagagaagattga

SEQ ID NO: 90351 - protein, 520 aa, Arabidopsis thaliana
  peptide (1)..(520): Ceres Seq. ID no. 12723602
MKEYWTSLASLLGVLAFCQSLMQSIFPPELRFAFLKFFNRIFHVFSSYCYFDITEIDGVNTNELYNAVQLYLSSSVSIAGNRLSLTRAVNSSSITFGLSNNDSIVDTFNGVTVLWEHVVTQRQTQTFAWRPLPEEKRGFTLRIKKKDKTLILNSYLDYIMERANEIRRKNQDRLLYTNSRGGSLDSRGHPWESVPFKHPSTFETLAMDPRKKQQIMDDLKDFAEGQVFYQKTGRAWKRGYLLYGPPGTGKSSMIAAMANYLGYDIYDLELTEVHSNSELRKLLMKTSSKSIIVIEDIDCSINLTNRKKNSSNVSSQRSYYDAETRNGSGSGSGGSGEEGGNGNTITLSGLLNFTDGLWSCCGSERIFVFTTNHIEKLDPALLRSGRMDMHIYMSFCNFPSLKILLKNYLGYGVEDINGDVLKEMEMVVEKAEMTPADVSEALIKNRRDKEKAIRELLEDLKSRGERNVKDGKLRGGSGNLTELEVVEEQEKRAIDSQNEDEDHDEEEIELEDNICKTRED

SEQ ID NO: 90352 - protein, 499 aa, Arabidopsis thaliana
  peptide (1)..(499): Ceres Seq. ID no. 12723603
MQSIFPPELRFAFLKFFNRIFHVFSSYCYFDITEIDGVNTNELYNAVQLYLSSSVSIAGNRLSLTRAVNSSSITFGLSNNDSIVDTFNGVTVLWEHVVTQRQTQTFAWRPLPEEKRGFTLRIKKKDKTLILNSYLDYIMERANEIRRKNQDRLLYTNSRGGSLDSRGHPWESVPFKHPSTFETLAMDPRKKQQIMDDLKDFAEGQVFYQKTGRAWKRGYLLYGPPGTGKSSMIAAMANYLGYDIYDLELTEVHSNSELRKLLMKTSSKSIIVIEDIDCSINLTNRKKNSSNVSSQRSYYDAETRNGSGSGSGGSGEEGGNGNTITLSGLLNFTDGLWSCCGSERIFVFTTNHIEKLDPALLRSGRMDMHIYMSFCNFPSLKILLKNYLGYGVEDINGDVLKEMEMVVEKAEMTPADVSEALIKNRRDKEKAIRELLEDLKSRGERNVKDGKLRGGSGNLTELEVVEEQEKRAIDSQNEDEDHDEEEIELEDNICKTRED

SEQ ID NO: 90353 - protein, 361 aa, Arabidopsis thaliana
  peptide (1)..(361): Ceres Seq. ID no. 12723604
MERANEIRRKNQDRLLYTNSRGGSLDSRGHPWESVPFKHPSTFETLAMDPRKKQQIMDDLKDFAEGQVFYQKTGRAWKRGYLLYGPPGTGKSSMIAAMANYLGYDIYDLELTEVHSNSELRKLLMKTSSKSIIVIEDIDCSINLTNRKKNSSNVSSQRSYYDAETRNGSGSGSGGSGEEGGNGNTITLSGLLNFTDGLWSCCGSERIFVFTTNHIEKLDPALLRSGRMDMHIYMSFCNFPSLKILLKNYLGYGVEDINGDVLKEMEMVVEKAEMTPADVSEALIKNRRDKEKAIRELLEDLKSRGERNVKDGKLRGGSGNLTELEVVEEQEKRAIDSQNEDEDHDEEEIELEDNICKTRED

SEQ ID NO: 90354 - DNA, 1062 bp, Arabidopsis thaliana
  misc_feature (1)..(1062): Ceres Seq. ID no. 12723611
  misc_feature (1)..(1062): Ortholog of  Ceres SEQ ID NO 15225667 as cited in SEQ ID NO 50951
  misc_feature (1)..(1062): Ortholog of  Ceres SEQ ID NO 13594298 as cited in SEQ ID NO 57803
  misc_feature (1)..(1062): Ortholog of  Ceres SEQ ID NO 13503476 as cited in SEQ ID NO 61978
  misc_feature (1)..(1062): Ortholog of  Ceres SEQ ID NO 12578438 as cited in SEQ ID NO 62201
  misc_feature (1)..(1062): Ortholog of  Ceres SEQ ID NO 12617675 as cited in SEQ ID NO 64656
atcagaaaacaattagacaacaacaacaacaacgacaacagcaacaacagcaaaaaatggcggcttttgcgaccaaacagtctcccttgttgttggcgtctcttctgatcttgatcggcgtagccaccggaagtttctacgacagcttcgatatcacttggggagctggtcgtgctaatatatttgagagtggacaactcttgacttgcactctcgacaagacatccggttcaggttttcaatccaagaaagagtatttgttcggaaagatcgatatgaagataaaacttgttcccggaaattctgccggaaccgtcacagcttactacctttcttcaaaaggtgagacatgggatgagattgatttcgagttcttgggtaacgttactggacagccttatgttatccatacaaatgtctttaccggaggtaaaggtaaccgcgaaatgcagttctatctctggtttgatcccactgctgatttccacacttacaccgtgctttggaaccctctcaacatcatctttctggttgatggtatcccaatccgggtgttcaagaacaatgaggctaacggcgtggcttacccgaaaagccaaccaatgaagatctactcaagtctatgggaagctgatgattgggccacacaaggcgggaaagtcaagaccgattggaccaacgctccattcagcgcttcctacagaagctttaacgatgtggattgctgcagccggacctcgatatggaactgggttacgtgtaatgcgaatagcaactcgtggatgtggactacacttaattcaaatcagcttggacagctgaagtgggtgcaaaaagattatatgatctataactattgtacggatttcaagaggttccctcaaggtttacccactgaatgcaacctcaactgatcgtattacagagaaaattcaagcacgttgatatggtttctttccttctttcatttttttgtctcatatttgttgatttcatcattttgttatttttgagtttcaaagatttatttcccattttgggtaattgattatttgttttgcc

SEQ ID NO: 90355 - protein, 303 aa, Arabidopsis thaliana
  peptide (1)..(303): Ceres Seq. ID no. 12723612
QKTIRQQQQQRQQQQQQKMAAFATKQSPLLLASLLILIGVATGSFYDSFDITWGAGRANIFESGQLLTCTLDKTSGSGFQSKKEYLFGKIDMKIKLVPGNSAGTVTAYYLSSKGETWDEIDFEFLGNVTGQPYVIHTNVFTGGKGNREMQFYLWFDPTADFHTYTVLWNPLNIIFLVDGIPIRVFKNNEANGVAYPKSQPMKIYSSLWEADDWATQGGKVKTDWTNAPFSASYRSFNDVDCCSRTSIWNWVTCNANSNSWMWTTLNSNQLGQLKWVQKDYMIYNYCTDFKRFPQGLPTECNLN

SEQ ID NO: 90356 - protein, 285 aa, Arabidopsis thaliana
  peptide (1)..(285): Ceres Seq. ID no. 12723613
MAAFATKQSPLLLASLLILIGVATGSFYDSFDITWGAGRANIFESGQLLTCTLDKTSGSGFQSKKEYLFGKIDMKIKLVPGNSAGTVTAYYLSSKGETWDEIDFEFLGNVTGQPYVIHTNVFTGGKGNREMQFYLWFDPTADFHTYTVLWNPLNIIFLVDGIPIRVFKNNEANGVAYPKSQPMKIYSSLWEADDWATQGGKVKTDWTNAPFSASYRSFNDVDCCSRTSIWNWVTCNANSNSWMWTTLNSNQLGQLKWVQKDYMIYNYCTDFKRFPQGLPTECNLN

SEQ ID NO: 90357 - protein, 212 aa, Arabidopsis thaliana
  peptide (1)..(212): Ceres Seq. ID no. 12723614
MKIKLVPGNSAGTVTAYYLSSKGETWDEIDFEFLGNVTGQPYVIHTNVFTGGKGNREMQFYLWFDPTADFHTYTVLWNPLNIIFLVDGIPIRVFKNNEANGVAYPKSQPMKIYSSLWEADDWATQGGKVKTDWTNAPFSASYRSFNDVDCCSRTSIWNWVTCNANSNSWMWTTLNSNQLGQLKWVQKDYMIYNYCTDFKRFPQGLPTECNLN

SEQ ID NO: 90358 - DNA, 1059 bp, Arabidopsis thaliana
  misc_feature (1)..(1059): Ceres Seq. ID no. 12723619
  misc_feature (1)..(1059): Ortholog of  Ceres SEQ ID NO 14311671 as cited in SEQ ID NO 51251
  misc_feature (1)..(1059): Ortholog of  Ceres SEQ ID NO 14307355 as cited in SEQ ID NO 54610
  misc_feature (1)..(1059): Ortholog of  Ceres SEQ ID NO 13594298 as cited in SEQ ID NO 57803
  misc_feature (1)..(1059): Ortholog of  Ceres SEQ ID NO 14301894 as cited in SEQ ID NO 61677
  misc_feature (1)..(1059): Ortholog of  Ceres SEQ ID NO 13503476 as cited in SEQ ID NO 61978
  misc_feature (1)..(1059): Ortholog of  Ceres SEQ ID NO 12578438 as cited in SEQ ID NO 62201
  misc_feature (1)..(1059): Ortholog of  Ceres SEQ ID NO 12617675 as cited in SEQ ID NO 64656
gaatgatttcaattctctatcttattgacacataaacatggaccggtccactttcatcttatctctactcttcacactcactgtctcgactacgaccctcttctctccggttttcgcaggaacgttcgacacagaattcgatatcacttggggtgatggtcgtggcaaggttcttaacaacggagagcttctcactctctccctcgacagagcctccggctctggttttcaaaccaagaaagagtatttgttcgggaaaatcgacatgcagctcaaactcgtccctggaaactccgccggaaccgtcactgcctactacttgaagtcaaaaggtgatacgtgggacgaaatcgatttcgagtttcttggtaatctaactggtgatccgtataccatgcatacgaatgtgtatactcaaggcaaaggtgatagagaacaacaatttcatctctggttcgatccaaccgctgatttccacacttactctgttttatggaaccctcatcacatcgttttcatggttgatgatattccggtaagagaattcaagaatctacaacatatgggtatccagtatccaaaattgcagccgatgaggttatactcgagtctatggaacgcggaccagtgggctacaaggggaggtctcgttaagactgactggtccaaggcaccattcaccgcttcttacagaaactttagagcggatgcatgtgtttcctcgggcggaagatcatcttgtcctgccggttcacctagatggttctctcaaaggcttgatctaacagcggaagataagatgagagtggtgcagaggaagtacatgatctataactattgtacggacaccaaaaggtttcctcaaggatttccaaaggagtgtagacactagctacgagaattaatgtgtgatccgaaactccaaagctagtattgtataggttcgtctaaattatatatgtaatgtttatgtttatttaggttctgtaataagcaatttcccctgtttctatgtagatattctcataataaaatgggcgtgagttatgttggttcaat

SEQ ID NO: 90359 - protein, 284 aa, Arabidopsis thaliana
  peptide (1)..(284): Ceres Seq. ID no. 12723620
MDRSTFILSLLFTLTVSTTTLFSPVFAGTFDTEFDITWGDGRGKVLNNGELLTLSLDRASGSGFQTKKEYLFGKIDMQLKLVPGNSAGTVTAYYLKSKGDTWDEIDFEFLGNLTGDPYTMHTNVYTQGKGDREQQFHLWFDPTADFHTYSVLWNPHHIVFMVDDIPVREFKNLQHMGIQYPKLQPMRLYSSLWNADQWATRGGLVKTDWSKAPFTASYRNFRADACVSSGGRSSCPAGSPRWFSQRLDLTAEDKMRVVQRKYMIYNYCTDTKRFPQGFPKECRH

SEQ ID NO: 90360 - protein, 208 aa, Arabidopsis thaliana
  peptide (1)..(208): Ceres Seq. ID no. 12723621
MQLKLVPGNSAGTVTAYYLKSKGDTWDEIDFEFLGNLTGDPYTMHTNVYTQGKGDREQQFHLWFDPTADFHTYSVLWNPHHIVFMVDDIPVREFKNLQHMGIQYPKLQPMRLYSSLWNADQWATRGGLVKTDWSKAPFTASYRNFRADACVSSGGRSSCPAGSPRWFSQRLDLTAEDKMRVVQRKYMIYNYCTDTKRFPQGFPKECRH

SEQ ID NO: 90361 - protein, 165 aa, Arabidopsis thaliana
  peptide (1)..(165): Ceres Seq. ID no. 12723622
MHTNVYTQGKGDREQQFHLWFDPTADFHTYSVLWNPHHIVFMVDDIPVREFKNLQHMGIQYPKLQPMRLYSSLWNADQWATRGGLVKTDWSKAPFTASYRNFRADACVSSGGRSSCPAGSPRWFSQRLDLTAEDKMRVVQRKYMIYNYCTDTKRFPQGFPKECRH

SEQ ID NO: 90362 - DNA, 2388 bp, Arabidopsis thaliana
  misc_feature (1)..(2388): Ceres Seq. ID no. 12723627
  misc_feature (1)..(2388): Ortholog of  Ceres SEQ ID NO 15176298 as cited in SEQ ID NO 58961
aatgagtcgccacagttgaccgattaacccaaaactgcgacgactcaaaacaaagagatactatactatcatcaaaactccaattctctattcactactaatcattgttccaattcaacgccggtggcttttaatcggcgagacactctctgatttctcggtctccgattaactgatctaggttttttttggggaggagaatgcaaaggtagatgatggatagtggtaataataatatgaatagagccaagaggaatttggatgggaacgatgatgatcagcctgagcgaaaacgccctgcttttgctagtgtgattgttgaggctctgaaagtagatagtttgcagaagctttgctcctctttggaacctattctccgccgagttgtcagcgaggaactggaacgtgctttagcaaaactaggccctgctaggcttactggaagttcgggctcttctccaaagcgaattgaaggtccggatggtcggaagttacagttgcacttcaaatctaggttatctctcccgttattcactggggggaaagtagaaggagagcaaggtgctgtgattcatgttgtcttgattgatgcaaacactggccgtgctgtggtatatggtccagaggcttcggcaaagcttcacattgttgtgcttgagggtgactttaacactgaagatgatgaagactggacacaagaagaatttgaaagccatgttgtaaaagagcgttcaggaaagagaccgttgctgactggagaagtgtatgttacactcaaggaaggggttggaactttgggcgagctagttttcacggataattcgagttggattcgaagtcggaagttccgacttggtttacgggtggtttctgggtgttgtgatggcatgcgtatccgtgaggccaagacggaagcttttgttgttaaggatcacaggggcgaattgtacaagaagcattatccacctgctctgaatgatgatgtgtggagattggacaagatcggcaaggatggggcattccataaaaagcttactgctgaaggaataaacactgtagaagattttctgagagtaatggtcaaggattctccaaaattacgtactattcttggaagcggcatgtcaaacaaaatgtgggatgcactagtagagcacgcaaagacgtgtgtccagagcagcaagctttatatctactatgctgaggattcaaggaatgtcggtgttgtgttcaataatatctatgagctaagcggccttatttctggagatcaatacttctctgctgattcacttactgatagccaaaaggtatatgttgaggggctggtgaagaaagcatatgaaaactggaacctagtcatagagtatgatggaaaatctcttttagacttgaagcagccccagaggttgagtattactcacactaatctggaaaattactcgactgctgccattgaccatccaatgcagatggtggcagggcattcgtcttcaatgccgcctaaccagtctccagtgctttcagattttgctattggagggtatgatcaaactctggcaacaagatatcattcgcatccccagcttttaaactccaacccgcgagcacaatttgaggttgcttcatgcagtacatcgcaagaccagttcatgggaaatctacatcaaactcaaagcaccataaacaatcaacacatgaatggcctggctctcggtccttcacaatcatccacaagcggataccaaaacatcaacccttcttctgttcaccaggcagatctcaaccatttagaagactggtcaaacccccgtgagagaggaccagatgatttcttctcagaggaagagatccgactcagaagccatgaaatgctagagagtgaagacatgcaacagttcctccgcctattcagcatgggaggaggaggcaatggctctgcaacacacttgccagaagatggatatactttcccatcgtttctacacacgcctatgcaaggttatgatgaagaccgtggtcgatcaggcagagctgttgttggatggcttaagataaaagccgcaatgagatgggggttcttcatcaggaggaaagctgctgagaggcgagcacaaattgtagagcttgatgatgatgatgaagatggcgaatagtgtataaaaggaagtgtacagttagattcagtggatctgtggatgtgtgtgttttatgaagcaggagacttctaatatgcttgattgatgataactcatttagacagtagcattcttaagaactgattctacagtcttagatatgtgattcaacaagtagaatttctgtatggtccttttatttgatgatactcgagttactatctgtaaggcttttgttccacgaaacttt

SEQ ID NO: 90363 - protein, 647 aa, Arabidopsis thaliana
  peptide (1)..(647): Ceres Seq. ID no. 12723628
MMDSGNNNMNRAKRNLDGNDDDQPERKRPAFASVIVEALKVDSLQKLCSSLEPILRRVVSEELERALAKLGPARLTGSSGSSPKRIEGPDGRKLQLHFKSRLSLPLFTGGKVEGEQGAVIHVVLIDANTGRAVVYGPEASAKLHIVVLEGDFNTEDDEDWTQEEFESHVVKERSGKRPLLTGEVYVTLKEGVGTLGELVFTDNSSWIRSRKFRLGLRVVSGCCDGMRIREAKTEAFVVKDHRGELYKKHYPPALNDDVWRLDKIGKDGAFHKKLTAEGINTVEDFLRVMVKDSPKLRTILGSGMSNKMWDALVEHAKTCVQSSKLYIYYAEDSRNVGVVFNNIYELSGLISGDQYFSADSLTDSQKVYVEGLVKKAYENWNLVIEYDGKSLLDLKQPQRLSITHTNLENYSTAAIDHPMQMVAGHSSSMPPNQSPVLSDFAIGGYDQTLATRYHSHPQLLNSNPRAQFEVASCSTSQDQFMGNLHQTQSTINNQHMNGLALGPSQSSTSGYQNINPSSVHQADLNHLEDWSNPRERGPDDFFSEEEIRLRSHEMLESEDMQQFLRLFSMGGGGNGSATHLPEDGYTFPSFLHTPMQGYDEDRGRSGRAVVGWLKIKAAMRWGFFIRRKAAERRAQIVELDDDDEDGE

SEQ ID NO: 90364 - protein, 646 aa, Arabidopsis thaliana
  peptide (1)..(646): Ceres Seq. ID no. 12723629
MDSGNNNMNRAKRNLDGNDDDQPERKRPAFASVIVEALKVDSLQKLCSSLEPILRRVVSEELERALAKLGPARLTGSSGSSPKRIEGPDGRKLQLHFKSRLSLPLFTGGKVEGEQGAVIHVVLIDANTGRAVVYGPEASAKLHIVVLEGDFNTEDDEDWTQEEFESHVVKERSGKRPLLTGEVYVTLKEGVGTLGELVFTDNSSWIRSRKFRLGLRVVSGCCDGMRIREAKTEAFVVKDHRGELYKKHYPPALNDDVWRLDKIGKDGAFHKKLTAEGINTVEDFLRVMVKDSPKLRTILGSGMSNKMWDALVEHAKTCVQSSKLYIYYAEDSRNVGVVFNNIYELSGLISGDQYFSADSLTDSQKVYVEGLVKKAYENWNLVIEYDGKSLLDLKQPQRLSITHTNLENYSTAAIDHPMQMVAGHSSSMPPNQSPVLSDFAIGGYDQTLATRYHSHPQLLNSNPRAQFEVASCSTSQDQFMGNLHQTQSTINNQHMNGLALGPSQSSTSGYQNINPSSVHQADLNHLEDWSNPRERGPDDFFSEEEIRLRSHEMLESEDMQQFLRLFSMGGGGNGSATHLPEDGYTFPSFLHTPMQGYDEDRGRSGRAVVGWLKIKAAMRWGFFIRRKAAERRAQIVELDDDDEDGE

SEQ ID NO: 90365 - protein, 639 aa, Arabidopsis thaliana
  peptide (1)..(639): Ceres Seq. ID no. 12723630
MNRAKRNLDGNDDDQPERKRPAFASVIVEALKVDSLQKLCSSLEPILRRVVSEELERALAKLGPARLTGSSGSSPKRIEGPDGRKLQLHFKSRLSLPLFTGGKVEGEQGAVIHVVLIDANTGRAVVYGPEASAKLHIVVLEGDFNTEDDEDWTQEEFESHVVKERSGKRPLLTGEVYVTLKEGVGTLGELVFTDNSSWIRSRKFRLGLRVVSGCCDGMRIREAKTEAFVVKDHRGELYKKHYPPALNDDVWRLDKIGKDGAFHKKLTAEGINTVEDFLRVMVKDSPKLRTILGSGMSNKMWDALVEHAKTCVQSSKLYIYYAEDSRNVGVVFNNIYELSGLISGDQYFSADSLTDSQKVYVEGLVKKAYENWNLVIEYDGKSLLDLKQPQRLSITHTNLENYSTAAIDHPMQMVAGHSSSMPPNQSPVLSDFAIGGYDQTLATRYHSHPQLLNSNPRAQFEVASCSTSQDQFMGNLHQTQSTINNQHMNGLALGPSQSSTSGYQNINPSSVHQADLNHLEDWSNPRERGPDDFFSEEEIRLRSHEMLESEDMQQFLRLFSMGGGGNGSATHLPEDGYTFPSFLHTPMQGYDEDRGRSGRAVVGWLKIKAAMRWGFFIRRKAAERRAQIVELDDDDEDGE

SEQ ID NO: 90366 - DNA, 3165 bp, Arabidopsis thaliana
  misc_feature (1)..(3165): Ceres Seq. ID no. 12723631
  misc_feature (1)..(3165): Ortholog of  Ceres SEQ ID NO 13593889 as cited in SEQ ID NO 53305
  misc_feature (1)..(3165): Ortholog of  Ceres SEQ ID NO 13581959 as cited in SEQ ID NO 56156
atggattcaggttctgtgaactcatctgtcactagtctagtgtcgagtttgaacgatgagccgcatcgtgttaaattcctgtgtagcttcttagggagtatattgcctcgtcctcaggatgggaaattgaggtatgttggtggagagacgaggattgtgagtgtgaatagagatattaggtatgaggagttgatgagtaagatgagagagctttatgatggtgcagcagtgttgaagtatcagcagcctgatgaggatcttgatgctttggtctcggttgtgaatgatgatgatgtgacgaatatgatggaggagtatgataagttaggttcaggagatgggtttactaggcttaggatctttctgttttctactcctgagcaggatggttctttgcattatgtggagcgtgatgatcagagggaatctgagaggagatatgttgatgctcttaataatttgatcgaagggacagactttagaaagttgcagcagtatcctgattcacctcgtttcaatctcgttgatgatttttcgatggtggaaccgatgctgaatcagctgagcattgagactggtggtggtagccagaggggcaacgagatacctactgcgcagtatagtaatcttcaccagctcaggattcctcgtgtgggttcggggcagatgcttgcacagaggtatggtgaagtagaaggtacatggagtcctttctattctcctcggcaccatggacatcatgatcccagaacttttcaggaatttccatcttcgccttcttctgctcgttatcgaatgccatatggggaaattcctgataagggattggatagaatgcctgaggagtatgttaggccgcaagcaagtcaccatcctttttacgagcaccaggcacacattcctgacagtgtggtgtgggtcccagctggagcaatgccacctgagagtaaaggagggtttcctgggaatgttcttcacggtggtccaggtggctatgaaggtggtaatggatgcgagaactgtcgtgtaccgtatcataggaaccatcagcttttagagcaatctaatataggcaacaatggatttccaccggttcattgtgcacattgtccaccaaacagggaaagtttcctgcttaacacagacccaaagcctactcatcatggagcttatccaaatgagacttttggacctgatagaggatggatggttcaacaacaggtgaatcctaaccctccaaggattgaggaaggaaggtcacatatttctaatgttggaagaccgaacgatcattacactcccgattatcctgtgtcgaactatcctcttggtcaacgagctggacatgaaatttccaatgaagggtttcatgataaaccacttggtggcattcccctgaattcggccaaccgttctgctgaggaacgtgggtttcattatgggaataatctctatcctccaggacctgatagtatccactcagcaggtcatagccatatgcaccaccctcaaccaaatatttggcagaacgtttcaaatcctatagctggccctccaggcttgcccatgcaaattaatggcacagtcaatcagaccgttatcaggaatccgatagaaactgctcctaggtattctactggaatggagaatcaaggtgttttggttggttctccgcaaaggatttcaggctttgatggaatgtcctcccttggccagccttcctaccctaatccccatttgcaagatagagccttccctttagacccaaattgggtgccatctgaaaacccaactgtacataatgaacatctacaggtgcgtgagcctctgcctgggccattattacagacaaacctcactgctgcaccaatcatgcagacaccagttatgcagacatctgtggaaagcaagcttgctcagggaggtgaacaatttaactatgttaatactggtatttcaaacggtgttccttaccaagataagcctcaacccttagctggaggaaagaaagatatggggaacctggtagaagttaatccttctgctgctactcttgaaggggcagagctatcagttgagcgtttgagtttcttgcctgagttaatggaatctgtgaagagggcggcacttgaaggagctgctgaggttaaagctcatccagaagaggccaaagatcaagtgaggccggagttggtggaaaatgaatcagagcatatgaatgctcaagacgaacctgagatagattctgatagtgataacccaaacaatttcaagattgaacaaacaaaggctgaggctgaagctaaatccaggggactacagtctataagaaacgatgatttggaggaaatccgagagttaggccatggaacatatggatctgtttaccatggaaaatggaaaggctcagatgttgcaataaagagaataaaagccagctgctttgcaggcaaaccttcggaaagggaacgtttgatagaagatttttggaaagaagccctgttattgagctcattgcatcatccaaatgttgtgtcgttctatgggatagttcgtgatggtcctgatggttctctagcaactgtcgcggagttcatggttaacggatctttgaaacagttcttgcagaagaaggatagaactattgatcgtcgcaaaagactcatcatagccatggatactgcatttgggatggagtatttgcacggaaagaacattgttcatttcgatttgaagtgtgagaatcttcttgtgaacatgagagatcctcagcgtcctatatgcaagattggtgatttggggttatcgaaggtgaaacagaagactctagtatcaggaggtgttcgtgggactttgccatggatggcacctgagctcttgagtgggaaaagcaacatggtctctgaaaagatcgatgtttactcgtttgggattgtaatgtgggaactactcactggtgaagaaccatacgcagacatgcattgtgcttccataattggaggtatagtgaacaacgcattgcgtccaaaaatcccacagtggtgtgatccagagtggaagggattgatggaaagttgctggacgtctgagccaacagagagaccatcctttactgaaatatcacagaagctcaggacaatggctgctgctatgaatttgaaataa

SEQ ID NO: 90367 - protein, 1054 aa, Arabidopsis thaliana
  peptide (1)..(1054): Ceres Seq. ID no. 12723632
MDSGSVNSSVTSLVSSLNDEPHRVKFLCSFLGSILPRPQDGKLRYVGGETRIVSVNRDIRYEELMSKMRELYDGAAVLKYQQPDEDLDALVSVVNDDDVTNMMEEYDKLGSGDGFTRLRIFLFSTPEQDGSLHYVERDDQRESERRYVDALNNLIEGTDFRKLQQYPDSPRFNLVDDFSMVEPMLNQLSIETGGGSQRGNEIPTAQYSNLHQLRIPRVGSGQMLAQRYGEVEGTWSPFYSPRHHGHHDPRTFQEFPSSPSSARYRMPYGEIPDKGLDRMPEEYVRPQASHHPFYEHQAHIPDSVVWVPAGAMPPESKGGFPGNVLHGGPGGYEGGNGCENCRVPYHRNHQLLEQSNIGNNGFPPVHCAHCPPNRESFLLNTDPKPTHHGAYPNETFGPDRGWMVQQQVNPNPPRIEEGRSHISNVGRPNDHYTPDYPVSNYPLGQRAGHEISNEGFHDKPLGGIPLNSANRSAEERGFHYGNNLYPPGPDSIHSAGHSHMHHPQPNIWQNVSNPIAGPPGLPMQINGTVNQTVIRNPIETAPRYSTGMENQGVLVGSPQRISGFDGMSSLGQPSYPNPHLQDRAFPLDPNWVPSENPTVHNEHLQVREPLPGPLLQTNLTAAPIMQTPVMQTSVESKLAQGGEQFNYVNTGISNGVPYQDKPQPLAGGKKDMGNLVEVNPSAATLEGAELSVERLSFLPELMESVKRAALEGAAEVKAHPEEAKDQVRPELVENESEHMNAQDEPEIDSDSDNPNNFKIEQTKAEAEAKSRGLQSIRNDDLEEIRELGHGTYGSVYHGKWKGSDVAIKRIKASCFAGKPSERERLIEDFWKEALLLSSLHHPNVVSFYGIVRDGPDGSLATVAEFMVNGSLKQFLQKKDRTIDRRKRLIIAMDTAFGMEYLHGKNIVHFDLKCENLLVNMRDPQRPICKIGDLGLSKVKQKTLVSGGVRGTLPWMAPELLSGKSNMVSEKIDVYSFGIVMWELLTGEEPYADMHCASIIGGIVNNALRPKIPQWCDPEWKGLMESCWTSEPTERPSFTEISQKLRTMAAAMNLK

SEQ ID NO: 90368 - protein, 990 aa, Arabidopsis thaliana
  peptide (1)..(990): Ceres Seq. ID no. 12723633
MSKMRELYDGAAVLKYQQPDEDLDALVSVVNDDDVTNMMEEYDKLGSGDGFTRLRIFLFSTPEQDGSLHYVERDDQRESERRYVDALNNLIEGTDFRKLQQYPDSPRFNLVDDFSMVEPMLNQLSIETGGGSQRGNEIPTAQYSNLHQLRIPRVGSGQMLAQRYGEVEGTWSPFYSPRHHGHHDPRTFQEFPSSPSSARYRMPYGEIPDKGLDRMPEEYVRPQASHHPFYEHQAHIPDSVVWVPAGAMPPESKGGFPGNVLHGGPGGYEGGNGCENCRVPYHRNHQLLEQSNIGNNGFPPVHCAHCPPNRESFLLNTDPKPTHHGAYPNETFGPDRGWMVQQQVNPNPPRIEEGRSHISNVGRPNDHYTPDYPVSNYPLGQRAGHEISNEGFHDKPLGGIPLNSANRSAEERGFHYGNNLYPPGPDSIHSAGHSHMHHPQPNIWQNVSNPIAGPPGLPMQINGTVNQTVIRNPIETAPRYSTGMENQGVLVGSPQRISGFDGMSSLGQPSYPNPHLQDRAFPLDPNWVPSENPTVHNEHLQVREPLPGPLLQTNLTAAPIMQTPVMQTSVESKLAQGGEQFNYVNTGISNGVPYQDKPQPLAGGKKDMGNLVEVNPSAATLEGAELSVERLSFLPELMESVKRAALEGAAEVKAHPEEAKDQVRPELVENESEHMNAQDEPEIDSDSDNPNNFKIEQTKAEAEAKSRGLQSIRNDDLEEIRELGHGTYGSVYHGKWKGSDVAIKRIKASCFAGKPSERERLIEDFWKEALLLSSLHHPNVVSFYGIVRDGPDGSLATVAEFMVNGSLKQFLQKKDRTIDRRKRLIIAMDTAFGMEYLHGKNIVHFDLKCENLLVNMRDPQRPICKIGDLGLSKVKQKTLVSGGVRGTLPWMAPELLSGKSNMVSEKIDVYSFGIVMWELLTGEEPYADMHCASIIGGIVNNALRPKIPQWCDPEWKGLMESCWTSEPTERPSFTEISQKLRTMAAAMNLK

SEQ ID NO: 90369 - protein, 987 aa, Arabidopsis thaliana
  peptide (1)..(987): Ceres Seq. ID no. 12723634
MRELYDGAAVLKYQQPDEDLDALVSVVNDDDVTNMMEEYDKLGSGDGFTRLRIFLFSTPEQDGSLHYVERDDQRESERRYVDALNNLIEGTDFRKLQQYPDSPRFNLVDDFSMVEPMLNQLSIETGGGSQRGNEIPTAQYSNLHQLRIPRVGSGQMLAQRYGEVEGTWSPFYSPRHHGHHDPRTFQEFPSSPSSARYRMPYGEIPDKGLDRMPEEYVRPQASHHPFYEHQAHIPDSVVWVPAGAMPPESKGGFPGNVLHGGPGGYEGGNGCENCRVPYHRNHQLLEQSNIGNNGFPPVHCAHCPPNRESFLLNTDPKPTHHGAYPNETFGPDRGWMVQQQVNPNPPRIEEGRSHISNVGRPNDHYTPDYPVSNYPLGQRAGHEISNEGFHDKPLGGIPLNSANRSAEERGFHYGNNLYPPGPDSIHSAGHSHMHHPQPNIWQNVSNPIAGPPGLPMQINGTVNQTVIRNPIETAPRYSTGMENQGVLVGSPQRISGFDGMSSLGQPSYPNPHLQDRAFPLDPNWVPSENPTVHNEHLQVREPLPGPLLQTNLTAAPIMQTPVMQTSVESKLAQGGEQFNYVNTGISNGVPYQDKPQPLAGGKKDMGNLVEVNPSAATLEGAELSVERLSFLPELMESVKRAALEGAAEVKAHPEEAKDQVRPELVENESEHMNAQDEPEIDSDSDNPNNFKIEQTKAEAEAKSRGLQSIRNDDLEEIRELGHGTYGSVYHGKWKGSDVAIKRIKASCFAGKPSERERLIEDFWKEALLLSSLHHPNVVSFYGIVRDGPDGSLATVAEFMVNGSLKQFLQKKDRTIDRRKRLIIAMDTAFGMEYLHGKNIVHFDLKCENLLVNMRDPQRPICKIGDLGLSKVKQKTLVSGGVRGTLPWMAPELLSGKSNMVSEKIDVYSFGIVMWELLTGEEPYADMHCASIIGGIVNNALRPKIPQWCDPEWKGLMESCWTSEPTERPSFTEISQKLRTMAAAMNLK

SEQ ID NO: 90370 - DNA, 1179 bp, Arabidopsis thaliana
  misc_feature (1)..(1179): Ceres Seq. ID no. 12723635
  misc_feature (1)..(1179): Ortholog of  Ceres SEQ ID NO 14315223 as cited in SEQ ID NO 52527
  misc_feature (1)..(1179): Ortholog of  Ceres SEQ ID NO 14307085 as cited in SEQ ID NO 54749
atgggaagagctccatgctgcgacaaggcaaacgtgaagaaaggaccatggtcaccggaagaagatgtgaagctcaaggattacatcgacaaatatggcactggtggcaactggatcgcactgcctcagaaaattgggctgaagagatgtggtaagagttgcagactgagatggcttaattacttaagaccaaacatcaaacatggtggtttttctgaggaagaagatagaatcatcttgagtctctacattagcattggaagccggtggtccataattgcagctcagcttcctggaaggactgacaatgatatcaagaattattggaacacaaaactgaagaagaaacttctaggaagacagaaacaaatgaatcgtcaagactccataaccgattctactgagaacaacctcagcaacaataacaacaataagagtcctcagaatctgagcaattcggcactggagaggctccagcttcacatgcagcttcagaatctacagagccctttctctagtttctacaacaaccctatcttgtggcccaagcttcatccattgctccagagcactacaactaatcaaaaccctaagcttgcatctcaagaaagcttccaccctttaggagttaacgttgatcatcagcacaacaataccaagctagctcagataaacaatggagcctcttctctctattcggagaacgtagagcaatcccaaaaccctgctcatgaatttcaacctaatttcggtttttcacaggaccttcgattagataatcataacatggactttatgaacagaggggtttctaaagaactgtttcaagtgggcaacgagtttgagctaacgaacggttcgagttggtggtcagaggaagtggaactagagaggaaaacgacgtcgtcgagttcttgggggtcagcttctgtgcttgatcagacaactgagggaatggttatgcttcaagattacgctcagatgagctaccacagtgtttaataagttatatcatgcatatatataaatgcgtaactatagggatggataatggattattgatggaatatgtattttattacggtcataagcttatagcatgttgatggtgaaaggggctttttcataatttgttttaaaatgtaacgagttgtggataataatgtaaatcgttaattc

SEQ ID NO: 90371 - protein, 333 aa, Arabidopsis thaliana
  peptide (1)..(333): Ceres Seq. ID no. 12723636
MGRAPCCDKANVKKGPWSPEEDVKLKDYIDKYGTGGNWIALPQKIGLKRCGKSCRLRWLNYLRPNIKHGGFSEEEDRIILSLYISIGSRWSIIAAQLPGRTDNDIKNYWNTKLKKKLLGRQKQMNRQDSITDSTENNLSNNNNNKSPQNLSNSALERLQLHMQLQNLQSPFSSFYNNPILWPKLHPLLQSTTTNQNPKLASQESFHPLGVNVDHQHNNTKLAQINNGASSLYSENVEQSQNPAHEFQPNFGFSQDLRLDNHNMDFMNRGVSKELFQVGNEFELTNGSSWWSEEVELERKTTSSSSWGSASVLDQTTEGMVMLQDYAQMSYHSV

SEQ ID NO: 90372 - protein, 210 aa, Arabidopsis thaliana
  peptide (1)..(210): Ceres Seq. ID no. 12723637
MNRQDSITDSTENNLSNNNNNKSPQNLSNSALERLQLHMQLQNLQSPFSSFYNNPILWPKLHPLLQSTTTNQNPKLASQESFHPLGVNVDHQHNNTKLAQINNGASSLYSENVEQSQNPAHEFQPNFGFSQDLRLDNHNMDFMNRGVSKELFQVGNEFELTNGSSWWSEEVELERKTTSSSSWGSASVLDQTTEGMVMLQDYAQMSYHSV

SEQ ID NO: 90373 - protein, 172 aa, Arabidopsis thaliana
  peptide (1)..(172): Ceres Seq. ID no. 12723638
MQLQNLQSPFSSFYNNPILWPKLHPLLQSTTTNQNPKLASQESFHPLGVNVDHQHNNTKLAQINNGASSLYSENVEQSQNPAHEFQPNFGFSQDLRLDNHNMDFMNRGVSKELFQVGNEFELTNGSSWWSEEVELERKTTSSSSWGSASVLDQTTEGMVMLQDYAQMSYHSV

SEQ ID NO: 90374 - DNA, 1251 bp, Arabidopsis thaliana
  misc_feature (1)..(1251): Ceres Seq. ID no. 12723643
  misc_feature (1)..(1251): Ortholog of  Ceres SEQ ID NO 13657138 as cited in SEQ ID NO 65923
atgtttttcttagacataaatagtgagaagtattcaccacgtagtgtactaaacactttatcaagagattcacttagctcttcaggcgatgatgcttcaagcttcaatggttcaatggtctcttctagcttcgcttcgccttcagacaaaccgaagcataagtcaatctctccttacaaattcatatcttctcttatcatgaattctcctctgaggaaatggagaggaagtgagactaagaacaagcccaaacctcagcctctaattcaatgcttcacttacaacgagatttcaaaggccacaaatgattttcaccaagggaatatagtaggcataggaggctactctgaagtgtacagaggagatttatgggatggaagaagaatagcagtgaagagattagccaaggagagtggtgacatgaacaaggagaaagagtttcttacggaacttggcatcataagtcatgtctctcatcccaacactgctcttctcttaggttgttgtgttgagaaaggtctttatcttgtcttcagattctccgagaatggaaccttgtactctgcgctgcacgagaatgagaatgggtcgttagattggcctgtacggtacaaaattgcggttggagttgctcgagggcttcattatcttcacaaacgctgcaaccaccggatcattcaccgcgacattaaatcttccaatgttttacttggacctgattacgaaccgcagataactgattttggattggccaaatggttgcctaacaaatggactcaccatgcggttataccggttgaaggaacgtttggttatctagctccagagtccttaatgcaaggaaccatcgacgagaaaaccgacatctacgcattcggcattctccttctagagatcataactggtcgaagaccggttaatcccactcagaaacacattctcttatgggcaaagccggcgatggagacaggtaacacaagtgagttggttgatccgaaattgcaagataagtacgacgaccaacagatgaacaagctagtccttacagcttcacattgtgttcaacaatctccgatattacgaccaaccatgactcaggtattggagttgcttacaaatgggaacgaggctgagattgcaaagagctggagaatgcctaaggatatgactaatgacgatgatgataataatgaatgggatgattattctatgattttcggatatgatgttccttcagattcttctttttaa

SEQ ID NO: 90375 - protein, 416 aa, Arabidopsis thaliana
  peptide (1)..(416): Ceres Seq. ID no. 12723644
MFFLDINSEKYSPRSVLNTLSRDSLSSSGDDASSFNGSMVSSSFASPSDKPKHKSISPYKFISSLIMNSPLRKWRGSETKNKPKPQPLIQCFTYNEISKATNDFHQGNIVGIGGYSEVYRGDLWDGRRIAVKRLAKESGDMNKEKEFLTELGIISHVSHPNTALLLGCCVEKGLYLVFRFSENGTLYSALHENENGSLDWPVRYKIAVGVARGLHYLHKRCNHRIIHRDIKSSNVLLGPDYEPQITDFGLAKWLPNKWTHHAVIPVEGTFGYLAPESLMQGTIDEKTDIYAFGILLLEIITGRRPVNPTQKHILLWAKPAMETGNTSELVDPKLQDKYDDQQMNKLVLTASHCVQQSPILRPTMTQVLELLTNGNEAEIAKSWRMPKDMTNDDDDNNEWDDYSMIFGYDVPSDSSF

SEQ ID NO: 90376 - protein, 378 aa, Arabidopsis thaliana
  peptide (1)..(378): Ceres Seq. ID no. 12723645
MVSSSFASPSDKPKHKSISPYKFISSLIMNSPLRKWRGSETKNKPKPQPLIQCFTYNEISKATNDFHQGNIVGIGGYSEVYRGDLWDGRRIAVKRLAKESGDMNKEKEFLTELGIISHVSHPNTALLLGCCVEKGLYLVFRFSENGTLYSALHENENGSLDWPVRYKIAVGVARGLHYLHKRCNHRIIHRDIKSSNVLLGPDYEPQITDFGLAKWLPNKWTHHAVIPVEGTFGYLAPESLMQGTIDEKTDIYAFGILLLEIITGRRPVNPTQKHILLWAKPAMETGNTSELVDPKLQDKYDDQQMNKLVLTASHCVQQSPILRPTMTQVLELLTNGNEAEIAKSWRMPKDMTNDDDDNNEWDDYSMIFGYDVPSDSSF

SEQ ID NO: 90377 - protein, 350 aa, Arabidopsis thaliana
  peptide (1)..(350): Ceres Seq. ID no. 12723646
MNSPLRKWRGSETKNKPKPQPLIQCFTYNEISKATNDFHQGNIVGIGGYSEVYRGDLWDGRRIAVKRLAKESGDMNKEKEFLTELGIISHVSHPNTALLLGCCVEKGLYLVFRFSENGTLYSALHENENGSLDWPVRYKIAVGVARGLHYLHKRCNHRIIHRDIKSSNVLLGPDYEPQITDFGLAKWLPNKWTHHAVIPVEGTFGYLAPESLMQGTIDEKTDIYAFGILLLEIITGRRPVNPTQKHILLWAKPAMETGNTSELVDPKLQDKYDDQQMNKLVLTASHCVQQSPILRPTMTQVLELLTNGNEAEIAKSWRMPKDMTNDDDDNNEWDDYSMIFGYDVPSDSSF

SEQ ID NO: 90378 - DNA, 1499 bp, Arabidopsis thaliana
  misc_feature (1)..(1499): Ceres Seq. ID no. 12723660
  misc_feature (1)..(1499): Ortholog of  Ceres SEQ ID NO 14308389 as cited in SEQ ID NO 55226
  misc_feature (1)..(1499): Ortholog of  Ceres SEQ ID NO 13597162 as cited in SEQ ID NO 63955
  misc_feature (1)..(1499): Ortholog of  Ceres SEQ ID NO 14313567 as cited in SEQ ID NO 68074
attgccttttagtgatcgtggatcaaatgaagattcgggtgaagcaagctacgatcgtgaagccagctgaagaaacacccacacacaatctatggctttccaatttagacttgattcaagtgagacttcacatgggcactctctacttctacaaaccttgttcctcctccgatcgtcccaacactcaatccctcatcgaagctctgagcaaggttcttgtcttcttttatcctgccgctgggagactccaaaagaatacgaatgggaggttagaggttcaatgtaatggagaaggagttttgtttgtagaggctgaaagtgattctactgttcaagacattggcttactcactcaaagtttggatctttctcaacttgtacctaccgttgactatgcaggagatatctcctcctatcctcttcttctctttcaggttacttatttcaaatgtggaacgatctgtgttggaagttcaatacaccatacattcggagaagctacttctcttgggtatatcatggaagcatggtctctaactgctaggggacttttagttaagctaacaccgttcttagaccgcactgttcttcatgcacgtaaccctccctcctctgtttttccgcacactgagtaccaatcacccccatttcacaatcatccgatgaaatccctggcttacagatcaaatccggaatctgattctgctattgccactctcaagctcacacgtctccaactgaaagctcttaaagctagggcagagattgctgatagtaagttcagtacatatgaagttctggtggcgcatacctggcgttgtgcttcttttgcaaatgaagacttaagtgaagaacattcgacgaggttgcatataataattgatgggaggccgagactacaaccaaagcttccgcaaggatacattgggaacactctctttcacgctcgaccggtatcaccgttgggtgctttccacagagagagtttcagtgaaacagtggagagagttcatagagaaataaggaaaatggacaacgagtacttgagatcagcgattgactacttggagagacatcctgatctcgaccaattagttcctggtgaaggtaatacaatcttcagctgcgcagcaaacttctgcatcgtcagtctaatcaaacagaccgcgtacgaaatggatttcggatggggaaaagcttactacaagagagcttcacatttaaatgaagggaagggatttgtaactgggaacccagacgaagaagggagcatgatgctaaccatgtgcttgaagaagactcagcttagtaagtttcgaaagctattttatgagtttctcaatgtctccgcactgtgagacaatcagaagccttattttttacttttcacaagtcccacatcgttaacttaaaattgtactagcatttggccctgctatgcagggacaacattgttttaaattatatctgctacaactcttaactaagatttttaaaat

SEQ ID NO: 90379 - protein, 451 aa, Arabidopsis thaliana
  peptide (1)..(451): Ceres Seq. ID no. 12723661
CLLVIVDQMKIRVKQATIVKPAEETPTHNLWLSNLDLIQVRLHMGTLYFYKPCSSSDRPNTQSLIEALSKVLVFFYPAAGRLQKNTNGRLEVQCNGEGVLFVEAESDSTVQDIGLLTQSLDLSQLVPTVDYAGDISSYPLLLFQVTYFKCGTICVGSSIHHTFGEATSLGYIMEAWSLTARGLLVKLTPFLDRTVLHARNPPSSVFPHTEYQSPPFHNHPMKSLAYRSNPESDSAIATLKLTRLQLKALKARAEIADSKFSTYEVLVAHTWRCASFANEDLSEEHSTRLHIIIDGRPRLQPKLPQGYIGNTLFHARPVSPLGAFHRESFSETVERVHREIRKMDNEYLRSAIDYLERHPDLDQLVPGEGNTIFSCAANFCIVSLIKQTAYEMDFGWGKAYYKRASHLNEGKGFVTGNPDEEGSMMLTMCLKKTQLSKFRKLFYEFLNVSAL

SEQ ID NO: 90380 - protein, 443 aa, Arabidopsis thaliana
  peptide (1)..(443): Ceres Seq. ID no. 12723662
MKIRVKQATIVKPAEETPTHNLWLSNLDLIQVRLHMGTLYFYKPCSSSDRPNTQSLIEALSKVLVFFYPAAGRLQKNTNGRLEVQCNGEGVLFVEAESDSTVQDIGLLTQSLDLSQLVPTVDYAGDISSYPLLLFQVTYFKCGTICVGSSIHHTFGEATSLGYIMEAWSLTARGLLVKLTPFLDRTVLHARNPPSSVFPHTEYQSPPFHNHPMKSLAYRSNPESDSAIATLKLTRLQLKALKARAEIADSKFSTYEVLVAHTWRCASFANEDLSEEHSTRLHIIIDGRPRLQPKLPQGYIGNTLFHARPVSPLGAFHRESFSETVERVHREIRKMDNEYLRSAIDYLERHPDLDQLVPGEGNTIFSCAANFCIVSLIKQTAYEMDFGWGKAYYKRASHLNEGKGFVTGNPDEEGSMMLTMCLKKTQLSKFRKLFYEFLNVSAL

SEQ ID NO: 90381 - protein, 408 aa, Arabidopsis thaliana
  peptide (1)..(408): Ceres Seq. ID no. 12723663
MGTLYFYKPCSSSDRPNTQSLIEALSKVLVFFYPAAGRLQKNTNGRLEVQCNGEGVLFVEAESDSTVQDIGLLTQSLDLSQLVPTVDYAGDISSYPLLLFQVTYFKCGTICVGSSIHHTFGEATSLGYIMEAWSLTARGLLVKLTPFLDRTVLHARNPPSSVFPHTEYQSPPFHNHPMKSLAYRSNPESDSAIATLKLTRLQLKALKARAEIADSKFSTYEVLVAHTWRCASFANEDLSEEHSTRLHIIIDGRPRLQPKLPQGYIGNTLFHARPVSPLGAFHRESFSETVERVHREIRKMDNEYLRSAIDYLERHPDLDQLVPGEGNTIFSCAANFCIVSLIKQTAYEMDFGWGKAYYKRASHLNEGKGFVTGNPDEEGSMMLTMCLKKTQLSKFRKLFYEFLNVSAL

SEQ ID NO: 90382 - DNA, 1341 bp, Arabidopsis thaliana
  misc_feature (1)..(1341): Ceres Seq. ID no. 12723664
  misc_feature (1)..(1341): Ortholog of  Ceres SEQ ID NO 14307464 as cited in SEQ ID NO 59636
atgatctctctctctctattcttttgagtcccaaaccccatggcaggtttgtcgctggagtttacagttaacacttggaatctcaggtctctctctcaagttccatgtcctttaagacatggctttcgattcccgcgtcggttgacacgaagaagaacgattctcatgtgttctgattcaagctctcagtcgtggaatgttcctgttttatctagctatgaggttggtgagaggctaaaactagcaagaggaggacaacagttcttggccatgtactcaagtgttgttgatggaattacaaccgatccagcagcgatggttcttccattggatgatcacatggttcaccgtggtcatggagtctttgacactgccctgatcatcaatggatacctttatgaattggatcagcaccttgaccgtatcttgcgatctgcatcaatggctaagatcccacttccattcgatcgagaaactattaaaagaattctcattcaaaccgtgagcgtttctggatgtagagatggatctctaagatactggctctctgcagggccaggggatttcctcctatctccatctcaatgtctcaaaccaactctctatgccattgttataaaaacgaacttcgccattaacccaataggtgtcaaggtagtgacctcgtccatccccataaagcctccagagtttgccacggtgaaaagtgttaactacctccctaacgtactctcacaaatggaagctgaggccaaaggagcttatgcaggtatttgggtgtgtaaagatgggtttattgcagaaggcccgaacatgaatgtggcgtttgttgttaatggtggtaaggagcttgtgatgccgcggtttgataacgttttgagcggatgtacagcaaagagaacacttacactcgctgaacagcttgtaagcaaggggattcttaaaactgtgaaagtaatggatgtgacagtcgaagatggaaagaaagcagatgagatgatgcttattggtagtggaattccgatcagacctgtgattcaatgggatgaagaatttattggtgaaggaaaagaaggtcctatagcaaaggcgcttcttgatctgttacttgaagatatgagatctggtccaccttccgttcgtgttcttgttccttactgagccaatcactctctttgttcatcaaagacaataagctgtggcttttttgtaaagctttgctgttattgtaagttgagtttatcatggggtttttaggtatctgtctttgtaaagatttctctttatcacttttgaattatgattgtacccattctcaacaattcatggagtggttgcgtc

SEQ ID NO: 90383 - protein, 373 aa, Arabidopsis thaliana
  peptide (1)..(373): Ceres Seq. ID no. 12723665
MAGLSLEFTVNTWNLRSLSQVPCPLRHGFRFPRRLTRRRTILMCSDSSSQSWNVPVLSSYEVGERLKLARGGQQFLAMYSSVVDGITTDPAAMVLPLDDHMVHRGHGVFDTALIINGYLYELDQHLDRILRSASMAKIPLPFDRETIKRILIQTVSVSGCRDGSLRYWLSAGPGDFLLSPSQCLKPTLYAIVIKTNFAINPIGVKVVTSSIPIKPPEFATVKSVNYLPNVLSQMEAEAKGAYAGIWVCKDGFIAEGPNMNVAFVVNGGKELVMPRFDNVLSGCTAKRTLTLAEQLVSKGILKTVKVMDVTVEDGKKADEMMLIGSGIPIRPVIQWDEEFIGEGKEGPIAKALLDLLLEDMRSGPPSVRVLVPY

SEQ ID NO: 90384 - protein, 331 aa, Arabidopsis thaliana
  peptide (1)..(331): Ceres Seq. ID no. 12723666
MCSDSSSQSWNVPVLSSYEVGERLKLARGGQQFLAMYSSVVDGITTDPAAMVLPLDDHMVHRGHGVFDTALIINGYLYELDQHLDRILRSASMAKIPLPFDRETIKRILIQTVSVSGCRDGSLRYWLSAGPGDFLLSPSQCLKPTLYAIVIKTNFAINPIGVKVVTSSIPIKPPEFATVKSVNYLPNVLSQMEAEAKGAYAGIWVCKDGFIAEGPNMNVAFVVNGGKELVMPRFDNVLSGCTAKRTLTLAEQLVSKGILKTVKVMDVTVEDGKKADEMMLIGSGIPIRPVIQWDEEFIGEGKEGPIAKALLDLLLEDMRSGPPSVRVLVPY

SEQ ID NO: 90385 - protein, 296 aa, Arabidopsis thaliana
  peptide (1)..(296): Ceres Seq. ID no. 12723667
MYSSVVDGITTDPAAMVLPLDDHMVHRGHGVFDTALIINGYLYELDQHLDRILRSASMAKIPLPFDRETIKRILIQTVSVSGCRDGSLRYWLSAGPGDFLLSPSQCLKPTLYAIVIKTNFAINPIGVKVVTSSIPIKPPEFATVKSVNYLPNVLSQMEAEAKGAYAGIWVCKDGFIAEGPNMNVAFVVNGGKELVMPRFDNVLSGCTAKRTLTLAEQLVSKGILKTVKVMDVTVEDGKKADEMMLIGSGIPIRPVIQWDEEFIGEGKEGPIAKALLDLLLEDMRSGPPSVRVLVPY

SEQ ID NO: 90386 - DNA, 1398 bp, Arabidopsis thaliana
  misc_feature (1)..(1398): Ceres Seq. ID no. 12723702
  misc_feature (1)..(1398): Ortholog of  Ceres SEQ ID NO 13596816 as cited in SEQ ID NO 62287
atggctcgtcggctgtttctcctcctcctcgccgtcacggcagggttgagcttgacgggaacaaccgtcagagcagttggcataaattgggggacagaagcgtcgcaccctcttccgccttcaaaggttgtagagcttctgaaatcaaacggcattgtcaaagtgaagctcttcgatgccgacccaaaagttctccgagctctctctggttctaatattggtgtcactatcggaatccaaaattcgatgctcaagagcttgaatgcatccgtaaaggtagcagagagctgggtacatgacaatgtcactcgttacttcaacgttggagaagagccatttctccagagctatggcaatcagtataagccttttgtgattggggcagctatgaatatccaaaatgctttagttaaggcgaacttggcaaatgaagtgaaggttgtagtcccctcaagctttgattcctttctttctgaatctggtcgaccttcttcaggacactttagggctgacctcaacaagacgatgattgaactcctctcctttctcacaaagcaccactctcctttttttgtgacaatctctcctttcctaagctttcaccagaacaagaacatctcccttgactttagcctctttaaagaaacagcaaaggctcacaaagacggacgtaaaacctacagaaacagctttgatctaagctatgacacacttgtctctgcattgttcacaattgggttttcggaggtggatatcgttgtgtcaaagatcggttggcctacagatggagcagaaaatgcaacatcactgactgctgaggcgttctttaaaggactgatagttcacttggagaaaaagacggcctctctcccgcgtcctcctgttgaaacctacattgaaagtctcttggacgaagatcagagaaacttatctgctgggaactttgagaggcactggggagtgttcactttcgacggtcaagccaaatacaatttcagtttcaaccataagaatcaggtaaacgcgcagaatgttcagtaccttcctcctaagtggtgtgtggtgaacaataacaaggacttgtcaaacgcgtcagcaagagcattagaagcgtgtgctgttgcggactgtacatcgatacttcctggcgggtcgtgttcaggcatcagatggccaggcaacgtttcatacgcgttcaatagcttgtaccagcaaaatgatcacagtgcagaaagctgcaactttggtggacttggtttgatcactactgttgatccttctgaggataattgccggttctcgattcaacttgacacttctcattcatcttcgcaaactccaaatttctttcagagctggcctctcctcttattgttcctactgtccggactcttttaa

SEQ ID NO: 90387 - protein, 465 aa, Arabidopsis thaliana
  peptide (1)..(465): Ceres Seq. ID no. 12723703
MARRLFLLLLAVTAGLSLTGTTVRAVGINWGTEASHPLPPSKVVELLKSNGIVKVKLFDADPKVLRALSGSNIGVTIGIQNSMLKSLNASVKVAESWVHDNVTRYFNVGEEPFLQSYGNQYKPFVIGAAMNIQNALVKANLANEVKVVVPSSFDSFLSESGRPSSGHFRADLNKTMIELLSFLTKHHSPFFVTISPFLSFHQNKNISLDFSLFKETAKAHKDGRKTYRNSFDLSYDTLVSALFTIGFSEVDIVVSKIGWPTDGAENATSLTAEAFFKGLIVHLEKKTASLPRPPVETYIESLLDEDQRNLSAGNFERHWGVFTFDGQAKYNFSFNHKNQVNAQNVQYLPPKWCVVNNNKDLSNASARALEACAVADCTSILPGGSCSGIRWPGNVSYAFNSLYQQNDHSAESCNFGGLGLITTVDPSEDNCRFSIQLDTSHSSSQTPNFFQSWPLLLLFLLSGLF

SEQ ID NO: 90388 - protein, 383 aa, Arabidopsis thaliana
  peptide (1)..(383): Ceres Seq. ID no. 12723704
MLKSLNASVKVAESWVHDNVTRYFNVGEEPFLQSYGNQYKPFVIGAAMNIQNALVKANLANEVKVVVPSSFDSFLSESGRPSSGHFRADLNKTMIELLSFLTKHHSPFFVTISPFLSFHQNKNISLDFSLFKETAKAHKDGRKTYRNSFDLSYDTLVSALFTIGFSEVDIVVSKIGWPTDGAENATSLTAEAFFKGLIVHLEKKTASLPRPPVETYIESLLDEDQRNLSAGNFERHWGVFTFDGQAKYNFSFNHKNQVNAQNVQYLPPKWCVVNNNKDLSNASARALEACAVADCTSILPGGSCSGIRWPGNVSYAFNSLYQQNDHSAESCNFGGLGLITTVDPSEDNCRFSIQLDTSHSSSQTPNFFQSWPLLLLFLLSGLF

SEQ ID NO: 90389 - protein, 336 aa, Arabidopsis thaliana
  peptide (1)..(336): Ceres Seq. ID no. 12723705
MNIQNALVKANLANEVKVVVPSSFDSFLSESGRPSSGHFRADLNKTMIELLSFLTKHHSPFFVTISPFLSFHQNKNISLDFSLFKETAKAHKDGRKTYRNSFDLSYDTLVSALFTIGFSEVDIVVSKIGWPTDGAENATSLTAEAFFKGLIVHLEKKTASLPRPPVETYIESLLDEDQRNLSAGNFERHWGVFTFDGQAKYNFSFNHKNQVNAQNVQYLPPKWCVVNNNKDLSNASARALEACAVADCTSILPGGSCSGIRWPGNVSYAFNSLYQQNDHSAESCNFGGLGLITTVDPSEDNCRFSIQLDTSHSSSQTPNFFQSWPLLLLFLLSGLF

SEQ ID NO: 90390 - DNA, 3157 bp, Arabidopsis thaliana
  misc_feature (1)..(3157): Ceres Seq. ID no. 12723709
  misc_feature (1)..(3157): Ortholog of  Ceres SEQ ID NO 14305417 as cited in SEQ ID NO 0
aactttaccatcatcgtcgttgttctttcccgaagcggatctcttcgtctgtgtgatcggaggatctgcaagagttccttacccatacaaactcagagagagactgagagatattcgttacgcaatttattatggcttctgtaagcaaatcgaatcatctcgaagaagatgatgatgctgaagaagaggtgcaacatttcgatgatttcactctagcttcttcctgggaaaggttcatctcagacattgaagcaacttgtcgtcaatggttagctgatggtcccaaaaacctggtggaaaagggtgctgttgcagtggaggattcaaagaatctgtttacggtcaaacacgaacttaagaatgttgcaaagagctattgtatggagttctactttcaaattgataataatggtagccaacaagctggaattggtaattggaacagtaattcacatgatctccagctttgctttggggtgaaggattttctgttgattgctccacaaagtgccagtggggtgcttcttgatacaccagagtctagcaagcttctgagtgcggttgctattgctttgtctaactgtggcagcttgtggccagcctttgtccctgtgcatgacccttcacgcaaagcatatattggaatccagaatatgggcactgtttttactagaagatttgaagcagatcgtgttggcagccaagttcccgtgaaactcatgcacctggaagggctatatgagttgtttgtttctaagtttgtttattcaggagtggacttctcgatgcatactttcagagtccattttatgatgaggctaacataccaaaccttcccatatgacgaggaggatgaggaaattgatacggatgaggttatgggtgacaaatcagacactgcagaacactatggttctgagtcacgcaataaggtgctctgggatgatgactgtccttggagtgagtggtactctgctgaagatccactaagaggattcgaattggtggtcacatgggctgacaggactgtagaaagcacacttgagatggctgaacttgaaaatgcctcaccccatgatgctgagaagtggattttacacccaatcctctcgccatatctgggtgatccttcacatggcaaaagaattgattttgcttcccaactactttgcttggttgaagcattggattcgtctttctcagctcagtttatggaggattttgtgtcagtggaaaatccaagctccgaaaatttaaagacctcagtggtcatccctcctccgtcagttcttgatcgggtgattaaagatctctttcgtgaggggtctaaactcccagattttacaaaaggcgaacacaggctttctcgagctcttaaggctgcaccgcttgaatctctttttacacaattctgtttgcactcactgtggtttggcaattgcaatatccgtgccattgcctttctctggatagagtttgtccgtgaagttcgatggtgttgggaagagacacagccgttgccgaaaatgccaattgacggttctattgatttgtccagttgtttgatcaaccaaaagttacacttgcttgcaatttgcatcgaaaaaaaacgtgaaatgaatgaagagttcctagactgtataggaagtgatgacagttcagacgcttctgtttctatggaggaacaccacaaggtcgacaagagaagaaatacatcctcggaagaagaactgcggaggaaacgtgacagctcaattgcagaagatacatctaagcaactcagatttgagcggaaaactgaacgcacaaattctgtgaaccaaagcccaacagatgccatcaggagaggttcagctggaccagtggggacgatgatgctcctgaagtcacgtcagcaactccatgccccatttacccaggacccacctcttatgactgaagacatgcatgaagaaagactccaggctgttgaggcgtttggtgattcccttaacgttcctggccaattggagaaagacatcttattatctgacatgtcagcattcaaagcggcaaacccagatgcagtgtttgaggactttatcagatggcattcacctggagattgggagagctttgaacctaaaaccactgaaccatcagcaggccccagcaccgaaggctcgaaagatgaatggcctcctcgtggccgcctttctcaacggatgtctgatcaaggaaacttgtggagaaaaagttggaatgatgcacccgctttgccagccgatgaccaaaagcctctcctagacccgaaccgagagggagagaagattgttcattacctggaaacagtacggcctcatcagcttcttgagcaaatggtctgcacagccttcagaggatcagctgacactcttaaccagacaaacgtcggtaacatgagacaaatgacctctaaattggagcaactctacctcatcatgaaatttactttgggggctctacaacgaaacaatcttccggataaagcaaagaccgtcaaagacctgaaacgtctctgcatggtctttgaaaacgtggagaagttggtagcggttgcggcatctattcacagaaagttcctggacgcatcacgccttgctcaagtaatattcagcgacttctatggcgtttatgctccaacaatgggaatgagcgcaaatgatgaagagaacaaaagcaggacggagatggaagtaagtagacaggaagtgagtttaagagaaagacaagtggtgtcgaatctgttctcgcctccatcggctaaccagtcttggagaaaagtgctcagtatgggaaatcttctaaacggacacgaacctattctcagggagatcattttctccaccggagacgatgtcaacaacggaatccattacgcggcagctgctgatgtggcggccacaagtgaccggaagggagaagaaatcgagacacaccgaatgtatgtgtctggaacatctaacgatctccgggttgggctctctgttacttcctgcgattgattttttttttttcattttaatttaaccatacgatacaacacatttgttctgtaatagaaaattagcaaatgaagttctgcttgaacaaatttctaagcgtaaatttttgcattaatagacaacgattgatttgc

SEQ ID NO: 90391 - protein, 963 aa, Arabidopsis thaliana
  peptide (1)..(963): Ceres Seq. ID no. 12723710
MASVSKSNHLEEDDDAEEEVQHFDDFTLASSWERFISDIEATCRQWLADGPKNLVEKGAVAVEDSKNLFTVKHELKNVAKSYCMEFYFQIDNNGSQQAGIGNWNSNSHDLQLCFGVKDFLLIAPQSASGVLLDTPESSKLLSAVAIALSNCGSLWPAFVPVHDPSRKAYIGIQNMGTVFTRRFEADRVGSQVPVKLMHLEGLYELFVSKFVYSGVDFSMHTFRVHFMMRLTYQTFPYDEEDEEIDTDEVMGDKSDTAEHYGSESRNKVLWDDDCPWSEWYSAEDPLRGFELVVTWADRTVESTLEMAELENASPHDAEKWILHPILSPYLGDPSHGKRIDFASQLLCLVEALDSSFSAQFMEDFVSVENPSSENLKTSVVIPPPSVLDRVIKDLFREGSKLPDFTKGEHRLSRALKAAPLESLFTQFCLHSLWFGNCNIRAIAFLWIEFVREVRWCWEETQPLPKMPIDGSIDLSSCLINQKLHLLAICIEKKREMNEEFLDCIGSDDSSDASVSMEEHHKVDKRRNTSSEEELRRKRDSSIAEDTSKQLRFERKTERTNSVNQSPTDAIRRGSAGPVGTMMLLKSRQQLHAPFTQDPPLMTEDMHEERLQAVEAFGDSLNVPGQLEKDILLSDMSAFKAANPDAVFEDFIRWHSPGDWESFEPKTTEPSAGPSTEGSKDEWPPRGRLSQRMSDQGNLWRKSWNDAPALPADDQKPLLDPNREGEKIVHYLETVRPHQLLEQMVCTAFRGSADTLNQTNVGNMRQMTSKLEQLYLIMKFTLGALQRNNLPDKAKTVKDLKRLCMVFENVEKLVAVAASIHRKFLDASRLAQVIFSDFYGVYAPTMGMSANDEENKSRTEMEVSRQEVSLRERQVVSNLFSPPSANQSWRKVLSMGNLLNGHEPILREIIFSTGDDVNNGIHYAAAADVAATSDRKGEEIETHRMYVSGTSNDLRVGLSVTSCD

SEQ ID NO: 90392 - protein, 880 aa, Arabidopsis thaliana
  peptide (1)..(880): Ceres Seq. ID no. 12723711
MEFYFQIDNNGSQQAGIGNWNSNSHDLQLCFGVKDFLLIAPQSASGVLLDTPESSKLLSAVAIALSNCGSLWPAFVPVHDPSRKAYIGIQNMGTVFTRRFEADRVGSQVPVKLMHLEGLYELFVSKFVYSGVDFSMHTFRVHFMMRLTYQTFPYDEEDEEIDTDEVMGDKSDTAEHYGSESRNKVLWDDDCPWSEWYSAEDPLRGFELVVTWADRTVESTLEMAELENASPHDAEKWILHPILSPYLGDPSHGKRIDFASQLLCLVEALDSSFSAQFMEDFVSVENPSSENLKTSVVIPPPSVLDRVIKDLFREGSKLPDFTKGEHRLSRALKAAPLESLFTQFCLHSLWFGNCNIRAIAFLWIEFVREVRWCWEETQPLPKMPIDGSIDLSSCLINQKLHLLAICIEKKREMNEEFLDCIGSDDSSDASVSMEEHHKVDKRRNTSSEEELRRKRDSSIAEDTSKQLRFERKTERTNSVNQSPTDAIRRGSAGPVGTMMLLKSRQQLHAPFTQDPPLMTEDMHEERLQAVEAFGDSLNVPGQLEKDILLSDMSAFKAANPDAVFEDFIRWHSPGDWESFEPKTTEPSAGPSTEGSKDEWPPRGRLSQRMSDQGNLWRKSWNDAPALPADDQKPLLDPNREGEKIVHYLETVRPHQLLEQMVCTAFRGSADTLNQTNVGNMRQMTSKLEQLYLIMKFTLGALQRNNLPDKAKTVKDLKRLCMVFENVEKLVAVAASIHRKFLDASRLAQVIFSDFYGVYAPTMGMSANDEENKSRTEMEVSRQEVSLRERQVVSNLFSPPSANQSWRKVLSMGNLLNGHEPILREIIFSTGDDVNNGIHYAAAADVAATSDRKGEEIETHRMYVSGTSNDLRVGLSVTSCD

SEQ ID NO: 90393 - protein, 789 aa, Arabidopsis thaliana
  peptide (1)..(789): Ceres Seq. ID no. 12723712
MGTVFTRRFEADRVGSQVPVKLMHLEGLYELFVSKFVYSGVDFSMHTFRVHFMMRLTYQTFPYDEEDEEIDTDEVMGDKSDTAEHYGSESRNKVLWDDDCPWSEWYSAEDPLRGFELVVTWADRTVESTLEMAELENASPHDAEKWILHPILSPYLGDPSHGKRIDFASQLLCLVEALDSSFSAQFMEDFVSVENPSSENLKTSVVIPPPSVLDRVIKDLFREGSKLPDFTKGEHRLSRALKAAPLESLFTQFCLHSLWFGNCNIRAIAFLWIEFVREVRWCWEETQPLPKMPIDGSIDLSSCLINQKLHLLAICIEKKREMNEEFLDCIGSDDSSDASVSMEEHHKVDKRRNTSSEEELRRKRDSSIAEDTSKQLRFERKTERTNSVNQSPTDAIRRGSAGPVGTMMLLKSRQQLHAPFTQDPPLMTEDMHEERLQAVEAFGDSLNVPGQLEKDILLSDMSAFKAANPDAVFEDFIRWHSPGDWESFEPKTTEPSAGPSTEGSKDEWPPRGRLSQRMSDQGNLWRKSWNDAPALPADDQKPLLDPNREGEKIVHYLETVRPHQLLEQMVCTAFRGSADTLNQTNVGNMRQMTSKLEQLYLIMKFTLGALQRNNLPDKAKTVKDLKRLCMVFENVEKLVAVAASIHRKFLDASRLAQVIFSDFYGVYAPTMGMSANDEENKSRTEMEVSRQEVSLRERQVVSNLFSPPSANQSWRKVLSMGNLLNGHEPILREIIFSTGDDVNNGIHYAAAADVAATSDRKGEEIETHRMYVSGTSNDLRVGLSVTSCD

SEQ ID NO: 90394 - DNA, 2497 bp, Arabidopsis thaliana
  misc_feature (1)..(2497): Ceres Seq. ID no. 12723720
  misc_feature (1)..(2497): Ortholog of  Ceres SEQ ID NO 13582297 as cited in SEQ ID NO 56486
  misc_feature (1)..(2497): Ortholog of  Ceres SEQ ID NO 13586936 as cited in SEQ ID NO 0
attttgaccttaagaagaaagtgacaaggagaggaagaagaagaaaaaaaacataatttgaggaagaagaaaaaaaattcggatttgttttttcaataaattgactaattgagtactcgtttaaaggaagtgaagagcggttttttggtagtggtggtcgagaaaagagagagtttgtctctgtgactcagagtgaaatcaatagagcgggaaaagattgttgcttttttttgccatgggagttgatgagctgtctcacctcaaattctctcttctgctagaatcatcagcctgcaatgatttgtccggttttaagtctctagttgaagaagaaggtcttgagagcattgatggctctggtttgtggtatgggaggagattaggatcaaagaagatgggttttgaggagaggacgcctcttatgattgctgccttgtttggaagcaaagaggttgttgattacatcattagtactggtcttgttgacgtgaaccgctcttgtggctctgatggtgccacggctcttcactgtgcggtctctggcttgtctgccaatagccttgagattgttactcttctgctgaagggctctgcgaatccggattcttgtgatgcttatggtaacaagcctggagatgtgattttcccttgtttgagtccggtttttagcgcgaggatgaaggttttggagcgtttgttgaaaggaaatgatgatttgaatgaagttaatgggcaagaagaaagcgagccagaggttgaggttgaggttgaggtttcgcctcctcgggggtctgagaggaaggagtatccggttgatccaacgcttcctgatatcaagaacggtgtatatgggacggatgagttccggatgtatgctttcaagatcaagccgtgctctagagcatactctcacgactggacggaatgtccctttgttcatccgggtgagaacgcaaggaggcgtgatccgaggaagtaccattatagttgtgtcccttgtcctgaattccggaaggggtcttgttccagaggtgatacttgcgagtatgctcatggtatctttgagtgctggcttcacccggctcagtaccggactcgtctctgcaaggacgagacgaattgctcgagaagagtttgtttctttgcccacaaacccgaggagctgcgtcctttgtacccttcaactggatcaggtgttccgtccccgcggtcttccttctcatcttgcaattcctcgaccgctttcgacatgggaccgattagtccgcttcctatcggagcaacaaccacacctcctttgagtcctaacggtgtatcctctccaataggtggaggaaaaacgtggatgaactggcctaacataacccctcctgcattgcagcttccagggagcagattgaaatctgcattgaatgcaagagaaatcgatttctctgaagagatgcaaagtcttacttctccaactacatggaacaacacgccaatgtcatctccattctccggaaagggcatgaacaggcttgcaggaggagcaatgagcccggtgaatagtctcagtgatatgtttgggacagaggataatacatcgggtttgcagatccgacgcagcgtcattaacccgcagctgcattccaacagtctttcttcatcacctgtgggagccaattctctgttttcgatggattcctccgcagtcttggcttcaagagcggctgaatttgctaaacagcgaagccaaagcttcatagaacgcaacaacggactgaatcaccatcccgcaatctcttccatgactacaacttgtttaaacgattggggctcattggatgggaagcttgactggagcgtccaaggagacgagctacagaagctcagaaaatccacttctttccgtctcagagccggtggcatggaatcaagactgcctaacgaagggactgggctcgaagagccagatgtctcatgggtggagccgctggtgaaagagccacaggagacaagactagctccggtttggatggagcaatcatacatggagacagaacagaccgtggcttgaatcaaaagttttgaactttcattaaccgttccacaagaagcaaagtcagaaagattccgagaggtcgatgctaatctatttcattttatttgtttaatgctttgttatttttctttagaataaaaagaaaaaattcttaggggacaaaagagagttcgtttgtctctctctctgtctccaaagaaaaacagaggtgaaaaaaggtttcaaaacctaagaaaccttgaattacctcacctcacttccttgattctttactattcacaatgagtaatcgatttttttttttcttggtaacactctcacgctgaatatatatgttttttagtaataatataattggaatacagaaatgtatttacacttgtgaagttagggaaagtgttgtaattgtttcttctaagagttgatctaagatgtttgagactatatcttcgc

SEQ ID NO: 90395 - protein, 607 aa, Arabidopsis thaliana
  peptide (1)..(607): Ceres Seq. ID no. 12723721
MGVDELSHLKFSLLLESSACNDLSGFKSLVEEEGLESIDGSGLWYGRRLGSKKMGFEERTPLMIAALFGSKEVVDYIISTGLVDVNRSCGSDGATALHCAVSGLSANSLEIVTLLLKGSANPDSCDAYGNKPGDVIFPCLSPVFSARMKVLERLLKGNDDLNEVNGQEESEPEVEVEVEVSPPRGSERKEYPVDPTLPDIKNGVYGTDEFRMYAFKIKPCSRAYSHDWTECPFVHPGENARRRDPRKYHYSCVPCPEFRKGSCSRGDTCEYAHGIFECWLHPAQYRTRLCKDETNCSRRVCFFAHKPEELRPLYPSTGSGVPSPRSSFSSCNSSTAFDMGPISPLPIGATTTPPLSPNGVSSPIGGGKTWMNWPNITPPALQLPGSRLKSALNAREIDFSEEMQSLTSPTTWNNTPMSSPFSGKGMNRLAGGAMSPVNSLSDMFGTEDNTSGLQIRRSVINPQLHSNSLSSSPVGANSLFSMDSSAVLASRAAEFAKQRSQSFIERNNGLNHHPAISSMTTTCLNDWGSLDGKLDWSVQGDELQKLRKSTSFRLRAGGMESRLPNEGTGLEEPDVSWVEPLVKEPQETRLAPVWMEQSYMETEQTVA

SEQ ID NO: 90396 - protein, 554 aa, Arabidopsis thaliana
  peptide (1)..(554): Ceres Seq. ID no. 12723722
MGFEERTPLMIAALFGSKEVVDYIISTGLVDVNRSCGSDGATALHCAVSGLSANSLEIVTLLLKGSANPDSCDAYGNKPGDVIFPCLSPVFSARMKVLERLLKGNDDLNEVNGQEESEPEVEVEVEVSPPRGSERKEYPVDPTLPDIKNGVYGTDEFRMYAFKIKPCSRAYSHDWTECPFVHPGENARRRDPRKYHYSCVPCPEFRKGSCSRGDTCEYAHGIFECWLHPAQYRTRLCKDETNCSRRVCFFAHKPEELRPLYPSTGSGVPSPRSSFSSCNSSTAFDMGPISPLPIGATTTPPLSPNGVSSPIGGGKTWMNWPNITPPALQLPGSRLKSALNAREIDFSEEMQSLTSPTTWNNTPMSSPFSGKGMNRLAGGAMSPVNSLSDMFGTEDNTSGLQIRRSVINPQLHSNSLSSSPVGANSLFSMDSSAVLASRAAEFAKQRSQSFIERNNGLNHHPAISSMTTTCLNDWGSLDGKLDWSVQGDELQKLRKSTSFRLRAGGMESRLPNEGTGLEEPDVSWVEPLVKEPQETRLAPVWMEQSYMETEQTVA

SEQ ID NO: 90397 - protein, 545 aa, Arabidopsis thaliana
  peptide (1)..(545): Ceres Seq. ID no. 12723723
MIAALFGSKEVVDYIISTGLVDVNRSCGSDGATALHCAVSGLSANSLEIVTLLLKGSANPDSCDAYGNKPGDVIFPCLSPVFSARMKVLERLLKGNDDLNEVNGQEESEPEVEVEVEVSPPRGSERKEYPVDPTLPDIKNGVYGTDEFRMYAFKIKPCSRAYSHDWTECPFVHPGENARRRDPRKYHYSCVPCPEFRKGSCSRGDTCEYAHGIFECWLHPAQYRTRLCKDETNCSRRVCFFAHKPEELRPLYPSTGSGVPSPRSSFSSCNSSTAFDMGPISPLPIGATTTPPLSPNGVSSPIGGGKTWMNWPNITPPALQLPGSRLKSALNAREIDFSEEMQSLTSPTTWNNTPMSSPFSGKGMNRLAGGAMSPVNSLSDMFGTEDNTSGLQIRRSVINPQLHSNSLSSSPVGANSLFSMDSSAVLASRAAEFAKQRSQSFIERNNGLNHHPAISSMTTTCLNDWGSLDGKLDWSVQGDELQKLRKSTSFRLRAGGMESRLPNEGTGLEEPDVSWVEPLVKEPQETRLAPVWMEQSYMETEQTVA

SEQ ID NO: 90398 - DNA, 1487 bp, Arabidopsis thaliana
  misc_feature (1)..(1487): Ceres Seq. ID no. 12723756
  misc_feature (1)..(1487): Ortholog of  Ceres SEQ ID NO 15169415 as cited in SEQ ID NO 59010
  misc_feature (1)..(1487): Ortholog of  Ceres SEQ ID NO 13656546 as cited in SEQ ID NO 65729
ccgtcttcaccgtttccttccacgcctccgccggcaagctagttttctgactggagttccatcgtggacgccgtaatccctctttttcgtactggtaaattcttttcaatagattatctttgtgatttatatatcaagtctacaatctaaatcggagacgagattcggaaacctcactatcgattccaaacttcaattcagattatcttcctaaaaatgaagattcttacactcgtaatgcttttatgctactcgttcgtctcttctaccggagatacgactatccacacaaacaattgggctgttttggtctgcacttctcgcttctggtttaactaccggcacatggccaatactctgtccctctataggacagtcaagagacttggaataccagatgagaggatcattcttatgctggctgatgatatggcctgtaatgctagaaatgaatatcctgctcaagttttcaacaatgaaaaccacaaacttaacctctatggagataacgttgaggtagattatcgtggatatgaggtaacagttgaaaatttcttacgggttttgactgggcgtcatgagaatgctgttccaaggtcaaagcgtctcctcagtgatgagggtagccatatactactgtacatgactgggcatggaggtgatgaatttttgaagtttcaagatgcagaagaactccagagtcacgatttagcagatgctgtaaaacaaatgaaagagaagcgtagattcaaggagctgatgataatggttgatacttgccaagctgccactctctttaatcagcttcaatctcctggtgttttggctattggtagcagtctaaaaggagagaactcatattcccatcacctggattcagatattggtgtatctgttgtagatcggtttacatattacactcttgcattctttgagaggctcaatatatatgacaatgcatcacttaacagtttatttaggtcctacgatccgagactgctaatgtctactgcctactaccggactgatctttaccaaccacatctggtggaggtaccggtcacaaatttcttcggttcagttatggagaccattcatactgattcagcttacaaagctttctcaagtaaaatctccgaaagaaagatcaattctgagatgccattcaatcaactttccgaacacgatcttaaagaagagcttgagaatacaaacataccaaacgatgagttgatagctgagaagcaaaaatgcccatattcacaaatgcgggcagacctccacgagaaagtggagaagcttgaaaatgtcgatacagtggttaacctcagcatagcagtgatggtactcgctgtaatggtctcatcatctttactacgatgaagaactgatataatcatctgcacttcacttaatctatgtagtctgattcactgttgcagcttcacacccattttgtaattttttgcacaatgctataaaaaaaa

SEQ ID NO: 90399 - protein, 388 aa, Arabidopsis thaliana
  peptide (1)..(388): Ceres Seq. ID no. 12723757
MKILTLVMLLCYSFVSSTGDTTIHTNNWAVLVCTSRFWFNYRHMANTLSLYRTVKRLGIPDERIILMLADDMACNARNEYPAQVFNNENHKLNLYGDNVEVDYRGYEVTVENFLRVLTGRHENAVPRSKRLLSDEGSHILLYMTGHGGDEFLKFQDAEELQSHDLADAVKQMKEKRRFKELMIMVDTCQAATLFNQLQSPGVLAIGSSLKGENSYSHHLDSDIGVSVVDRFTYYTLAFFERLNIYDNASLNSLFRSYDPRLLMSTAYYRTDLYQPHLVEVPVTNFFGSVMETIHTDSAYKAFSSKISERKINSEMPFNQLSEHDLKEELENTNIPNDELIAEKQKCPYSQMRADLHEKVEKLENVDTVVNLSIAVMVLAVMVSSSLLR

SEQ ID NO: 90400 - protein, 381 aa, Arabidopsis thaliana
  peptide (1)..(381): Ceres Seq. ID no. 12723758
MLLCYSFVSSTGDTTIHTNNWAVLVCTSRFWFNYRHMANTLSLYRTVKRLGIPDERIILMLADDMACNARNEYPAQVFNNENHKLNLYGDNVEVDYRGYEVTVENFLRVLTGRHENAVPRSKRLLSDEGSHILLYMTGHGGDEFLKFQDAEELQSHDLADAVKQMKEKRRFKELMIMVDTCQAATLFNQLQSPGVLAIGSSLKGENSYSHHLDSDIGVSVVDRFTYYTLAFFERLNIYDNASLNSLFRSYDPRLLMSTAYYRTDLYQPHLVEVPVTNFFGSVMETIHTDSAYKAFSSKISERKINSEMPFNQLSEHDLKEELENTNIPNDELIAEKQKCPYSQMRADLHEKVEKLENVDTVVNLSIAVMVLAVMVSSSLLR

SEQ ID NO: 90401 - protein, 345 aa, Arabidopsis thaliana
  peptide (1)..(345): Ceres Seq. ID no. 12723759
MANTLSLYRTVKRLGIPDERIILMLADDMACNARNEYPAQVFNNENHKLNLYGDNVEVDYRGYEVTVENFLRVLTGRHENAVPRSKRLLSDEGSHILLYMTGHGGDEFLKFQDAEELQSHDLADAVKQMKEKRRFKELMIMVDTCQAATLFNQLQSPGVLAIGSSLKGENSYSHHLDSDIGVSVVDRFTYYTLAFFERLNIYDNASLNSLFRSYDPRLLMSTAYYRTDLYQPHLVEVPVTNFFGSVMETIHTDSAYKAFSSKISERKINSEMPFNQLSEHDLKEELENTNIPNDELIAEKQKCPYSQMRADLHEKVEKLENVDTVVNLSIAVMVLAVMVSSSLLR

SEQ ID NO: 90402 - DNA, 1240 bp, Arabidopsis thaliana
  misc_feature (1)..(1240): Ceres Seq. ID no. 12723764
  misc_feature (1)..(1240): Ortholog of  Ceres SEQ ID NO 13597407 as cited in SEQ ID NO 64106
ctcagacaatgtggatctcagatgtttgctgtatttttggttggctcgctgtagcgtttgcacatgatattataatgcttaatactggacgactcttcttggggtttggggttggtctcattagttatgtggttcctgtgtatatagcagaaattacacccaaaacatttcgtggaggattttcttattccaatcagcttctacaatgtcttgggatttcactcatgttcttcaccggaaactttttccattggcgaacattagctcttttaagtgcaatcccaagtgctttccaagtgatatgtttattttttattcctgaatctcctagatggctggcgatgtatggtcaagatcaagagcttgaagtttcgttgaaaaaactaaggggagaaaatagtgatattctaaaggaagctgctgaaatcagagaaacagtggaaatatccagaaaagagtctcaaagtggaataagagacttgttccatatcggaaacgcacattcgttaatcattggattgggtttaatgctcttgcaacaattttgtgggagtgcggcgataagtgcttatgctgctcgaattttcgacaaagccggttttccaagcgacataggaacaaccatcctcgcagtgattctgataccgcaatctatagttgtcatgttaaccgttgaccgatggggacgccgaccacttcttatgatttcttctatcggaatgtgcatatgctcattttttattggcctttcatactaccttcagaagaatggtgaatttcagaagttatgttccgttatgttaatcgtcggtttagtgggttatgtctcatcctttggcattggcctaggtggattaccatgggttataatgtctgagatatttccggtgaatgtgaaaatcaccgccggtagccttgtaacgatgtcaaattggttttttaattggattatcatctatagttttaatttcatgatacagtggagcgcttccggaacatatttcatattttctggagtttctctggtgacgatcgtattcatatggacattggtgcctgagacgaaaggccgaacactcgaagagattcaaacatcattagtccgactttcgtaaaatctaagtatggattatacgtaatgttaagtctcttgaatagtctttttaaccgtatattaatgtttggttaaataagcgttttctctcactttgattaaatagtaataatggctatgatttta

SEQ ID NO: 90403 - protein, 370 aa, Arabidopsis thaliana
  peptide (1)..(370): Ceres Seq. ID no. 12723765
QTMWISDVCCIFGWLAVAFAHDIIMLNTGRLFLGFGVGLISYVVPVYIAEITPKTFRGGFSYSNQLLQCLGISLMFFTGNFFHWRTLALLSAIPSAFQVICLFFIPESPRWLAMYGQDQELEVSLKKLRGENSDILKEAAEIRETVEISRKESQSGIRDLFHIGNAHSLIIGLGLMLLQQFCGSAAISAYAARIFDKAGFPSDIGTTILAVILIPQSIVVMLTVDRWGRRPLLMISSIGMCICSFFIGLSYYLQKNGEFQKLCSVMLIVGLVGYVSSFGIGLGGLPWVIMSEIFPVNVKITAGSLVTMSNWFFNWIIIYSFNFMIQWSASGTYFIFSGVSLVTIVFIWTLVPETKGRTLEEIQTSLVRLS

SEQ ID NO: 90404 - protein, 368 aa, Arabidopsis thaliana
  peptide (1)..(368): Ceres Seq. ID no. 12723766
MWISDVCCIFGWLAVAFAHDIIMLNTGRLFLGFGVGLISYVVPVYIAEITPKTFRGGFSYSNQLLQCLGISLMFFTGNFFHWRTLALLSAIPSAFQVICLFFIPESPRWLAMYGQDQELEVSLKKLRGENSDILKEAAEIRETVEISRKESQSGIRDLFHIGNAHSLIIGLGLMLLQQFCGSAAISAYAARIFDKAGFPSDIGTTILAVILIPQSIVVMLTVDRWGRRPLLMISSIGMCICSFFIGLSYYLQKNGEFQKLCSVMLIVGLVGYVSSFGIGLGGLPWVIMSEIFPVNVKITAGSLVTMSNWFFNWIIIYSFNFMIQWSASGTYFIFSGVSLVTIVFIWTLVPETKGRTLEEIQTSLVRLS

SEQ ID NO: 90405 - protein, 346 aa, Arabidopsis thaliana
  peptide (1)..(346): Ceres Seq. ID no. 12723767
MLNTGRLFLGFGVGLISYVVPVYIAEITPKTFRGGFSYSNQLLQCLGISLMFFTGNFFHWRTLALLSAIPSAFQVICLFFIPESPRWLAMYGQDQELEVSLKKLRGENSDILKEAAEIRETVEISRKESQSGIRDLFHIGNAHSLIIGLGLMLLQQFCGSAAISAYAARIFDKAGFPSDIGTTILAVILIPQSIVVMLTVDRWGRRPLLMISSIGMCICSFFIGLSYYLQKNGEFQKLCSVMLIVGLVGYVSSFGIGLGGLPWVIMSEIFPVNVKITAGSLVTMSNWFFNWIIIYSFNFMIQWSASGTYFIFSGVSLVTIVFIWTLVPETKGRTLEEIQTSLVRLS

SEQ ID NO: 90406 - DNA, 1532 bp, Arabidopsis thaliana
  misc_feature (1)..(1532): Ceres Seq. ID no. 12723776
  misc_feature (1)..(1532): Ortholog of  Ceres SEQ ID NO 12617197 as cited in SEQ ID NO 63406
  misc_feature (1)..(1532): Ortholog of  Ceres SEQ ID NO 13597804 as cited in SEQ ID NO 64182
  misc_feature (1)..(1532): Ortholog of  Ceres SEQ ID NO 13598565 as cited in SEQ ID NO 65250
  misc_feature (1)..(1532): Ortholog of  Ceres SEQ ID NO 13598597 as cited in SEQ ID NO 65496
  misc_feature (1)..(1532): Ortholog of  Ceres SEQ ID NO 13596284 as cited in SEQ ID NO 68273
gaagcctaccaaccacatgcacactaattctactcgccaaataaagtgaaaagagatggctgatggaggaaaggtggtctgcgtaaccggagcttccggttacatagcgtcttggatcgtcaagcttttgctcttccgtggctacaccatcaatgccaccgttcgagacccaagtttgaattccttcttctctctttcttttttcctcctgatttctccttagtaatatcgaagacaatccctctttgtcactcacttgaataatcaaagttatctagatgctttttagagatacaagtgacaattcagagaaaattaagaatattagctaagcaaatccaactatccaagagaaagtattttgtaggtacttggtacgattaagagttggttctatggccaaaaaagtatgtttttggtttcattctctaaaaggaagtatacattaacaaacgaaaattcaaatgaactcacatgtagtggatatagatggggtgaaactttggtcgatgtttagagccaaaaactaaataagcatttatgttatcttgaagtgcactttgacatatatgtgtttttctccagaagatcgaaagaaaacagatcaccttctagcacttgacggcgcaaaagaaagactcaaattattcaaagcagatcttctagatgaaggttcttttgagctcgcaattgatggatgcgagactgtcttccacactgcttcaccggttgcaatcactgtcaagactgatcctcaggttgagctgatcaatccagccgtcaatggtactattaacgtcctaagaacttgcactaaagtgtcttctgtcaagagggtcatcttaacatcgtccatggccgcagttcttgcgcctgagaccaagttgggaccaaacgatgtagtagacgaaaccttcttcactaatccaagttttgctgaggagagaaagcaatggtatgtactttctaagactttggccgaagatgcagcatggcgatttgccaaggacaatgagatcgacttgatcgtactgaatccgggacttgtgactggaccaatcttgcagccaactcttaatttctcggtagctgtgattgtggaacttatgaaaggcaagaatccttttaatactacacatcataggttcgtggacgtgagagatgttgctctagctcatgtaaaggcactcgagactccttcagccaatggcagatatatcattgatggtccggttgtgacaataaaagacattgaaaacgttttgcgcgaattctttcctgatttgtgtattgctgataggaatgaagacattactgagctgaattcagtgactttcaatgtgtgtctggataaagtgaaaagtttgggaataattgagttcactcctacagaaacaagccttagagacactgttcttagtctcaaggagaaatgtcttgtgtgatcttctttattgtttttggttacttgttattccttgcaggtctatatacatttcacaaattataattaagtcttacatgttatttaa

SEQ ID NO: 90407 - protein, 291 aa, Arabidopsis thaliana
  peptide (1)..(291): Ceres Seq. ID no. 12723777
MCFSPEDRKKTDHLLALDGAKERLKLFKADLLDEGSFELAIDGCETVFHTASPVAITVKTDPQVELINPAVNGTINVLRTCTKVSSVKRVILTSSMAAVLAPETKLGPNDVVDETFFTNPSFAEERKQWYVLSKTLAEDAAWRFAKDNEIDLIVLNPGLVTGPILQPTLNFSVAVIVELMKGKNPFNTTHHRFVDVRDVALAHVKALETPSANGRYIIDGPVVTIKDIENVLREFFPDLCIADRNEDITELNSVTFNVCLDKVKSLGIIEFTPTETSLRDTVLSLKEKCLV

SEQ ID NO: 90408 - protein, 196 aa, Arabidopsis thaliana; identical to SEQ ID NO: 81331
  peptide (1)..(196): Ceres Seq. ID no. 12723778

SEQ ID NO: 90409 - DNA, 1410 bp, Arabidopsis thaliana
  misc_feature (1)..(1410): Ceres Seq. ID no. 12723783
  misc_feature (1)..(1410): Ortholog of  Ceres SEQ ID NO 15176919 as cited in SEQ ID NO 54698
  misc_feature (1)..(1410): Ortholog of  Ceres SEQ ID NO 14302702 as cited in SEQ ID NO 57154
  misc_feature (1)..(1410): Ortholog of  Ceres SEQ ID NO 15179344 as cited in SEQ ID NO 0
gaaccaccatacacacttcaatttcaaataagagcttttcttcagttgttgctcagagacttaaccaatcaaccatggcgaagatgatgatgttgcaacagcatcagccttctttctctctccttacttcttctctgtctgacttcaatggcgctaagctccatttacaagtccagtacaagaggaaggttcatcagccaaaaggagcactctatgtttcagcgtcgagcgaaaagaagattctgataatgggtggtactcgattcattggtctgttcttgtccaggatccttgtcaaagagggacatcaggttacattgttcacaaggggtaaatctcctattgccaaacaattgcccggtgaatctgaccaagactttgctgatttctcttctaagattcttcacttgaaaggagacagaaaggactatgactttgtgaagtcaagtctttcagcagaaggcttcgatgttgtttatgatatcaacgggagggaggccgaagaagttgagcccatactagaagcactacccaaactagagcagtacatctactgttcttcagctggtgtttatctgaaatctgatatcttgccacattgtgaggaggatgcagttgatccgaagagcaggcacaaggggaagctggagactgagagcttactgcaatcaaaaggtgtaaactggacttctatacgtcctgtctacatctacggtccattgaattacaaccccgtcgaagaatggtttttccaccgtctaaaggcaggtcgcccaatcccggttccaaactctgggatacagatctcacaactcggtcacgttaaggacttggcaacagcctttctcaacgtgcttggtaacgagaaagccagcagagagatattcaacatctcgggggagaaatatgttacctttgatgggttagcaaaagcttgcgcaaaggccggtgggtttccggagccagagattgttcattacaacccgaaagagttcgactttgggaagaagaaggcattccctttccgtgatcagcatttctttgcatcggtggagaaagcaaagcatgtcctcggatggaaaccggagttcgacttagtggagggtctcactgactcatacaaccttgatttcggtcgcggaacattccggaaagaagcggatttcaccactgacgacatgattctgagcaagaaacttgttcttcaataatcgaaatcctaagagttgctcattcttggcttgtatgattctgatcacccggttctcttaaagttctgaactttattgtcatctcacgtatgttatggtccggattttgttcgacttttctctaaagaagtcaagctagggacgatgaagaaaccgagaaagtaagtacacgagaaagagacggtctggctcttgactt

SEQ ID NO: 90410 - protein, 402 aa, Arabidopsis thaliana
  peptide (1)..(402): Ceres Seq. ID no. 12723784
TTIHTSISNKSFSSVVAQRLNQSTMAKMMMLQQHQPSFSLLTSSLSDFNGAKLHLQVQYKRKVHQPKGALYVSASSEKKILIMGGTRFIGLFLSRILVKEGHQVTLFTRGKSPIAKQLPGESDQDFADFSSKILHLKGDRKDYDFVKSSLSAEGFDVVYDINGREAEEVEPILEALPKLEQYIYCSSAGVYLKSDILPHCEEDAVDPKSRHKGKLETESLLQSKGVNWTSIRPVYIYGPLNYNPVEEWFFHRLKAGRPIPVPNSGIQISQLGHVKDLATAFLNVLGNEKASREIFNISGEKYVTFDGLAKACAKAGGFPEPEIVHYNPKEFDFGKKKAFPFRDQHFFASVEKAKHVLGWKPEFDLVEGLTDSYNLDFGRGTFRKEADFTTDDMILSKKLVLQ

SEQ ID NO: 90411 - protein, 378 aa, Arabidopsis thaliana; identical to SEQ ID NO: 23756
  peptide (1)..(378): Ceres Seq. ID no. 12723785

SEQ ID NO: 90412 - protein, 375 aa, Arabidopsis thaliana; identical to SEQ ID NO: 23757
  peptide (1)..(375): Ceres Seq. ID no. 12723786

SEQ ID NO: 90413 - DNA, 1229 bp, Arabidopsis thaliana
  misc_feature (1)..(1229): Ceres Seq. ID no. 12723798
  misc_feature (1)..(1229): Ortholog of  Ceres SEQ ID NO 15177091 as cited in SEQ ID NO 52140
  misc_feature (1)..(1229): Ortholog of  Ceres SEQ ID NO 13597324 as cited in SEQ ID NO 64842
  misc_feature (1)..(1229): Ortholog of  Ceres SEQ ID NO 13658672 as cited in SEQ ID NO 66627
gtctcctttccagaacaatctaacgctttctcgaacatcttcttcttcttctttctcgaaattatttttccagtaatcaatttcttctcttctagatttttacaggaactaattttctgctctgaggtatcagatgagtagccgatggaatcgtacgatctacgttgggaatttgcctggagatattcgcaagtgtgaggttgaagatctcttctacaagtatggaccaattgtggacattgatttgaagattccaccgagacctcctggttatgcctttgtcgagtttgaagatcctcgtgatgcagacgatgcaatttatggacgtgatggttatgattttgatgggtgtcgacttcgggttgagattgcacatggtggtcgtagattttcaccatcagttgataggtacagcagcagctacagtgcgagccgtgcaccttcaagacgctctgactaccgcgtgcttgtgaccggattaccgccttctgcttcgtggcaggaccttaaggatcacatgcgcaaagctggagatgtctgcttctctgaagttttccctgaccgtaaaggcatgtctggggttgtggattatagcaactatgatgatatgaagtacgcaataaggaaacttgatgccactgaatttcgaaatgctttctctagtgcttatatacgggtgagggaatatgagtcgaggagtgtgagtcgaagcccagatgattctaaaagctatagaagcaggagtcggagccgtggtccaagctgtagctatagtagcaagagcaggagtgtgtcacctgctagatccatttccccgcgttcacggccccttagtcgttctcgctcgctatacagctctgtctcaaggtcccaatcaagatcaaaatcaagatcaagatcaagatcgaattctccagtttcacctgtgatatctggttgaaaatgaaaactggccactggctgtacccgaatcgtctcaagcttctcaggctccactgctaatagaatttgattccgatttgggattattatactggtcttcttgtatgggacgaccaatatgtctttctagttttagttgtgaacctggaattggtctgttattgtgtcattaaaaagccggaaactctgtctcggctgcataataaagttcatcagacattgtgttgggtgtggtgaggtttttccatacatatacatttacattacaactactggtgtcttttatg

SEQ ID NO: 90414 - protein, 268 aa, Arabidopsis thaliana; identical to SEQ ID NO: 35071
  peptide (1)..(268): Ceres Seq. ID no. 12723799

SEQ ID NO: 90415 - protein, 140 aa, Arabidopsis thaliana; identical to SEQ ID NO: 35072
  peptide (1)..(140): Ceres Seq. ID no. 12723800

SEQ ID NO: 90416 - DNA, 842 bp, Arabidopsis thaliana
  misc_feature (1)..(842): Ceres Seq. ID no. 12723809
  misc_feature (1)..(842): Ortholog of  Ceres SEQ ID NO 14314534 as cited in SEQ ID NO 52434
  misc_feature (1)..(842): Ortholog of  Ceres SEQ ID NO 13656436 as cited in SEQ ID NO 69154
tttcaaaatcccaaatctaaagcactcctcgagaaaagtgtaacaatggcgagaagaccggacgaagaatacgactacttgtttaaagtggttttgatcggagactccggtgtcggcaagtctaatctcctctctagattcactcgcaacgagttctgcttagaatccaaatccaccattggtgtcgaattcgctactcgtactctccaagtggaaggaaggactgtgaaagctcagatatgggacacggctgggcaagaacgatacagagccataactagcgcctattacagaggtgcacttggagctcttttggtctatgatgtcaccaagccaacaacgtttgagaatgtaagcaggtggttaaaagaactaagagaccatgcagattccaatatagtgatcatgttgattgggaacaagacagatctgaagcatctcagagcagttgccacagaggatgctcagagctatgcagagaaagaaggcttatctttcatcgagacatcggctctcgaggcattaaacgtagaaaaggcttttcagacgattctctcggaggtttataggatcatcagcaagaagtcgatatcttcagaccagacaactgcaaatgccaacatcaaggaaggccaaacaattgatgtggctgctacttctgaatcaaacgctaagaagccttgttgctcatcgtcttgaaaggctttgtttgtgttgcacttaaaaaaagccaaatatctatgagactttatttcaaggcttgcgttgtatttgttttctttcttttttctgttgttgataatataactcaaagataattttttatatcaattgtggagttc

SEQ ID NO: 90417 - protein, 232 aa, Arabidopsis thaliana
  peptide (1)..(232): Ceres Seq. ID no. 12723810
FQNPKSKALLEKSVTMARRPDEEYDYLFKVVLIGDSGVGKSNLLSRFTRNEFCLESKSTIGVEFATRTLQVEGRTVKAQIWDTAGQERYRAITSAYYRGALGALLVYDVTKPTTFENVSRWLKELRDHADSNIVIMLIGNKTDLKHLRAVATEDAQSYAEKEGLSFIETSALEALNVEKAFQTILSEVYRIISKKSISSDQTTANANIKEGQTIDVAATSESNAKKPCCSSS

SEQ ID NO: 90418 - protein, 217 aa, Arabidopsis thaliana; identical to SEQ ID NO: 30179
  peptide (1)..(217): Ceres Seq. ID no. 12723811

SEQ ID NO: 90419 - DNA, 800 bp, Arabidopsis thaliana
  misc_feature (1)..(800): Ceres Seq. ID no. 12723812
  misc_feature (1)..(800): Ortholog of  Ceres SEQ ID NO 14314534 as cited in SEQ ID NO 52434
  misc_feature (1)..(800): Ortholog of  Ceres SEQ ID NO 13656436 as cited in SEQ ID NO 69154
aaggggaaagagaaattaaattatttatttatttctgtcatcttctccttttctatttcaaaatcccaaatctaaagcactcctcgagaaaagtgtaacaatggcgagaagaccggacgaagaatacgactacttgtttaaagtggttttgatcggagactccggtgtcggcaagtctaatctcctctctagattcactcgcaacgagttctgcttagaatccaaatccaccattggtgtcgaattcgctactcgtactctccaagtggaaggaaggactgtgaaagctcagatatgggacacggctgggcaagaacgatacagagccataactagcgcctattacagaggtgcacttggagctcttttggtctatgatgtcaccaagccaacaacgtttgagaatgtaagcaggtggttaaaagaactaagagaccatgcagattccaatatagtgatcatgttgattgggaacaagacagatctgaagcatctcagagcagttgccacagaggatgctcagagctatgcagagaaagaaggcttatctttcatcgagacatcggctctcgaggcattaaacgtagaaaaggcttttcagacgattctctcggaggtttataggatcatcagcaagaagtcgatatcttcagaccagacaactgcaaatgccaacatcaaggaaggccaaacaattgatgtggctgctacttctgaatcaaacgctaagaagccttgttgctcatcgtcttgaaaggctttgtttgtgttgcacttaaaaaaagccaaatatctatgag

SEQ ID NO: 90420 - protein, 217 aa, Arabidopsis thaliana; identical to SEQ ID NO: 30179
  peptide (1)..(217): Ceres Seq. ID no. 12723813

SEQ ID NO: 90421 - DNA, 1278 bp, Arabidopsis thaliana
  misc_feature (1)..(1278): Ceres Seq. ID no. 12723829
  misc_feature (1)..(1278): Ortholog of  Ceres SEQ ID NO 12611884 as cited in SEQ ID NO 51018
  misc_feature (1)..(1278): Ortholog of  Ceres SEQ ID NO 15177083 as cited in SEQ ID NO 51917
  misc_feature (1)..(1278): Ortholog of  Ceres SEQ ID NO 12609093 as cited in SEQ ID NO 52008
  misc_feature (1)..(1278): Ortholog of  Ceres SEQ ID NO 12609839 as cited in SEQ ID NO 52022
  misc_feature (1)..(1278): Ortholog of  Ceres SEQ ID NO 13638931 as cited in SEQ ID NO 52200
  misc_feature (1)..(1278): Ortholog of  Ceres SEQ ID NO 13638885 as cited in SEQ ID NO 55803
  misc_feature (1)..(1278): Ortholog of  Ceres SEQ ID NO 14301452 as cited in SEQ ID NO 60984
  misc_feature (1)..(1278): Ortholog of  Ceres SEQ ID NO 12587429 as cited in SEQ ID NO 63113
  misc_feature (1)..(1278): Ortholog of  Ceres SEQ ID NO 12615635 as cited in SEQ ID NO 63133
  misc_feature (1)..(1278): Ortholog of  Ceres SEQ ID NO 12586351 as cited in SEQ ID NO 64028
  misc_feature (1)..(1278): Ortholog of  Ceres SEQ ID NO 15173174 as cited in SEQ ID NO 64046
  misc_feature (1)..(1278): Ortholog of  Ceres SEQ ID NO 13654441 as cited in SEQ ID NO 67814
  misc_feature (1)..(1278): Ortholog of  Ceres SEQ ID NO 12635608 as cited in SEQ ID NO 0
  misc_feature (1)..(1278): Ortholog of  Ceres SEQ ID NO 14309027 as cited in SEQ ID NO 0
aagcttccctctctcttcgagtcggttcttaatctccgggataaaatggcgaccgaggacgtgaagctgatcggctcatgggcgagtgtttacgtcatgagggcgaggatcgctctccacctcaaatctattagctacgaattccttcaggagacgtatggttcaaagagcgaattgctcctcaaatcaaacccggttcacaagaagatgccggttctgattcacgctgacaaaccggtgtgcgagtccaacatcatcgttcattatatcgacgaggcttggaactcttctggaccttccattctcccgtcccatccatacgaccgggccattgctcggttttgggctgcctacatagacgatcaggttcatagattgttcttcacttgctcttttcactttgattgcatgtaataaagtataccgggaattaatgagggattgatttggttttgattgctttaattttgatacatccccaaaactttagcggttcttttatgattgttattggtttaatccggttaataatctagaataacacgatatgaccgatttaaaccggatagggtttgactatagtccagcttcaactaactttaatttctagtttatacggatagttaggtaattagtcaacttttatgttgaaagaaattagacattttgtttatcttccttactatatatgacataatcaagtaaatcttaaatcttatatgttctgacttaaatttgatatgaatggaagtggtttatctctgtgagaagtatcctaacagctcaaggagacgaagagaagaaagcagccatagctcaagttgaagaaaggaccaagcttctggagaaagcattcaacgattgtagccaaggaaaaccgttcttcaacggtgaccatatcggttacctcgacattgccttggggagcttcttaggttggtggagagtcgtcgagttggatgccaatcataaatttcttgatgagaccaaaactccctctctagtcaaatgggcagagcggttctgtgatgatcccgctgtgaaacctataatgcccgagattacaaagctcgctgaattcgcaaggaagctctttcctaagcggcaagcataaactggattactaggatgtaagttatataataagcacagccaaatattttttttatgtcttttgcatattcgttcataatcttggagttatgaaaatattgtaatccatattacctcagatcaaattttacatgagtgtaccaaacatataaacattgattatcg

SEQ ID NO: 90422 - protein, 137 aa, Arabidopsis thaliana
  peptide (1)..(137): Ceres Seq. ID no. 12723830
KLPSLFESVLNLRDKMATEDVKLIGSWASVYVMRARIALHLKSISYEFLQETYGSKSELLLKSNPVHKKMPVLIHADKPVCESNIIVHYIDEAWNSSGPSILPSHPYDRAIARFWAAYIDDQVHRLFFTCSFHFDCM

SEQ ID NO: 90423 - protein, 122 aa, Arabidopsis thaliana
  peptide (1)..(122): Ceres Seq. ID no. 12723831
MATEDVKLIGSWASVYVMRARIALHLKSISYEFLQETYGSKSELLLKSNPVHKKMPVLIHADKPVCESNIIVHYIDEAWNSSGPSILPSHPYDRAIARFWAAYIDDQVHRLFFTCSFHFDCM

SEQ ID NO: 90424 - protein, 105 aa, Arabidopsis thaliana
  peptide (1)..(105): Ceres Seq. ID no. 12723832
MRARIALHLKSISYEFLQETYGSKSELLLKSNPVHKKMPVLIHADKPVCESNIIVHYIDEAWNSSGPSILPSHPYDRAIARFWAAYIDDQVHRLFFTCSFHFDCM

SEQ ID NO: 90425 - DNA, 1930 bp, Arabidopsis thaliana
  misc_feature (1)..(1930): Ceres Seq. ID no. 12723854
  misc_feature (1)..(1930): Ortholog of  Ceres SEQ ID NO 14306569 as cited in SEQ ID NO 53008
  misc_feature (1)..(1930): Ortholog of  Ceres SEQ ID NO 14304855 as cited in SEQ ID NO 53974
gaagcgaaacacgacacggattcacacaatactcagatatatacaaaaaggattttagattttgattcagaaccaaaaataaaaaaaggaacttttttatttctttgtttgattttttgggttgttggttttttttttgtttgttaattttggggatcgatgtcggaaaaggaagaagctccgtcgacatcgaagtccaccggagctccgtcgcgtccgactttatctcttcctccacggccgtttagtgagatgttctttaacggtggcgttggattcagtcctggtccgatgactctggtctctaatatgttccctgattccgatgagtttaggtctttctctcagcttctcgctggagccatgtcttctccagcgactgcagctgctgctgctgctgctgcgacggctagtgattaccagagacttggtgaagggactaatagctctagtggtgatgttgacccgagattcaagcaaaacagaccaaccgcggttcttgacctgatatgtaacattgtgcagggatcatatggaatgacacatcagcaagctctagctcaagtcactgctcaagcagttcaagccaatgccaatatgcaaccacaaacagagtaccctcctccctctcaagttcaatcattttcatcgggtcaagcgcagatcccgacctcggctccactaccagctcaaagagaaacctcagatgtaaccatcatagagcacaggtcacaacagcctctaaatgttgacaaaccagctgatgatggctataactggcgaaaatatgggcaaaagcaagttaaaggtagcgagtttccacgaagctattacaagtgtactaatccaggatgtcctgtcaagaagaaggttgagagatctcttgatggacaagtaacggagattatctacaaaggtcagcacaatcatgaacctcctcaaaacactaagcgaggtaacaaagataacaccgcgaatataaatgggagttcgataaataacaatcgcgggagttctgaattgggggcatcacagtttcaaactaatagctccaacaagactaagagagagcaacatgaagcagtaagtcaagctacgacaacagagcacttgtctgaggcaagtgacggtgaagaagttggtaatggagaaactgatgtgagagagaaagatgagaatgagcctgatcccaagagaagaagtacagaagttcggatttcagaaccagctcctgctgcttcacatagaactgtgacagagcctagaattattgtccaaacgacgagtgaagttgatcttctagatgatggatataggtggcgtaaatatggacagaaagttgtcaaagggaatccttatccgaggagctactacaagtgcacaacaccaggatgtggtgtgaggaaacatgtagagagagcagcaacagatccaaaagctgtagtaacaacatatgaaggaaaacataaccatgaccttcccgctgctaaatcaagcagccatgccgctgcagcggcacagttaaggccagataatcgacctggcggtttggctaacttaaatcaacagcagcagcaacagcccgttgcgcggctaaggcttaaagaagagcaaacaacttgagagaagaaaactcttgaccgtttttcattacaaaagctttcaaattccactcacacacttgtctgaaaaatctagcagtttgcaggaaagaaacagcttcaagaggttgtagttcttctatgttctggtgtaaaacttaaaagctttttagggttttcagatttctgtttactaatactgtatgtgaattcttttgtacatgaggaagaaaattacagggggatattttgtgttgtatcttttgtgttattgtttcagtaaaagataggtcttacattttgtgtatgaaaatgaaagtatttgttgt

SEQ ID NO: 90426 - protein, 487 aa, Arabidopsis thaliana
  peptide (1)..(487): Ceres Seq. ID no. 12723855
MSEKEEAPSTSKSTGAPSRPTLSLPPRPFSEMFFNGGVGFSPGPMTLVSNMFPDSDEFRSFSQLLAGAMSSPATAAAAAAAATASDYQRLGEGTNSSSGDVDPRFKQNRPTAVLDLICNIVQGSYGMTHQQALAQVTAQAVQANANMQPQTEYPPPSQVQSFSSGQAQIPTSAPLPAQRETSDVTIIEHRSQQPLNVDKPADDGYNWRKYGQKQVKGSEFPRSYYKCTNPGCPVKKKVERSLDGQVTEIIYKGQHNHEPPQNTKRGNKDNTANINGSSINNNRGSSELGASQFQTNSSNKTKREQHEAVSQATTTEHLSEASDGEEVGNGETDVREKDENEPDPKRRSTEVRISEPAPAASHRTVTEPRIIVQTTSEVDLLDDGYRWRKYGQKVVKGNPYPRSYYKCTTPGCGVRKHVERAATDPKAVVTTYEGKHNHDLPAAKSSSHAAAAAQLRPDNRPGGLANLNQQQQQQPVARLRLKEEQTT

SEQ ID NO: 90427 - protein, 456 aa, Arabidopsis thaliana
  peptide (1)..(456): Ceres Seq. ID no. 12723856
MFFNGGVGFSPGPMTLVSNMFPDSDEFRSFSQLLAGAMSSPATAAAAAAAATASDYQRLGEGTNSSSGDVDPRFKQNRPTAVLDLICNIVQGSYGMTHQQALAQVTAQAVQANANMQPQTEYPPPSQVQSFSSGQAQIPTSAPLPAQRETSDVTIIEHRSQQPLNVDKPADDGYNWRKYGQKQVKGSEFPRSYYKCTNPGCPVKKKVERSLDGQVTEIIYKGQHNHEPPQNTKRGNKDNTANINGSSINNNRGSSELGASQFQTNSSNKTKREQHEAVSQATTTEHLSEASDGEEVGNGETDVREKDENEPDPKRRSTEVRISEPAPAASHRTVTEPRIIVQTTSEVDLLDDGYRWRKYGQKVVKGNPYPRSYYKCTTPGCGVRKHVERAATDPKAVVTTYEGKHNHDLPAAKSSSHAAAAAQLRPDNRPGGLANLNQQQQQQPVARLRLKEEQTT

SEQ ID NO: 90428 - protein, 443 aa, Arabidopsis thaliana
  peptide (1)..(443): Ceres Seq. ID no. 12723857
MTLVSNMFPDSDEFRSFSQLLAGAMSSPATAAAAAAAATASDYQRLGEGTNSSSGDVDPRFKQNRPTAVLDLICNIVQGSYGMTHQQALAQVTAQAVQANANMQPQTEYPPPSQVQSFSSGQAQIPTSAPLPAQRETSDVTIIEHRSQQPLNVDKPADDGYNWRKYGQKQVKGSEFPRSYYKCTNPGCPVKKKVERSLDGQVTEIIYKGQHNHEPPQNTKRGNKDNTANINGSSINNNRGSSELGASQFQTNSSNKTKREQHEAVSQATTTEHLSEASDGEEVGNGETDVREKDENEPDPKRRSTEVRISEPAPAASHRTVTEPRIIVQTTSEVDLLDDGYRWRKYGQKVVKGNPYPRSYYKCTTPGCGVRKHVERAATDPKAVVTTYEGKHNHDLPAAKSSSHAAAAAQLRPDNRPGGLANLNQQQQQQPVARLRLKEEQTT

SEQ ID NO: 90429 - DNA, 1391 bp, Arabidopsis thaliana
  misc_feature (1)..(1391): Ceres Seq. ID no. 12723858
  misc_feature (1)..(1391): Ortholog of  Ceres SEQ ID NO 14308430 as cited in SEQ ID NO 55350
  misc_feature (1)..(1391): Ortholog of  Ceres SEQ ID NO 15177799 as cited in SEQ ID NO 59221
  misc_feature (1)..(1391): Ortholog of  Ceres SEQ ID NO 13662846 as cited in SEQ ID NO 65519
acattgaatcatctgatttgcagaaaaaggagatctctttatgtaaaagtctctgagaattttggtttaaagagaggattttacggagatgggtttgttggaatcggtgaaatcaatcaactgggaacatgaatcatctccggtttatcaggattttcgagttcttcctctcttcgctgtgttcttcccttcgattcgatttctcctcgatagattcgtcttcgagaaattggcaaaatatttgatctatggaaaacatagacaggatatgggagatgacacaaccgagagaaagaagaagatcaggaaattcaaagaatcggcctggaagtgtgtttactatctatcagctgagattcttgctttatctgtgacttacaatgagccttggtttatgaacactaaatacttttgggtagggcctggagatcagacttggcctgatcaacaaacaaagttaaagttgaagcttttgtatatgtttgtggctggtttctatacatactccatctttgctctggttttctgggaaacgaggcgttctgattttggagtttcaatgggtcatcatattgccactcttattcttattgttctctcatacgtatgtagcttctcccgtgttggttctgttgttctggcacttcacgatgctagtgatgtgtttcttgaggttgggaaaatgtctaaatatagtggagctgaaagaatcgcaagcttttcgttcattcttttcgttttgtcttggatcattctccgcctcatttactatcccttttggatcctatggagtacaaggtttgtataatatattaagatcctttctatagtttttctcgaaatatttgtcgccttacatatattacattgcttgttgcagctatgaagtagttttggagcttgataaagacaagcatccaatcgaaggaccaatttactactacatgtttaacactctcctatattgcttgcttgttcttcacatttattggtgggttttgatgtatcggatgcttgtgaaacaaatacaagatagaggcaagcttagtgaagatgtcagatcagattctgaaggcgaagatgagcacgaagactgatttgatcacaaaggtagatagaaatgtaaaagcacgttgttctctctttacatattcgcagattcttttgttctctgtctctgtgattctgatcgctaatgggtgtttaagagtggaggagactgagtcatcaatctctaacattggaccaactcatggaacataactgattcaggagacatgaaactgtagttgtattgaattgtagtctgaacaaattccagatcttcttgtattgtattcatttcttgttttggatcactcaccattcatgatatatatcaatgttgatat

SEQ ID NO: 90430 - protein, 239 aa, Arabidopsis thaliana
  peptide (1)..(239): Ceres Seq. ID no. 12723859
MGLLESVKSINWEHESSPVYQDFRVLPLFAVFFPSIRFLLDRFVFEKLAKYLIYGKHRQDMGDDTTERKKKIRKFKESAWKCVYYLSAEILALSVTYNEPWFMNTKYFWVGPGDQTWPDQQTKLKLKLLYMFVAGFYTYSIFALVFWETRRSDFGVSMGHHIATLILIVLSYVCSFSRVGSVVLALHDASDVFLEVGKMSKYSGAERIASFSFILFVLSWIILRLIYYPFWILWSTRFV

SEQ ID NO: 90431 - protein, 179 aa, Arabidopsis thaliana
  peptide (1)..(179): Ceres Seq. ID no. 12723860
MGDDTTERKKKIRKFKESAWKCVYYLSAEILALSVTYNEPWFMNTKYFWVGPGDQTWPDQQTKLKLKLLYMFVAGFYTYSIFALVFWETRRSDFGVSMGHHIATLILIVLSYVCSFSRVGSVVLALHDASDVFLEVGKMSKYSGAERIASFSFILFVLSWIILRLIYYPFWILWSTRFV

SEQ ID NO: 90432 - protein, 137 aa, Arabidopsis thaliana
  peptide (1)..(137): Ceres Seq. ID no. 12723861
MNTKYFWVGPGDQTWPDQQTKLKLKLLYMFVAGFYTYSIFALVFWETRRSDFGVSMGHHIATLILIVLSYVCSFSRVGSVVLALHDASDVFLEVGKMSKYSGAERIASFSFILFVLSWIILRLIYYPFWILWSTRFV

SEQ ID NO: 90433 - DNA, 1149 bp, Arabidopsis thaliana
  misc_feature (1)..(1149): Ceres Seq. ID no. 12723870
  misc_feature (1)..(1149): Ortholog of  Ceres SEQ ID NO 13599900 as cited in SEQ ID NO 531
atgagttgcttcgggtgttttggtggctctgagagatcaagacattcaccaaatccatatgatgatgatacatattcccatgatagtggtgaaaccagcaatccgggaggagatgatgaagaaggagaagaggaagaggaagtagaggagctaagtcgttccaaacgatctgaagaaattttgaaatgtaaactacaaaatggactagtctgcaggcagtttccagtcaaggaaactaataaacttacacgcggagaggatgaagatggaaacaagacaataaatgagtttgttcgtgagcgtaaaattggatctggtagttatgggaaagtggttctctatcgaagcactgtcgatgacaagcattatgctattaaggcttttcacaagtcacatttatcgaggctacgggttgcaccttcagaaactgctatgggtgatgttcttcgtgaggttatgattatgaaaaccctggagcatcctaatatcgttaatctcattgaggtgattgatgaccctgagtttgatgatttttacatggttctcgaatatgttgatggaaaatgggcctatgatgattctggaccaccgggtgctctcggagaaattactgctagaaagtacttgcgcgatgtagttgccggcctcatgtaccttcatgctcataatgtaattcatggtgacatcaaacctgacaatttactggttactagtaccgggagagtgaaaataggagatttcagtgtcagccaagatgatgatgatcaactccgtagatcacccggcactcctgtctttactgccccagaatgttgtttaggtataacatacagtggaagatctgcagatacgtgggcagtaggagttactttgtattgtatgattttaggacaatacccatttctgggtgatacacttcaagatacttatgacaagattgttcacaacccgttgataataccggaaggactcaatcctcgtctaagggacttgatcgaaggtctcctttgcaaagatccaaaccagaggatgacgttgaaagctgtggcggagcatccatggatcacaggagaagacggggctatttcggaatactgttgttggtgcaaacgcaaagctgaagaagaagaagatcaaaaccatagctga

SEQ ID NO: 90434 - protein, 382 aa, Arabidopsis thaliana
  peptide (1)..(382): Ceres Seq. ID no. 12723871
MSCFGCFGGSERSRHSPNPYDDDTYSHDSGETSNPGGDDEEGEEEEEVEELSRSKRSEEILKCKLQNGLVCRQFPVKETNKLTRGEDEDGNKTINEFVRERKIGSGSYGKVVLYRSTVDDKHYAIKAFHKSHLSRLRVAPSETAMGDVLREVMIMKTLEHPNIVNLIEVIDDPEFDDFYMVLEYVDGKWAYDDSGPPGALGEITARKYLRDVVAGLMYLHAHNVIHGDIKPDNLLVTSTGRVKIGDFSVSQDDDDQLRRSPGTPVFTAPECCLGITYSGRSADTWAVGVTLYCMILGQYPFLGDTLQDTYDKIVHNPLIIPEGLNPRLRDLIEGLLCKDPNQRMTLKAVAEHPWITGEDGAISEYCCWCKRKAEEEEDQNHS

SEQ ID NO: 90435 - protein, 238 aa, Arabidopsis thaliana
  peptide (1)..(238): Ceres Seq. ID no. 12723872
MGDVLREVMIMKTLEHPNIVNLIEVIDDPEFDDFYMVLEYVDGKWAYDDSGPPGALGEITARKYLRDVVAGLMYLHAHNVIHGDIKPDNLLVTSTGRVKIGDFSVSQDDDDQLRRSPGTPVFTAPECCLGITYSGRSADTWAVGVTLYCMILGQYPFLGDTLQDTYDKIVHNPLIIPEGLNPRLRDLIEGLLCKDPNQRMTLKAVAEHPWITGEDGAISEYCCWCKRKAEEEEDQNHS

SEQ ID NO: 90436 - protein, 230 aa, Arabidopsis thaliana
  peptide (1)..(230): Ceres Seq. ID no. 12723873
MIMKTLEHPNIVNLIEVIDDPEFDDFYMVLEYVDGKWAYDDSGPPGALGEITARKYLRDVVAGLMYLHAHNVIHGDIKPDNLLVTSTGRVKIGDFSVSQDDDDQLRRSPGTPVFTAPECCLGITYSGRSADTWAVGVTLYCMILGQYPFLGDTLQDTYDKIVHNPLIIPEGLNPRLRDLIEGLLCKDPNQRMTLKAVAEHPWITGEDGAISEYCCWCKRKAEEEEDQNHS

SEQ ID NO: 90437 - DNA, 1428 bp, Arabidopsis thaliana
  misc_feature (1)..(1428): Ceres Seq. ID no. 12723898
  misc_feature (1)..(1428): Ortholog of  Ceres SEQ ID NO 13648575 as cited in SEQ ID NO 20407
atggcaatggtagagaagaatagttctgcgattggctatgtagctagaaatctgttactgagcttattcgtcgtcacgacgatcctctttgctctttcctgttactttgtgttacgttccactgctcataatcgcttccttagctctacatttccatctaaatcattcgtcgatgtaaggccggagaaagcgaattgtagatgtgttaaggacgagaaatcgtcggtaatcgcgggtcctttgaaggtttatatgtataatatggatccagagtttcattttggattgttagattggaagaagaaggaaggtagtgatagtagtgtatggcctgatattcagaagtatataccaccttatcctggaggtttgaatttgcagcatagtatcgagtattggcttacgttggatttgcttgcatcggagtatgagaatgcaccgagaagtgttgcggcgaagcgtgtttataattctagtgaagctgatgttatctttgtgccgtttttttcttcgttgagttataatcggttttcgaaagtgaatcctcatcagaaaactagtaggaataaggatttgcaagggaagttggttacgtttttgactgctcaagaggagtggaagaggagtggtggtagagatcatgttgttcttgctcatcatccgaatagtatgttagatgctagaaataagttgtttcctgcaatgtttatactttcggactttggaaggtatcctcctactgtggctaatgttgagaaagatgtcattgcgccgtataagcatgttattaaagcttatgaaaacgatacatcgggtttcgatagtagaccgattctgctttactttcagggtgctatctacaggaaagatggcgggtttgtgcgtcaggagttattctacctcttgcaagatgagaaagatgtgcatttctcgtttgggagtgtgagaaacggaggtataaacaaagcaagccaaggaatgcacaattccaagttctgtctcaatattgccggagacactccttcgtcaaaccgtctctttgacgccatagccagtcactgtgttcctgtcattatcagcgacgacattgagcttccttttgaggatgttattgattactctgagttctcggtgtttgttcgcacctctgatgcattgaaagagaacttcttggttaacttaatacgaggaataaccaaagaggaatggacacgaatgtggaatcgattaaaggaagtggagaaatattatgagttccattttccatcaaaggtagatgatgcggtgcagatgatatggcaagcgattgcccgtaaagttccgggtgttaaaatgaggattcataagtctagaaggtattctggatctgtttctgagaccgggaaagaatcaagatggtcttcattgatacctcggagtttctggtga

SEQ ID NO: 90438 - protein, 475 aa, Arabidopsis thaliana
  peptide (1)..(475): Ceres Seq. ID no. 12723899
MAMVEKNSSAIGYVARNLLLSLFVVTTILFALSCYFVLRSTAHNRFLSSTFPSKSFVDVRPEKANCRCVKDEKSSVIAGPLKVYMYNMDPEFHFGLLDWKKKEGSDSSVWPDIQKYIPPYPGGLNLQHSIEYWLTLDLLASEYENAPRSVAAKRVYNSSEADVIFVPFFSSLSYNRFSKVNPHQKTSRNKDLQGKLVTFLTAQEEWKRSGGRDHVVLAHHPNSMLDARNKLFPAMFILSDFGRYPPTVANVEKDVIAPYKHVIKAYENDTSGFDSRPILLYFQGAIYRKDGGFVRQELFYLLQDEKDVHFSFGSVRNGGINKASQGMHNSKFCLNIAGDTPSSNRLFDAIASHCVPVIISDDIELPFEDVIDYSEFSVFVRTSDALKENFLVNLIRGITKEEWTRMWNRLKEVEKYYEFHFPSKVDDAVQMIWQAIARKVPGVKMRIHKSRRYSGSVSETGKESRWSSLIPRSFW

SEQ ID NO: 90439 - protein, 473 aa, Arabidopsis thaliana
  peptide (1)..(473): Ceres Seq. ID no. 12723900
MVEKNSSAIGYVARNLLLSLFVVTTILFALSCYFVLRSTAHNRFLSSTFPSKSFVDVRPEKANCRCVKDEKSSVIAGPLKVYMYNMDPEFHFGLLDWKKKEGSDSSVWPDIQKYIPPYPGGLNLQHSIEYWLTLDLLASEYENAPRSVAAKRVYNSSEADVIFVPFFSSLSYNRFSKVNPHQKTSRNKDLQGKLVTFLTAQEEWKRSGGRDHVVLAHHPNSMLDARNKLFPAMFILSDFGRYPPTVANVEKDVIAPYKHVIKAYENDTSGFDSRPILLYFQGAIYRKDGGFVRQELFYLLQDEKDVHFSFGSVRNGGINKASQGMHNSKFCLNIAGDTPSSNRLFDAIASHCVPVIISDDIELPFEDVIDYSEFSVFVRTSDALKENFLVNLIRGITKEEWTRMWNRLKEVEKYYEFHFPSKVDDAVQMIWQAIARKVPGVKMRIHKSRRYSGSVSETGKESRWSSLIPRSFW

SEQ ID NO: 90440 - protein, 391 aa, Arabidopsis thaliana
  peptide (1)..(391): Ceres Seq. ID no. 12723901
MYNMDPEFHFGLLDWKKKEGSDSSVWPDIQKYIPPYPGGLNLQHSIEYWLTLDLLASEYENAPRSVAAKRVYNSSEADVIFVPFFSSLSYNRFSKVNPHQKTSRNKDLQGKLVTFLTAQEEWKRSGGRDHVVLAHHPNSMLDARNKLFPAMFILSDFGRYPPTVANVEKDVIAPYKHVIKAYENDTSGFDSRPILLYFQGAIYRKDGGFVRQELFYLLQDEKDVHFSFGSVRNGGINKASQGMHNSKFCLNIAGDTPSSNRLFDAIASHCVPVIISDDIELPFEDVIDYSEFSVFVRTSDALKENFLVNLIRGITKEEWTRMWNRLKEVEKYYEFHFPSKVDDAVQMIWQAIARKVPGVKMRIHKSRRYSGSVSETGKESRWSSLIPRSFW

SEQ ID NO: 90441 - DNA, 1995 bp, Arabidopsis thaliana
  misc_feature (1)..(1995): Ceres Seq. ID no. 12723902
  misc_feature (1)..(1995): Ortholog of  Ceres SEQ ID NO 13655640 as cited in SEQ ID NO 63844
atggcttgtagactatatttggctttgatcttctcttgcgtttatctgatttgcctgtcaagtcaacaagaaaccgggtttgtctacaatggcttcgagcaagcagatctttttattgatgggatcgccaaaatactacctgatgggcttttgcagttgacaaatactacagagttgcaaatgggtcatgctttcttcaagaagccgtttgattttgatccatcttcatcactatcgttctatacacattttgtgtgtgcgcttgtgcctcctaagttgggagctgatggtggccatgggattgtctttgttgtatctccttccattgatctctctcatgcatacgcaactcagtacttgggggtcttcagcaacttaacaaatgggacttcctcttcacatctgctagctattgagctcgataccgttaagacagtagagtttaatgagctggagaagcctcatgttggtattgatttgaacagcccaatatctgttgaatctgctctgccatcttacttttccaacgctttggggaagaatataagcataaatcttcttagtggggagcctatacaggtctgggtagattacgatggctcgtttctaaatgttacactggcccctatagaaatcaagaagccaaatcagcctcttatatcaagagccatcaatctttcagaaatctttcaagagaagatgtatgttgggttctcttcatcaacagggaatcttctcagtaaccattatatacttggatggagttttagtagaagaaaagaacaattacagagcctgaacctctctacacttcctcgggttcctcttcctaaagaggaaaaaaagaaattatctccattacttattggtttggtcatcttattagtgattcctgtggtgatggttcttggaggagtttattggtacaggagaaagaaatatgcagaagtaaaagaatggtgggaaaaggaatacggcccacaccgattctcctataagtctctgtacaaagcaacaaatgggtttcgtaaagattgtcgtgttgggaaaggtgggtttggagaagtctacaaaggaactttgcccggaggcaggcatatagctgtgaaaagactatcccacgatgcagagcaagggatgaaacagtttgtggcagaagttgtaaccatgggaaatttacaacatcggaacttggttcctcttctcgggtattgcaggagaaaatgtgagttacttttggtgtctgagtacatgcccaacggtagccttgaccagtacttgtttcatgagggaaacccatctccttcatggtatcaaagaatttctattcttaaggacattgcctcagctctcagttacttgcatacaggaaccaagcaagttgttttgcaccgggatataaaagcttctaacgtcatgttggattccgagttcaacgggaggttaggtgattttggaatggccaagtttcacgaccgtggaaccaacttatctgcaacagccgctgtgggaaccataggttacatggcacctgaactaataacaatgggcacgtctatgaaaaccgatgtgtatgcttttggtgcttttcttcttgaagtaatttgtggcaggcgaccagtggaacctgagctaccagtcggaaagcaatatttggtcaagtgggtctatgaatgctggaaagaggcttgcttattcaagaccagagatccaagattgggagtagaattcttacccgaggaagtcgagatggttctgaaacttgggttactctgcacaaatgctatgccagaatcaaggcctgcgatggaacaagtggtgcaataccttaaccaagacttacccttaccgattttctcgccgtctactccaggtatcggggcttttatgccagtttctatggaagcattatctgccattggggtctccagtgtaaggaactcatcagtttctatgtttgttactcacacaatcttggacgggcatggaagataa

SEQ ID NO: 90442 - protein, 664 aa, Arabidopsis thaliana
  peptide (1)..(664): Ceres Seq. ID no. 12723903
MACRLYLALIFSCVYLICLSSQQETGFVYNGFEQADLFIDGIAKILPDGLLQLTNTTELQMGHAFFKKPFDFDPSSSLSFYTHFVCALVPPKLGADGGHGIVFVVSPSIDLSHAYATQYLGVFSNLTNGTSSSHLLAIELDTVKTVEFNELEKPHVGIDLNSPISVESALPSYFSNALGKNISINLLSGEPIQVWVDYDGSFLNVTLAPIEIKKPNQPLISRAINLSEIFQEKMYVGFSSSTGNLLSNHYILGWSFSRRKEQLQSLNLSTLPRVPLPKEEKKKLSPLLIGLVILLVIPVVMVLGGVYWYRRKKYAEVKEWWEKEYGPHRFSYKSLYKATNGFRKDCRVGKGGFGEVYKGTLPGGRHIAVKRLSHDAEQGMKQFVAEVVTMGNLQHRNLVPLLGYCRRKCELLLVSEYMPNGSLDQYLFHEGNPSPSWYQRISILKDIASALSYLHTGTKQVVLHRDIKASNVMLDSEFNGRLGDFGMAKFHDRGTNLSATAAVGTIGYMAPELITMGTSMKTDVYAFGAFLLEVICGRRPVEPELPVGKQYLVKWVYECWKEACLFKTRDPRLGVEFLPEEVEMVLKLGLLCTNAMPESRPAMEQVVQYLNQDLPLPIFSPSTPGIGAFMPVSMEALSAIGVSSVRNSSVSMFVTHTILDGHGR

SEQ ID NO: 90443 - protein, 604 aa, Arabidopsis thaliana
  peptide (1)..(604): Ceres Seq. ID no. 12723904
MGHAFFKKPFDFDPSSSLSFYTHFVCALVPPKLGADGGHGIVFVVSPSIDLSHAYATQYLGVFSNLTNGTSSSHLLAIELDTVKTVEFNELEKPHVGIDLNSPISVESALPSYFSNALGKNISINLLSGEPIQVWVDYDGSFLNVTLAPIEIKKPNQPLISRAINLSEIFQEKMYVGFSSSTGNLLSNHYILGWSFSRRKEQLQSLNLSTLPRVPLPKEEKKKLSPLLIGLVILLVIPVVMVLGGVYWYRRKKYAEVKEWWEKEYGPHRFSYKSLYKATNGFRKDCRVGKGGFGEVYKGTLPGGRHIAVKRLSHDAEQGMKQFVAEVVTMGNLQHRNLVPLLGYCRRKCELLLVSEYMPNGSLDQYLFHEGNPSPSWYQRISILKDIASALSYLHTGTKQVVLHRDIKASNVMLDSEFNGRLGDFGMAKFHDRGTNLSATAAVGTIGYMAPELITMGTSMKTDVYAFGAFLLEVICGRRPVEPELPVGKQYLVKWVYECWKEACLFKTRDPRLGVEFLPEEVEMVLKLGLLCTNAMPESRPAMEQVVQYLNQDLPLPIFSPSTPGIGAFMPVSMEALSAIGVSSVRNSSVSMFVTHTILDGHGR

SEQ ID NO: 90444 - protein, 431 aa, Arabidopsis thaliana
  peptide (1)..(431): Ceres Seq. ID no. 12723905
MYVGFSSSTGNLLSNHYILGWSFSRRKEQLQSLNLSTLPRVPLPKEEKKKLSPLLIGLVILLVIPVVMVLGGVYWYRRKKYAEVKEWWEKEYGPHRFSYKSLYKATNGFRKDCRVGKGGFGEVYKGTLPGGRHIAVKRLSHDAEQGMKQFVAEVVTMGNLQHRNLVPLLGYCRRKCELLLVSEYMPNGSLDQYLFHEGNPSPSWYQRISILKDIASALSYLHTGTKQVVLHRDIKASNVMLDSEFNGRLGDFGMAKFHDRGTNLSATAAVGTIGYMAPELITMGTSMKTDVYAFGAFLLEVICGRRPVEPELPVGKQYLVKWVYECWKEACLFKTRDPRLGVEFLPEEVEMVLKLGLLCTNAMPESRPAMEQVVQYLNQDLPLPIFSPSTPGIGAFMPVSMEALSAIGVSSVRNSSVSMFVTHTILDGHGR

SEQ ID NO: 90445 - DNA, 1293 bp, Arabidopsis thaliana
  misc_feature (1)..(1293): Ceres Seq. ID no. 12723962
  misc_feature (1)..(1293): Ortholog of  Ceres SEQ ID NO 15174752 as cited in SEQ ID NO 53279
  misc_feature (1)..(1293): Ortholog of  Ceres SEQ ID NO 14308389 as cited in SEQ ID NO 55226
  misc_feature (1)..(1293): Ortholog of  Ceres SEQ ID NO 15177652 as cited in SEQ ID NO 56858
  misc_feature (1)..(1293): Ortholog of  Ceres SEQ ID NO 15226087 as cited in SEQ ID NO 58655
  misc_feature (1)..(1293): Ortholog of  Ceres SEQ ID NO 13662197 as cited in SEQ ID NO 63622
  misc_feature (1)..(1293): Ortholog of  Ceres SEQ ID NO 14308049 as cited in SEQ ID NO 66203
  misc_feature (1)..(1293): Ortholog of  Ceres SEQ ID NO 14313292 as cited in SEQ ID NO 67393
  misc_feature (1)..(1293): Ortholog of  Ceres SEQ ID NO 14313567 as cited in SEQ ID NO 68074
atggtcgcctcatctgagttcatcgtcacaaggaaaaaccctgaactcatccctcccgtgtccgaaactccgaatggtcattactatctctcgaatctcgatcaaaacatcgccatcatcgtgaaaacattatattactacaaatcggagtcaagaaccaaccaagaatcctacaatgtgatcaagaaatctctctcagaggttcttgttcattactaccctgtcgccggaaggctgacgatcagtccggaagggaagatcgccgtcaattgcaccggagaaggtgtagtggttgtggaagctgaggctaactgtgggatagatacgatcaaagaggccatctcagagaatagaatggagacgctcgagaaacttgtttacgacgttccaggtgcccggaatattcttgagattccaccggtagtagttcaggtgacaaatttcaaatgtgggggttttgtcctaggactaggcatgagccacaacatgttcgatggagtcgccgctgcggagttcctcaactcgtggtgcgagatggccaagggtcttcctttatccgtcccaccattcttggaccgtacgattctccggtcacgaaaccctcccaaaatcgagttcccacacaatgaattcgacgaaattgaagatatttccgacaccggaaaaatctacgatgaagaaaaactcatctacaaatcatttcttttcgaacccgaaaagcttgagaagctcaagatcatggcgattgaagaaaataacaataataaggtatcaacatttcaagccttaaccgggtttctttggaaatcaagatgcgaagctctacggtttaaaccggaccaacgggttaagcttctgtttgcggcggatggacggtcaagattcatcccacgtctcccgcaaggatattgcgggaacgggattgtgttaaccggtttggtgacatcatcgggagaattagttgggaaccctctttctcactcggtgggtttggtcaagagactggtggagctggttacggacggcttcatgcggtcggctatggactacttcgaggtgaaccggacacggccgagtatgaacgcgacacttttgattacatcctggtcaaaattgacattgcataaactggatttcggttggggagaaccggttttctctggaccggttggtttaccagggagggaagtgatcttgttcttaccaagtggtgatgatatgaagagtatcaatgtgtttcttggccttcctacttcagctatggaagtgtttgaagagcttatgaagatctga

SEQ ID NO: 90446 - protein, 430 aa, Arabidopsis thaliana
  peptide (1)..(430): Ceres Seq. ID no. 12723963
MVASSEFIVTRKNPELIPPVSETPNGHYYLSNLDQNIAIIVKTLYYYKSESRTNQESYNVIKKSLSEVLVHYYPVAGRLTISPEGKIAVNCTGEGVVVVEAEANCGIDTIKEAISENRMETLEKLVYDVPGARNILEIPPVVVQVTNFKCGGFVLGLGMSHNMFDGVAAAEFLNSWCEMAKGLPLSVPPFLDRTILRSRNPPKIEFPHNEFDEIEDISDTGKIYDEEKLIYKSFLFEPEKLEKLKIMAIEENNNNKVSTFQALTGFLWKSRCEALRFKPDQRVKLLFAADGRSRFIPRLPQGYCGNGIVLTGLVTSSGELVGNPLSHSVGLVKRLVELVTDGFMRSAMDYFEVNRTRPSMNATLLITSWSKLTLHKLDFGWGEPVFSGPVGLPGREVILFLPSGDDMKSINVFLGLPTSAMEVFEELMKI

SEQ ID NO: 90447 - protein, 312 aa, Arabidopsis thaliana
  peptide (1)..(312): Ceres Seq. ID no. 12723964
METLEKLVYDVPGARNILEIPPVVVQVTNFKCGGFVLGLGMSHNMFDGVAAAEFLNSWCEMAKGLPLSVPPFLDRTILRSRNPPKIEFPHNEFDEIEDISDTGKIYDEEKLIYKSFLFEPEKLEKLKIMAIEENNNNKVSTFQALTGFLWKSRCEALRFKPDQRVKLLFAADGRSRFIPRLPQGYCGNGIVLTGLVTSSGELVGNPLSHSVGLVKRLVELVTDGFMRSAMDYFEVNRTRPSMNATLLITSWSKLTLHKLDFGWGEPVFSGPVGLPGREVILFLPSGDDMKSINVFLGLPTSAMEVFEELMKI

SEQ ID NO: 90448 - protein, 272 aa, Arabidopsis thaliana
  peptide (1)..(272): Ceres Seq. ID no. 12723965
MSHNMFDGVAAAEFLNSWCEMAKGLPLSVPPFLDRTILRSRNPPKIEFPHNEFDEIEDISDTGKIYDEEKLIYKSFLFEPEKLEKLKIMAIEENNNNKVSTFQALTGFLWKSRCEALRFKPDQRVKLLFAADGRSRFIPRLPQGYCGNGIVLTGLVTSSGELVGNPLSHSVGLVKRLVELVTDGFMRSAMDYFEVNRTRPSMNATLLITSWSKLTLHKLDFGWGEPVFSGPVGLPGREVILFLPSGDDMKSINVFLGLPTSAMEVFEELMKI

SEQ ID NO: 90449 - DNA, 786 bp, Arabidopsis thaliana
  misc_feature (1)..(786): Ceres Seq. ID no. 12723988
  misc_feature (1)..(786): Ortholog of  Ceres SEQ ID NO 14316404 as cited in SEQ ID NO 57641
  misc_feature (1)..(786): Ortholog of  Ceres SEQ ID NO 12611159 as cited in SEQ ID NO 59821
atggtgtttaaatcagaaaaatcaaaccgggaaatgaaatcaaaggagaagcaaaggaagggattatggtcacccgaggaagatgagaagcttaggagtcatgtcctcaaatatggccatggatgctggagtactattcctcttcaagctggattgcagaggaatgggaagagttgtagattaaggtgggttaattatttaagacctggacttaagaagtctttattcactaaacaagaggaaactatacttctttcacttcattccatgttgggtaacaaatggtctcagatatcgaaattcttaccaggaagaaccgacaacgagatcaaaaactattggcattctaatctaaagaagggtgtaactttgaaacaacatgaaaccacaaaaaaacatcaaacacctttaatcacaaactcacttgaggccttgcagagttcaactgaaagatcttcttcatctatcaatgtcggagaaacgtctaatgctcaaacctcaagcttttcgccaaatctcgtgttctcggaatggttagatcatagtttgcttatggatcagtcacctcaaaagtctagctatgttcaaaatcttgttttaccggaagagagaggattcattggaccatgtggccctcgttatttgggaaacgactctttgcctgatttcgtgccaaattcagaatttttgttggatgatgagatatcatctgagatcgagttctgtacttcattttcagacaactttttgttcgatggtctcatcaacgagctacgaccaatgtaa

SEQ ID NO: 90450 - protein, 261 aa, Arabidopsis thaliana
  peptide (1)..(261): Ceres Seq. ID no. 12723989
MVFKSEKSNREMKSKEKQRKGLWSPEEDEKLRSHVLKYGHGCWSTIPLQAGLQRNGKSCRLRWVNYLRPGLKKSLFTKQEETILLSLHSMLGNKWSQISKFLPGRTDNEIKNYWHSNLKKGVTLKQHETTKKHQTPLITNSLEALQSSTERSSSSINVGETSNAQTSSFSPNLVFSEWLDHSLLMDQSPQKSSYVQNLVLPEERGFIGPCGPRYLGNDSLPDFVPNSEFLLDDEISSEIEFCTSFSDNFLFDGLINELRPM

SEQ ID NO: 90451 - protein, 250 aa, Arabidopsis thaliana
  peptide (1)..(250): Ceres Seq. ID no. 12723990
MKSKEKQRKGLWSPEEDEKLRSHVLKYGHGCWSTIPLQAGLQRNGKSCRLRWVNYLRPGLKKSLFTKQEETILLSLHSMLGNKWSQISKFLPGRTDNEIKNYWHSNLKKGVTLKQHETTKKHQTPLITNSLEALQSSTERSSSSINVGETSNAQTSSFSPNLVFSEWLDHSLLMDQSPQKSSYVQNLVLPEERGFIGPCGPRYLGNDSLPDFVPNSEFLLDDEISSEIEFCTSFSDNFLFDGLINELRPM

SEQ ID NO: 90452 - protein, 172 aa, Arabidopsis thaliana
  peptide (1)..(172): Ceres Seq. ID no. 12723991
MLGNKWSQISKFLPGRTDNEIKNYWHSNLKKGVTLKQHETTKKHQTPLITNSLEALQSSTERSSSSINVGETSNAQTSSFSPNLVFSEWLDHSLLMDQSPQKSSYVQNLVLPEERGFIGPCGPRYLGNDSLPDFVPNSEFLLDDEISSEIEFCTSFSDNFLFDGLINELRPM

SEQ ID NO: 90453 - DNA, 1410 bp, Arabidopsis thaliana
  misc_feature (1)..(1410): Ceres Seq. ID no. 12723995
  misc_feature (1)..(1410): Ortholog of  Ceres SEQ ID NO 14311870 as cited in SEQ ID NO 51574
  misc_feature (1)..(1410): Ortholog of  Ceres SEQ ID NO 15174583 as cited in SEQ ID NO 53693
  misc_feature (1)..(1410): Ortholog of  Ceres SEQ ID NO 13581563 as cited in SEQ ID NO 58942
  misc_feature (1)..(1410): Ortholog of  Ceres SEQ ID NO 13658707 as cited in SEQ ID NO 66286
  misc_feature (1)..(1410): Ortholog of  Ceres SEQ ID NO 13654528 as cited in SEQ ID NO 68080
atgattagaccaacgtttggtttactagtctttttggctatattcctttttccggcgattgaatcccggagtcaccgaaattcggtgacttccaagattgaattttcagcgctgaattgccggaaacatagtgcaatactgactgattttggtgcggttggagatggaaaaacttctaatacaaaagcgtttagaaatgccataagcaagctcagccaaatggcaaccgatggcggagctcaactcgtagtacctcccggaaaatggcttaccggaagttttaaccttacaagccatttcactttgttcatccagcgaggtgctaccatccttgcatctcaggatgaatctgaatggccagttatcgctccattgccatcgtacgggaaaggaagagacggaaccggaaccgggagattcaacagtctcatctccggtacaaacctaaccgacgtggttatcactggtaacaacggaacgatcaacggacagggacagtattggtgggacaaattcaagaagaagcagttcaaaataacaagaccgtacttgatcgagatcttgttctccaaaaacattcaaatctcgaacatcacattgatcgattcgccgtcgtggaatattcatcctgtctattgtaatagcgtcattgtcaaatccgtcaccgttcttgctcccgtcactgttcccaacaccgacggtatcaatccagattcttgcacaaacacattgatcgaagactgttacatagtctccggagacgactgcatcgccgtcaaaagcggttgggaccaatacggaatcaaattcggaatgccgacgcagcaactctcgatccgacggctgacatgcatctccccaaagagtgcaggagtagccttaggaagtgaaatgtccggaggaatcaaagacgttagaatcgaagatgtaactctaaccaacaccgaatccgccatccgaatcaaaactgcggtgggacgtggcgcttacgtcaaggatatttacgctaggaggatcacaatgaagacgatgaaatatgttttctggatgagtggaaactacggtagtcatcctgacgaaggatttgatcccaaggcgttgccggaaattactaatatcaattaccgcgatatgacggcggagaatgttacaatgtcagcgagtctcgacgggattgataaagatccgtttacgggtatttgtatctcgaatgtgactatagctttggcggctaaggctaagaaaatgcagtggaattgtacagatgtggctggagttaccagcagagttacgccagagccatgtagtttgttgcctgagaagaaagctcaggcgaagaatgttgactgtgcgtttccgtctgatttgattccgattgagagtgttgtattgaagaagtgctttctttga

SEQ ID NO: 90454 - protein, 469 aa, Arabidopsis thaliana
  peptide (1)..(469): Ceres Seq. ID no. 12723996
MIRPTFGLLVFLAIFLFPAIESRSHRNSVTSKIEFSALNCRKHSAILTDFGAVGDGKTSNTKAFRNAISKLSQMATDGGAQLVVPPGKWLTGSFNLTSHFTLFIQRGATILASQDESEWPVIAPLPSYGKGRDGTGTGRFNSLISGTNLTDVVITGNNGTINGQGQYWWDKFKKKQFKITRPYLIEILFSKNIQISNITLIDSPSWNIHPVYCNSVIVKSVTVLAPVTVPNTDGINPDSCTNTLIEDCYIVSGDDCIAVKSGWDQYGIKFGMPTQQLSIRRLTCISPKSAGVALGSEMSGGIKDVRIEDVTLTNTESAIRIKTAVGRGAYVKDIYARRITMKTMKYVFWMSGNYGSHPDEGFDPKALPEITNINYRDMTAENVTMSASLDGIDKDPFTGICISNVTIALAAKAKKMQWNCTDVAGVTSRVTPEPCSLLPEKKAQAKNVDCAFPSDLIPIESVVLKKCFL

SEQ ID NO: 90455 - protein, 396 aa, Arabidopsis thaliana
  peptide (1)..(396): Ceres Seq. ID no. 12723997
MATDGGAQLVVPPGKWLTGSFNLTSHFTLFIQRGATILASQDESEWPVIAPLPSYGKGRDGTGTGRFNSLISGTNLTDVVITGNNGTINGQGQYWWDKFKKKQFKITRPYLIEILFSKNIQISNITLIDSPSWNIHPVYCNSVIVKSVTVLAPVTVPNTDGINPDSCTNTLIEDCYIVSGDDCIAVKSGWDQYGIKFGMPTQQLSIRRLTCISPKSAGVALGSEMSGGIKDVRIEDVTLTNTESAIRIKTAVGRGAYVKDIYARRITMKTMKYVFWMSGNYGSHPDEGFDPKALPEITNINYRDMTAENVTMSASLDGIDKDPFTGICISNVTIALAAKAKKMQWNCTDVAGVTSRVTPEPCSLLPEKKAQAKNVDCAFPSDLIPIESVVLKKCFL

SEQ ID NO: 90456 - DNA, 1365 bp, Arabidopsis thaliana
  misc_feature (1)..(1365): Ceres Seq. ID no. 12724024
  misc_feature (1)..(1365): Ortholog of  Ceres SEQ ID NO 14309755 as cited in SEQ ID NO 20741
  misc_feature (1)..(1365): Ortholog of  Ceres SEQ ID NO 13638746 as cited in SEQ ID NO 59296
  misc_feature (1)..(1365): Ortholog of  Ceres SEQ ID NO 13596474 as cited in SEQ ID NO 62169
  misc_feature (1)..(1365): Ortholog of  Ceres SEQ ID NO 13598714 as cited in SEQ ID NO 62656
  misc_feature (1)..(1365): Ortholog of  Ceres SEQ ID NO 13597519 as cited in SEQ ID NO 64759
  misc_feature (1)..(1365): Ortholog of  Ceres SEQ ID NO 13595926 as cited in SEQ ID NO 67778
  misc_feature (1)..(1365): Ortholog of  Ceres SEQ ID NO 13587054 as cited in SEQ ID NO 0
atcttctccgttaaacccatttaaatagttttcattgtccttgtgaaaaatgcaattctcttcatcttctattacttctttcacttggacagttttaatcacagtgggatgtcttatgctttgtgcgtctttctccgatgctcaacttacccctactttttacgacacttcatgtcctaccgtcaccaacattgtaagagataccattgtcaacgagctaagatcggaccctcgtatcgccgggagcatccttcgtcttcacttccatgactgctttgttaatggttgtgatgcttcgatcttgttagacaacacgacatcatttcgaacagagaaagatgcacttggaaatgcaaattcagcccgaggatttccagtgattgatagaatgaaagctgcggtggagagggcatgcccaagaaccgtttcatgcgcagatatgctcaccattgctgctcaacaatctgtcactttggcaggaggtccttcttggaaggttcctttagggagaagagacagcttacaagcatttctagatcttgctaacgcaaatcttccagctccattcttcacacttccacagcttaaagccaacttcaaaaatgttggcctcgatcgtccttctgatcttgttgcgctctccggggctcacacatttggtaaaaatcaatgtcgattcattatggacagattatacaactttagcaacactggattacctgaccctacactcaacactacttacctccaaactcttcgtggtcaatgtcctcgcaatggtaatcaaagcgtcttagtggatttcgatctgcgtacgcctttggttttcgacaacaaatactatgtgaatcttaaagagcaaaaaggtcttatccagagcgaccaagagttgttctctagccccaatgccactgacacaatccccttggtgagagcatatgctgatggcacacaaacattcttcaatgcattcgtggaggcaatgaataggatgggaaatattacaccaactacaggaactcaaggacaaatcaggttgaattgtagagtggtgaactccaactctctactccatgatgtggtggatatcgttgactttgtaagttctatgtgagaatagttgactcaatatctggcgaccagactatatgttaagataaataagcgggatctcaagttgttacttgagcaggagcagattgtattggtgtttatagtatccaagtagttctctgttttttttttatattggcctttgatagcgttttgttaatcggtctaagcttctatggttttggactgttttatcctaataaatatgacaagataaaacgtttatgttatttgaaaatattttgtcctacg

SEQ ID NO: 90457 - protein, 354 aa, Arabidopsis thaliana
  peptide (1)..(354): Ceres Seq. ID no. 12724025
MQFSSSSITSFTWTVLITVGCLMLCASFSDAQLTPTFYDTSCPTVTNIVRDTIVNELRSDPRIAGSILRLHFHDCFVNGCDASILLDNTTSFRTEKDALGNANSARGFPVIDRMKAAVERACPRTVSCADMLTIAAQQSVTLAGGPSWKVPLGRRDSLQAFLDLANANLPAPFFTLPQLKANFKNVGLDRPSDLVALSGAHTFGKNQCRFIMDRLYNFSNTGLPDPTLNTTYLQTLRGQCPRNGNQSVLVDFDLRTPLVFDNKYYVNLKEQKGLIQSDQELFSSPNATDTIPLVRAYADGTQTFFNAFVEAMNRMGNITPTTGTQGQIRLNCRVVNSNSLLHDVVDIVDFVSSM

SEQ ID NO: 90458 - protein, 332 aa, Arabidopsis thaliana
  peptide (1)..(332): Ceres Seq. ID no. 12724026
MLCASFSDAQLTPTFYDTSCPTVTNIVRDTIVNELRSDPRIAGSILRLHFHDCFVNGCDASILLDNTTSFRTEKDALGNANSARGFPVIDRMKAAVERACPRTVSCADMLTIAAQQSVTLAGGPSWKVPLGRRDSLQAFLDLANANLPAPFFTLPQLKANFKNVGLDRPSDLVALSGAHTFGKNQCRFIMDRLYNFSNTGLPDPTLNTTYLQTLRGQCPRNGNQSVLVDFDLRTPLVFDNKYYVNLKEQKGLIQSDQELFSSPNATDTIPLVRAYADGTQTFFNAFVEAMNRMGNITPTTGTQGQIRLNCRVVNSNSLLHDVVDIVDFVSSM

SEQ ID NO: 90459 - protein, 241 aa, Arabidopsis thaliana
  peptide (1)..(241): Ceres Seq. ID no. 12724027
MKAAVERACPRTVSCADMLTIAAQQSVTLAGGPSWKVPLGRRDSLQAFLDLANANLPAPFFTLPQLKANFKNVGLDRPSDLVALSGAHTFGKNQCRFIMDRLYNFSNTGLPDPTLNTTYLQTLRGQCPRNGNQSVLVDFDLRTPLVFDNKYYVNLKEQKGLIQSDQELFSSPNATDTIPLVRAYADGTQTFFNAFVEAMNRMGNITPTTGTQGQIRLNCRVVNSNSLLHDVVDIVDFVSSM

SEQ ID NO: 90460 - DNA, 1758 bp, Arabidopsis thaliana
  misc_feature (1)..(1758): Ceres Seq. ID no. 12724048
  misc_feature (1)..(1758): Ortholog of  Ceres SEQ ID NO 15178464 as cited in SEQ ID NO 67743
agaagaacactaaagacaaaaattaaaccctcacactcacagagaccggagaagaagcagagagaaagagagagagagagattcaccggtgataacattgaagcagaaagattctccggtgataacattgaagctgaggagcaatgtatccgactggtcaacagatttcgtttcagaccactccgttgaatgttcaagatccaacaaggatgatgaatttggatcaatcttcaccagttgcaagaaatgaaactcagaatggaggaggcattgctcacgctgagtttgctatgttcaattccaagaggcttgaatctgatcttgaagctatgggtaacaaaatcaaacagcatgaggataatctcaagtttctcaagtctcagaaaaacaaaatggatgaagctatcgtcgacttgcaagttcatatgagtaagcttaactcgtctcctactcctagaagtgaaaactctgataacagtcttcagggtgaagatatcaatgcacagatccttcgccacgaaaactcagctgctggagttttaagtctggttgagactcttcatggtgctcaagcttctcagttgatgttgacaaaaggtgttgttggtgttgtagcgaaacttgggaaggtcaatgatgaaaatctcagccagattttgtcgaattatttggggactcgctcaatgttggcagttgtatgcaggaattatgaaagtgttacggctttagaggcttatgataaccatggcaacattgatataaatgctggccttcattgccttggctcttcgattggaagagagattggagacagttttgatgccatctgccttgaaaacctgaggccgtatgttggtcagcacatagctgatgatctgcaaagaaggcttgatcttctgaaaccaaaattacctaatggtgagtgtcctcccgggtttctcggatttgcagtgaatatgatacagatcgatccagcttacttgctctgtgtcacatcatatggatatggtcttcgtgagaccttgttctacaatctattctctcgccttcaagtttacaaaacaagggccgatatgattagtgccctcccatgcataagtgatggtgcggtatctttggatggaggaatcatcaggaaaacggggatcttcaatcttggaaaccgtgatgaggtgaacgtgagatttgcaaagccaactgcttctcgcacgatggacaactatagtgaggcggagaagaaaatgaaagagctgaaatggaaaaaggagaaaacgctggaggacattaagcgggagcaagtgctccgtgagcatgccgtcttcaactttggcaagaagaaagaagaatttgttcgatgcttggctcagagttcatgcactaatcagccaatgaacacacccagatgaaaaaaaagcaagcaaagaagcatagagctcggagttacagtgacccttgcttctataggaagcctattttgactataagtaggaagcctattttgactataagaacttgtttccagctaagtttttgatagattgcttccatggaatgcatcttatcagatatactagattttaataaatttccttgaagggtagtagatcggttagttttggttatgctgtttccaatctctgtctgttttgcttttgacttgaccagtttgctgtgtacataatcaatcttctaggctttctaatcagatgctcagtttctattgcttcatgtagttggaatacagtctttcctcacttc

SEQ ID NO: 90461 - protein, 420 aa, Arabidopsis thaliana
  peptide (1)..(420): Ceres Seq. ID no. 12724049
MYPTGQQISFQTTPLNVQDPTRMMNLDQSSPVARNETQNGGGIAHAEFAMFNSKRLESDLEAMGNKIKQHEDNLKFLKSQKNKMDEAIVDLQVHMSKLNSSPTPRSENSDNSLQGEDINAQILRHENSAAGVLSLVETLHGAQASQLMLTKGVVGVVAKLGKVNDENLSQILSNYLGTRSMLAVVCRNYESVTALEAYDNHGNIDINAGLHCLGSSIGREIGDSFDAICLENLRPYVGQHIADDLQRRLDLLKPKLPNGECPPGFLGFAVNMIQIDPAYLLCVTSYGYGLRETLFYNLFSRLQVYKTRADMISALPCISDGAVSLDGGIIRKTGIFNLGNRDEVNVRFAKPTASRTMDNYSEAEKKMKELKWKKEKTLEDIKREQVLREHAVFNFGKKKEEFVRCLAQSSCTNQPMNTPR

SEQ ID NO: 90462 - protein, 398 aa, Arabidopsis thaliana
  peptide (1)..(398): Ceres Seq. ID no. 12724050
MMNLDQSSPVARNETQNGGGIAHAEFAMFNSKRLESDLEAMGNKIKQHEDNLKFLKSQKNKMDEAIVDLQVHMSKLNSSPTPRSENSDNSLQGEDINAQILRHENSAAGVLSLVETLHGAQASQLMLTKGVVGVVAKLGKVNDENLSQILSNYLGTRSMLAVVCRNYESVTALEAYDNHGNIDINAGLHCLGSSIGREIGDSFDAICLENLRPYVGQHIADDLQRRLDLLKPKLPNGECPPGFLGFAVNMIQIDPAYLLCVTSYGYGLRETLFYNLFSRLQVYKTRADMISALPCISDGAVSLDGGIIRKTGIFNLGNRDEVNVRFAKPTASRTMDNYSEAEKKMKELKWKKEKTLEDIKREQVLREHAVFNFGKKKEEFVRCLAQSSCTNQPMNTPR

SEQ ID NO: 90463 - protein, 397 aa, Arabidopsis thaliana
  peptide (1)..(397): Ceres Seq. ID no. 12724051
MNLDQSSPVARNETQNGGGIAHAEFAMFNSKRLESDLEAMGNKIKQHEDNLKFLKSQKNKMDEAIVDLQVHMSKLNSSPTPRSENSDNSLQGEDINAQILRHENSAAGVLSLVETLHGAQASQLMLTKGVVGVVAKLGKVNDENLSQILSNYLGTRSMLAVVCRNYESVTALEAYDNHGNIDINAGLHCLGSSIGREIGDSFDAICLENLRPYVGQHIADDLQRRLDLLKPKLPNGECPPGFLGFAVNMIQIDPAYLLCVTSYGYGLRETLFYNLFSRLQVYKTRADMISALPCISDGAVSLDGGIIRKTGIFNLGNRDEVNVRFAKPTASRTMDNYSEAEKKMKELKWKKEKTLEDIKREQVLREHAVFNFGKKKEEFVRCLAQSSCTNQPMNTPR

SEQ ID NO: 90464 - DNA, 939 bp, Arabidopsis thaliana
  misc_feature (1)..(939): Ceres Seq. ID no. 12724052
  misc_feature (1)..(939): Ortholog of  Ceres SEQ ID NO 15178027 as cited in SEQ ID NO 55634
  misc_feature (1)..(939): Ortholog of  Ceres SEQ ID NO 13597537 as cited in SEQ ID NO 64962
atgcctgcgtcacatgaagcttcaaattacgatgaggtttctatgcagcaaagtatgctcttctctgatggtcttcaggacttgaagaatctgcgagcgcagttgtattcagcagccgagtatttcgaactatcttacacaaccgatgataaaaagcagattgttgtagagacactgaaagactacgctgtgaaggctctggtgaatacagttgaccatttaggctctgttacatataaagtgaatgactttatcgatgaaaaagtcgatgaagtatcagagaccgagctgcgagtatcttgcatcgaacagaggctaagaatgtgccaagagtatatggatcatgaagggcgttcacagcaatcacttgttattgacactccaaagttccataaacgatacatcttacccgcgggtgaaattatgactgctacaaatcttgaaaagcttaagtactttggaagcagtttagaggatgcagatgattggaaccaattccgaaatgctgttcgtgctacaatccgggaaacgcctccaccacctgttagaaaatcaacatctcagagttcatctccacggcaaccacctcaacgatcagcaaccttttcgtttacctctaccattccaaagaaagaacaagataagagatcagtttcaccgcatcggtttccactactaagatctggatcagtcgctaccaggaagtcagcatcaatcagccgaccaacgacaccaagcaagagcagatctataactcctatacggtatccatcagaaccaagaagatcggcttcggtccgagtcgcattcgagaaagataaccagaaagaaacagagcagcaacaaccgagcaagagcaaacgattgctcaaggctttgcttagtcgacgcaaaaccaagaaagatgacactctctacactttcttggacgaatactga

SEQ ID NO: 90465 - protein, 312 aa, Arabidopsis thaliana
  peptide (1)..(312): Ceres Seq. ID no. 12724053
MPASHEASNYDEVSMQQSMLFSDGLQDLKNLRAQLYSAAEYFELSYTTDDKKQIVVETLKDYAVKALVNTVDHLGSVTYKVNDFIDEKVDEVSETELRVSCIEQRLRMCQEYMDHEGRSQQSLVIDTPKFHKRYILPAGEIMTATNLEKLKYFGSSLEDADDWNQFRNAVRATIRETPPPPVRKSTSQSSSPRQPPQRSATFSFTSTIPKKEQDKRSVSPHRFPLLRSGSVATRKSASISRPTTPSKSRSITPIRYPSEPRRSASVRVAFEKDNQKETEQQQPSKSKRLLKALLSRRKTKKDDTLYTFLDEY

SEQ ID NO: 90466 - protein, 298 aa, Arabidopsis thaliana
  peptide (1)..(298): Ceres Seq. ID no. 12724054
MQQSMLFSDGLQDLKNLRAQLYSAAEYFELSYTTDDKKQIVVETLKDYAVKALVNTVDHLGSVTYKVNDFIDEKVDEVSETELRVSCIEQRLRMCQEYMDHEGRSQQSLVIDTPKFHKRYILPAGEIMTATNLEKLKYFGSSLEDADDWNQFRNAVRATIRETPPPPVRKSTSQSSSPRQPPQRSATFSFTSTIPKKEQDKRSVSPHRFPLLRSGSVATRKSASISRPTTPSKSRSITPIRYPSEPRRSASVRVAFEKDNQKETEQQQPSKSKRLLKALLSRRKTKKDDTLYTFLDEY

SEQ ID NO: 90467 - protein, 294 aa, Arabidopsis thaliana
  peptide (1)..(294): Ceres Seq. ID no. 12724055
MLFSDGLQDLKNLRAQLYSAAEYFELSYTTDDKKQIVVETLKDYAVKALVNTVDHLGSVTYKVNDFIDEKVDEVSETELRVSCIEQRLRMCQEYMDHEGRSQQSLVIDTPKFHKRYILPAGEIMTATNLEKLKYFGSSLEDADDWNQFRNAVRATIRETPPPPVRKSTSQSSSPRQPPQRSATFSFTSTIPKKEQDKRSVSPHRFPLLRSGSVATRKSASISRPTTPSKSRSITPIRYPSEPRRSASVRVAFEKDNQKETEQQQPSKSKRLLKALLSRRKTKKDDTLYTFLDEY

SEQ ID NO: 90468 - DNA, 1026 bp, Arabidopsis thaliana
  misc_feature (1)..(1026): Ceres Seq. ID no. 12724060
  misc_feature (1)..(1026): Ortholog of  Ceres SEQ ID NO 13502952 as cited in SEQ ID NO 62271
  misc_feature (1)..(1026): Ortholog of  Ceres SEQ ID NO 13502973 as cited in SEQ ID NO 68052
  misc_feature (1)..(1026): Ortholog of  Ceres SEQ ID NO 13596000 as cited in SEQ ID NO 68188
  misc_feature (1)..(1026): Ortholog of  Ceres SEQ ID NO 15179420 as cited in SEQ ID NO 0
atgacttcgatcgttttctttcttctagccattcttttgagttccagaacttcaggagtcacatctcgtggcgggctctttgaagcttctgccgtagagaaacatgagcaatggatgtctcgattcaatcgcgtgtactcagacgattctgagaaaacgagtaggttcgagatctttacgaataacttaaagtttgtcgagagcatcaatatgaatacgaacaaaacgtacacgttggatgttaacgagttctctgatctcaccgacgaggaatttaaggcgaggtacacggggctggtggtgcccgaaggtatgaccagaatttcaacaactgattctcatgaaacggtatcgtttagatatgaaaacgttggtgaaaccggtgagagcatggattggatacaggaaggggctgttacatccgttaagcaccaacaacaatgtggatgttgctgggctttctcggcggtggcagcagtggaaggcatgacgaagattgcgaatggagagcttgtatcgctgtctgagcagcaactgttggattgtagtacggaaaacaatggatgtggcggagggataatgtggaaagctttcgactacattaaagaaaaccaaggtatcaccacagaggataactatccttaccaaggagcacaacaaacatgtgagtcaaatcatctagctgctgctaccatcagcggatacgaaacggttccccaaaatgacgaggaagcattgctaaaagcagtgtctcaacagcctgtttccgtggcgatcgaagggtcaggatatgagtttatacactactcgggagggatatttaacggagagtgtgggacgcagcttactcatgcagttactatagttggttatggggtgagcgaagaaggcatcaagtattggttgttgaagaactcatggggagaatcttggggagaaaatggttatatgagaatcatgagagacgtagattcacctcagggaatgtgtggtttggccagccttgcttactatccagttgcttga

SEQ ID NO: 90469 - protein, 341 aa, Arabidopsis thaliana
  peptide (1)..(341): Ceres Seq. ID no. 12724061
MTSIVFFLLAILLSSRTSGVTSRGGLFEASAVEKHEQWMSRFNRVYSDDSEKTSRFEIFTNNLKFVESINMNTNKTYTLDVNEFSDLTDEEFKARYTGLVVPEGMTRISTTDSHETVSFRYENVGETGESMDWIQEGAVTSVKHQQQCGCCWAFSAVAAVEGMTKIANGELVSLSEQQLLDCSTENNGCGGGIMWKAFDYIKENQGITTEDNYPYQGAQQTCESNHLAAATISGYETVPQNDEEALLKAVSQQPVSVAIEGSGYEFIHYSGGIFNGECGTQLTHAVTIVGYGVSEEGIKYWLLKNSWGESWGENGYMRIMRDVDSPQGMCGLASLAYYPVA

SEQ ID NO: 90470 - protein, 303 aa, Arabidopsis thaliana
  peptide (1)..(303): Ceres Seq. ID no. 12724062
MSRFNRVYSDDSEKTSRFEIFTNNLKFVESINMNTNKTYTLDVNEFSDLTDEEFKARYTGLVVPEGMTRISTTDSHETVSFRYENVGETGESMDWIQEGAVTSVKHQQQCGCCWAFSAVAAVEGMTKIANGELVSLSEQQLLDCSTENNGCGGGIMWKAFDYIKENQGITTEDNYPYQGAQQTCESNHLAAATISGYETVPQNDEEALLKAVSQQPVSVAIEGSGYEFIHYSGGIFNGECGTQLTHAVTIVGYGVSEEGIKYWLLKNSWGESWGENGYMRIMRDVDSPQGMCGLASLAYYPVA

SEQ ID NO: 90471 - protein, 271 aa, Arabidopsis thaliana
  peptide (1)..(271): Ceres Seq. ID no. 12724063
MNTNKTYTLDVNEFSDLTDEEFKARYTGLVVPEGMTRISTTDSHETVSFRYENVGETGESMDWIQEGAVTSVKHQQQCGCCWAFSAVAAVEGMTKIANGELVSLSEQQLLDCSTENNGCGGGIMWKAFDYIKENQGITTEDNYPYQGAQQTCESNHLAAATISGYETVPQNDEEALLKAVSQQPVSVAIEGSGYEFIHYSGGIFNGECGTQLTHAVTIVGYGVSEEGIKYWLLKNSWGESWGENGYMRIMRDVDSPQGMCGLASLAYYPVA

SEQ ID NO: 90472 - DNA, 1785 bp, Arabidopsis thaliana
  misc_feature (1)..(1785): Ceres Seq. ID no. 12724064
  misc_feature (1)..(1785): Ortholog of  Ceres SEQ ID NO 13659971 as cited in SEQ ID NO 67565
  misc_feature (1)..(1785): Ortholog of  Ceres SEQ ID NO 13500385 as cited in SEQ ID NO 67583
atgggccactgttacagccggaacatttccaccgtcgacgacgacgacgaaatcccctccgcaaccgctcagttaccacatcggtcacaccaaaaccaccaccagacttcatcatcatcatcaattccccagtctccggctacttcagaagtcaacccttacaacatcagcccatttcaaagcccgttaccggcgggagtagctccatctccggcgagaactccgggaagaaaattcaaatggccattcccgcctccttcacctgcgaaaccgattatggcggctttaagacggcgacgaggtacagcaccacatcctcgggatggtccgatccctgaggatagtgaagccggcggaagcggcggcggaatcggagaaaggttagataaaaatttcggatttgcgaagaattttgaaggtaagtatgagcttgggagagaagtaggtcgagggcattttggtcatacttgttgggctaaagctaagaaagggaagatcaaaggtcaaacagttgcagtcaaaatcatctctaaatctaagatgacatcagctttgtcgattgaagatgttcgtcgagaggtgaagttgttgaaagctttgtctgggcatagtcacatggttaagttctatgatgtgtttgaggattcggataatgtctttgttgttatggagttatgtgaaggtggagagctattggacagtattttggcgagaggtggtcgatatccggaagcagaagctaagcgtattcttgtacagattttatctgcaactgcttttttccatcttcaaggtgttgtgcaccgtgatctgaaaccggagaattttctctttacaagcaaaaatgaggatgcagtactcaaggttatagattttggcttgtctgattacgctagatttgatcagcgtctcaacgatgtggtaggaagtgcatactatgttgcacctgaagtacttcacagatcctatagcaccgaagcagatatatggagcattggtgtcatatcttacatattactctgtggaagtagacctttttacggaagaaccgagtctgcaatttttcgttgtgtgcttagagcgaacccgaatttcgacgatttgccgtggccttcaatatctcctattgccaaagactttgtgaaaaggcttttgaataaagaccataggaaaagaatgacagctgctcaagctttagctcatccatggcttcgagatgaaaatcctggtttacttctggatttctctatctacaaattggtgaagtcttatattcgtgcatcgcctttccgaagagcagcacttaagtctctatccaaagctatacccgaagaggaactcgtgttccttaaagcacagtttatgctcttggagccagaagatggaggcttgcatcttcacaatttcaccacggctctgacaagatatgctacggatgctatgatcgaatctagacttcctgacatattaaacatgatgcaaccattggcacataagaaacttgattttgaagagttttgtgcggcttcagtcagcgtttatcaacttgaggctcttgaagaatgggaacagatcgcaacggtagcctttgaacactttgaaagtgaaggaagccgagccatttcggtccaagaactcgccgaggagatgagtttgggaccaaatgcgtatcctctgctcaaggattggatccgtagtttagatgggaagctgaatttcttaggttacgccaagttcttgcacggtgtgactgttcgaagctcgagctcgagaccaatgagatga

SEQ ID NO: 90473 - protein, 594 aa, Arabidopsis thaliana
  peptide (1)..(594): Ceres Seq. ID no. 12724065
MGHCYSRNISTVDDDDEIPSATAQLPHRSHQNHHQTSSSSSIPQSPATSEVNPYNISPFQSPLPAGVAPSPARTPGRKFKWPFPPPSPAKPIMAALRRRRGTAPHPRDGPIPEDSEAGGSGGGIGERLDKNFGFAKNFEGKYELGREVGRGHFGHTCWAKAKKGKIKGQTVAVKIISKSKMTSALSIEDVRREVKLLKALSGHSHMVKFYDVFEDSDNVFVVMELCEGGELLDSILARGGRYPEAEAKRILVQILSATAFFHLQGVVHRDLKPENFLFTSKNEDAVLKVIDFGLSDYARFDQRLNDVVGSAYYVAPEVLHRSYSTEADIWSIGVISYILLCGSRPFYGRTESAIFRCVLRANPNFDDLPWPSISPIAKDFVKRLLNKDHRKRMTAAQALAHPWLRDENPGLLLDFSIYKLVKSYIRASPFRRAALKSLSKAIPEEELVFLKAQFMLLEPEDGGLHLHNFTTALTRYATDAMIESRLPDILNMMQPLAHKKLDFEEFCAASVSVYQLEALEEWEQIATVAFEHFESEGSRAISVQELAEEMSLGPNAYPLLKDWIRSLDGKLNFLGYAKFLHGVTVRSSSSRPMR

SEQ ID NO: 90474 - protein, 502 aa, Arabidopsis thaliana
  peptide (1)..(502): Ceres Seq. ID no. 12724066
MAALRRRRGTAPHPRDGPIPEDSEAGGSGGGIGERLDKNFGFAKNFEGKYELGREVGRGHFGHTCWAKAKKGKIKGQTVAVKIISKSKMTSALSIEDVRREVKLLKALSGHSHMVKFYDVFEDSDNVFVVMELCEGGELLDSILARGGRYPEAEAKRILVQILSATAFFHLQGVVHRDLKPENFLFTSKNEDAVLKVIDFGLSDYARFDQRLNDVVGSAYYVAPEVLHRSYSTEADIWSIGVISYILLCGSRPFYGRTESAIFRCVLRANPNFDDLPWPSISPIAKDFVKRLLNKDHRKRMTAAQALAHPWLRDENPGLLLDFSIYKLVKSYIRASPFRRAALKSLSKAIPEEELVFLKAQFMLLEPEDGGLHLHNFTTALTRYATDAMIESRLPDILNMMQPLAHKKLDFEEFCAASVSVYQLEALEEWEQIATVAFEHFESEGSRAISVQELAEEMSLGPNAYPLLKDWIRSLDGKLNFLGYAKFLHGVTVRSSSSRPMR

SEQ ID NO: 90475 - protein, 414 aa, Arabidopsis thaliana
  peptide (1)..(414): Ceres Seq. ID no. 12724067
MTSALSIEDVRREVKLLKALSGHSHMVKFYDVFEDSDNVFVVMELCEGGELLDSILARGGRYPEAEAKRILVQILSATAFFHLQGVVHRDLKPENFLFTSKNEDAVLKVIDFGLSDYARFDQRLNDVVGSAYYVAPEVLHRSYSTEADIWSIGVISYILLCGSRPFYGRTESAIFRCVLRANPNFDDLPWPSISPIAKDFVKRLLNKDHRKRMTAAQALAHPWLRDENPGLLLDFSIYKLVKSYIRASPFRRAALKSLSKAIPEEELVFLKAQFMLLEPEDGGLHLHNFTTALTRYATDAMIESRLPDILNMMQPLAHKKLDFEEFCAASVSVYQLEALEEWEQIATVAFEHFESEGSRAISVQELAEEMSLGPNAYPLLKDWIRSLDGKLNFLGYAKFLHGVTVRSSSSRPMR

SEQ ID NO: 90476 - DNA, 1026 bp, Arabidopsis thaliana
  misc_feature (1)..(1026): Ceres Seq. ID no. 12724068
  misc_feature (1)..(1026): Ortholog of  Ceres SEQ ID NO 15172539 as cited in SEQ ID NO 57333
  misc_feature (1)..(1026): Ortholog of  Ceres SEQ ID NO 14315951 as cited in SEQ ID NO 57634
  misc_feature (1)..(1026): Ortholog of  Ceres SEQ ID NO 13597324 as cited in SEQ ID NO 64842
  misc_feature (1)..(1026): Ortholog of  Ceres SEQ ID NO 13658672 as cited in SEQ ID NO 66627
atgagtgggcgattttctcggtcaatctatgttggtaacttgcccggtgacattagggaacatgagattgaagatatcttttacaagtatggccgcattgtcgatattgaattgaaggttccacctcggcctccatgttattgctttgttgagtttgagcattctcgggatgctgaagatgccatcaagggccgtgatggctataatttggatggctgtcgcttgagggttgagcttgcacatggtggtcgaggacagtcttcaagtgatcgtcgtggtggctacggtggtggtggcagcggctatggtggtggaggtggtggtggtggatcagctcggtttggcgtctcacgacactctgaattccgagttattgtacgtgggctcccatcatctgcttcatggcaagatttgaaggatcatatgcggaaagctggtgatgtgtgctttgctgaggtgactcgagacagtgatggaacttatggtgttgtcgactacaccaattatgatgacatgaagtatgcaataaggaaacttgatgacacagagttcagaaacccctgggctagaggttttatccgggttaagaaatatgaaagctcccgatcaagaagcagaagcccaagcagaagcagaagcagaagcagaagtcgaagtcgtagccgaggccgtggtcgcagccatagccgcagtcgcagccttagcaggagcaagagcccaaggaaggatctgagtaaatcaccaaggcgatccctttccagatcgatttcaaaatctagatcgccatcgcccgacaagaagaagagtccccccaggcaagtcttctgcccttcttttggcaatgtcgagatcaaagtccaggtccaggtccagatcgaggtctccgtccaaatctcctcccaaggttcgcgaaggcagtgtgtgattttgttaagcggtgaaaatggccaaaagaaagagtgcgaaaaattctcaagtcaagatccattctctgtgtttttttttttgctgttttcggataattga

SEQ ID NO: 90477 - protein, 341 aa, Arabidopsis thaliana
  peptide (1)..(341): Ceres Seq. ID no. 12724069
MSGRFSRSIYVGNLPGDIREHEIEDIFYKYGRIVDIELKVPPRPPCYCFVEFEHSRDAEDAIKGRDGYNLDGCRLRVELAHGGRGQSSSDRRGGYGGGGSGYGGGGGGGGSARFGVSRHSEFRVIVRGLPSSASWQDLKDHMRKAGDVCFAEVTRDSDGTYGVVDYTNYDDMKYAIRKLDDTEFRNPWARGFIRVKKYESSRSRSRSPSRSRSRSRSRSRSRGRGRSHSRSRSLSRSKSPRKDLSKSPRRSLSRSISKSRSPSPDKKKSPPRQVFCPSFGNVEIKVQVQVQIEVSVQISSQGSRRQCVILLSGENGQKKECEKFSSQDPFSVFFFLLFSDN

SEQ ID NO: 90478 - protein, 200 aa, Arabidopsis thaliana
  peptide (1)..(200): Ceres Seq. ID no. 12724070
MRKAGDVCFAEVTRDSDGTYGVVDYTNYDDMKYAIRKLDDTEFRNPWARGFIRVKKYESSRSRSRSPSRSRSRSRSRSRSRGRGRSHSRSRSLSRSKSPRKDLSKSPRRSLSRSISKSRSPSPDKKKSPPRQVFCPSFGNVEIKVQVQVQIEVSVQISSQGSRRQCVILLSGENGQKKECEKFSSQDPFSVFFFLLFSDN

SEQ ID NO: 90479 - protein, 170 aa, Arabidopsis thaliana
  peptide (1)..(170): Ceres Seq. ID no. 12724071
MKYAIRKLDDTEFRNPWARGFIRVKKYESSRSRSRSPSRSRSRSRSRSRSRGRGRSHSRSRSLSRSKSPRKDLSKSPRRSLSRSISKSRSPSPDKKKSPPRQVFCPSFGNVEIKVQVQVQIEVSVQISSQGSRRQCVILLSGENGQKKECEKFSSQDPFSVFFFLLFSDN

SEQ ID NO: 90480 - DNA, 1799 bp, Arabidopsis thaliana
  misc_feature (1)..(1799): Ceres Seq. ID no. 12724084
  misc_feature (1)..(1799): Ortholog of  Ceres SEQ ID NO 13582619 as cited in SEQ ID NO 56520
  misc_feature (1)..(1799): Ortholog of  Ceres SEQ ID NO 12611392 as cited in SEQ ID NO 56826
  misc_feature (1)..(1799): Ortholog of  Ceres SEQ ID NO 13660872 as cited in SEQ ID NO 60830
  misc_feature (1)..(1799): Ortholog of  Ceres SEQ ID NO 12616221 as cited in SEQ ID NO 63291
acatctgccttcttcttcactttaccaaaatcatcgaatccatttttagggtttttgttttctctctaaatttttattgttatcttcttcgcgataccttggaatcgcatctctgagatagataaataattctgattcgtatctttaaatcttgggttcttcttcttctcgcgattcgtttaaaagagcagcatcaatgaatcagaatcttcatgtattatcaatggattcgttaccagttggattaagattccgtccaacagacgaggagctaatccgttactatctccgtaggaaaatcaacggtcacgatgacgacgtcaaagctatccgtgagatcgatatttgcaaatgggaaccttgggatttacctgatttttctgtgatcaaaactaaagactcagagtggctctacttctgtccattggatcggaagtatccgagtggaagtagacagaaccgggcaacagttgcagggtactggaaagccacaggaaaagaccggaagataaaatccggtaagactaacattattggtgtgaagagaactctagttttccacgcgggtagagctcctagggggacacgaaccaattggattattcatgagtatcgtgccacggaggatgatcttagtggtaccaatcctggccagagtccgtttgttatatgcaaattgttcaagaaagaagaactggttttaggggaagaagattcgaagtcagatgaagttgaagaacctgctgtctcgtctccaactgtcgaagtgactaagtcagaagtatctgaggtaattaaaacagaagacgtgaagcgtcatgacatagcagaatcttctcttgtaatctctggagattctcatagtgatgcttgtgatgaggctacaaccgcagagcttgtagattttaaatggtatccggaattggagtccttagatttcacgctgttctctccattacactctcaagtccaatctgagcttggatcctcttacaacacattccagcctggctcgagtaatttttcagggaacaacaacaacagcttccaaatccagactcagtatggtacaaatgaagtagatacgtatatatctgattttcttgattcgattctcaagagcccagacgaggatccagagaagcacaagtatgttttgcaaagtggttttgatgttgtagcaccagatcagattgcgcaagtgtgtcaacagggctcagcagttgacatgagcaatgatgtttcagtgacgggtatccagattaagagtcgccaggcacaaccctcaggttataccaatgactatatagcgcagggaaatggtccaagaaggctgcgtctgcaaagtaactttaatggcattaacacgaagaatcctgagcttcaagctataaagagagaggctgaggacacggttggagaaagtataaagaaaaggtgtggaaagctaatgagatcaaagaacgtgaccggttttgtgtttaaaaagattacgtcggtgaaatgttcatatggaggactctttagggcggcagtagttgcagttgtgttcttgatgtcagtctgcagtctaaccgtcgacttcagagcatctgcagtgtcctgaaaactgaaactttttgtaaatatagtgcttgaaccggcccgtgtttttgcttctgttattggtttcaggctttcgccagtttataagatatatttgtttgtagtttttacatgtagttaggctgcttatgtaaacgttatgatgacagagaggtcaagactctatttacttctttgacttattagagttcttc

SEQ ID NO: 90481 - protein, 469 aa, Arabidopsis thaliana
  peptide (1)..(469): Ceres Seq. ID no. 12724085
MNQNLHVLSMDSLPVGLRFRPTDEELIRYYLRRKINGHDDDVKAIREIDICKWEPWDLPDFSVIKTKDSEWLYFCPLDRKYPSGSRQNRATVAGYWKATGKDRKIKSGKTNIIGVKRTLVFHAGRAPRGTRTNWIIHEYRATEDDLSGTNPGQSPFVICKLFKKEELVLGEEDSKSDEVEEPAVSSPTVEVTKSEVSEVIKTEDVKRHDIAESSLVISGDSHSDACDEATTAELVDFKWYPELESLDFTLFSPLHSQVQSELGSSYNTFQPGSSNFSGNNNNSFQIQTQYGTNEVDTYISDFLDSILKSPDEDPEKHKYVLQSGFDVVAPDQIAQVCQQGSAVDMSNDVSVTGIQIKSRQAQPSGYTNDYIAQGNGPRRLRLQSNFNGINTKNPELQAIKREAEDTVGESIKKRCGKLMRSKNVTGFVFKKITSVKCSYGGLFRAAVVAVVFLMSVCSLTVDFRASAVS

SEQ ID NO: 90482 - protein, 460 aa, Arabidopsis thaliana
  peptide (1)..(460): Ceres Seq. ID no. 12724086
MDSLPVGLRFRPTDEELIRYYLRRKINGHDDDVKAIREIDICKWEPWDLPDFSVIKTKDSEWLYFCPLDRKYPSGSRQNRATVAGYWKATGKDRKIKSGKTNIIGVKRTLVFHAGRAPRGTRTNWIIHEYRATEDDLSGTNPGQSPFVICKLFKKEELVLGEEDSKSDEVEEPAVSSPTVEVTKSEVSEVIKTEDVKRHDIAESSLVISGDSHSDACDEATTAELVDFKWYPELESLDFTLFSPLHSQVQSELGSSYNTFQPGSSNFSGNNNNSFQIQTQYGTNEVDTYISDFLDSILKSPDEDPEKHKYVLQSGFDVVAPDQIAQVCQQGSAVDMSNDVSVTGIQIKSRQAQPSGYTNDYIAQGNGPRRLRLQSNFNGINTKNPELQAIKREAEDTVGESIKKRCGKLMRSKNVTGFVFKKITSVKCSYGGLFRAAVVAVVFLMSVCSLTVDFRASAVS

SEQ ID NO: 90483 - DNA, 2442 bp, Arabidopsis thaliana
  misc_feature (1)..(2442): Ceres Seq. ID no. 12724098
  misc_feature (1)..(2442): Ortholog of  Ceres SEQ ID NO 13600310 as cited in SEQ ID NO 5086
  misc_feature (1)..(2442): Ortholog of  Ceres SEQ ID NO 15172491 as cited in SEQ ID NO 58719
  misc_feature (1)..(2442): Ortholog of  Ceres SEQ ID NO 15180362 as cited in SEQ ID NO 0
atgccaagcattagagctccagctgcgaagaagaccactacactcacggttgctgtgaaatgtagaccgttaatggagaaagaacgtggtagagacattgttcgagtgaataactctaaggaagtggttgtgttagacccagacttatccaaggattatcttgaccgaattcagaatcggactaaagagaagaaatattgttttgatcatgcttttggacctgagagcaccaacaagaatgtgtataggagtatgtcttctgtgatctctagtgttgttcatggactcaatgctacagtttttgcctatggttccactggaagtggcaaaacatatacaatggttggaactcgaagtgatcctggattgatggttctcagcttgaatactatttttgatatgatcaagagtgacaagagctcagatgagtttgaagtgacttgctcatatcttgaagtttacaatgaagttatctacgatctgcttgaaaaatcctctggtcatttagagcttagagaggatccagagcagggaatagtagttgcaggcctgcgatcaataaaggtccattctgctgataggattcttgagctgctgaacttggggaacagtagacgaaaaactgagagcacagagatgaatggaacatcatcaaggtctcatgcagttctagagattgcagtcaaaagaaggcaaaagaatcaaaatcaagtcatgagagggaaactcgcccttgtagatcttgctgggagtgaaagagctgctgagacaaacaatggaggtcaaaaattgagggatggagcaaatatcaatcgctcactccttgcactagcaaattgcataaatgctttggggaagcaacacaaaaagggtcttgcttatgtaccataccgaaacagcaaacttacgcggattctcaaagatggtctgagtgggaactcccagacagtgatggttgcaactatatcacctgctgatagtcagtatcatcatactgtaaacacattgaaatatgctgaccgagcaaaagagattaagacacacatccagaaaaatattggtaccatcgatactcatatgtcagactaccaacgaatgatcgacaatcttcaaagtgaggtttctcagctgaagacacaactagctgaaaaagagtcgcagctaagcatcaaaccttttgaaagaggtgttgaacgtgaactttcttggttggatggtttaagccaccagatcagtgaaaatgttcaagaccgtataaacttacagaaggcgttatttgagcttgaggaaactaacctcagaaatcgcactgaacttcagcatcttgatgatgcaattgcgaaacaggcgacagagaaagatgttgtcgaagctctaagtagcagacgacaagtaatacttgataatatccgcgacaatgatgaagccggtgttaactaccagagggatattgaagaaaatgaaaaacatcgttgcgaactacaggatatgctcaatgaagcaataaataacaatggaaacaaaacgtatctgcatattcttaatcagtataagctcctggggatgggtaatacggaactacagtttgaaatggcaatgagggaccaaattatttacaaccaaagggaagcccagagaaacctatggaatttgctcatgggtttaggagttgaagagaaacaagtgttcgatctcgctgcaaaacaaggaatcacaatcgaagactggagtagtatagcgttgtttccaggacttccttaccggaaacagacaccgagtttcataccagcaaacatccctttcgtgggccactcatattctaaatcctcctgcactttccagagctatcaagacccttcttcgaaaggacaacaatgggctccaactcctactttatgcagagaagaacaccacagctcttactacttcatgagacaggagccaccagcatttgtcaatcttaggaaaagccacgatggttgggttggtggcagcagaccagcttcacggattgacacaggaggcaatcatcgccgagtctcatatccacaaactgtgaacaattcttctcctcggatggcctcaggtcctactttttaccagactcctcaaagggaaatgttgctcaacacaacgagtccttatagtagtccgcgagtgggactcatcaacggggccaccaccccgtccgtgcaacctttctatggaagtcctcgtgccgtgactgtgagaaacggttcatacaacactccactcgcccccgctgcagtttcaactaaaggtgcgagaaaccaacaacgagtgtttggaacgagcccactctcaggaaccaaaggcgtcaagaactcttcatatggacagaacagtcacacaaagttgtacagaggaggaggcactaaaggtcacagtaaaggaaacaatactcaacgccaacaccaatga

SEQ ID NO: 90484 - protein, 813 aa, Arabidopsis thaliana
  peptide (1)..(813): Ceres Seq. ID no. 12724099
MPSIRAPAAKKTTTLTVAVKCRPLMEKERGRDIVRVNNSKEVVVLDPDLSKDYLDRIQNRTKEKKYCFDHAFGPESTNKNVYRSMSSVISSVVHGLNATVFAYGSTGSGKTYTMVGTRSDPGLMVLSLNTIFDMIKSDKSSDEFEVTCSYLEVYNEVIYDLLEKSSGHLELREDPEQGIVVAGLRSIKVHSADRILELLNLGNSRRKTESTEMNGTSSRSHAVLEIAVKRRQKNQNQVMRGKLALVDLAGSERAAETNNGGQKLRDGANINRSLLALANCINALGKQHKKGLAYVPYRNSKLTRILKDGLSGNSQTVMVATISPADSQYHHTVNTLKYADRAKEIKTHIQKNIGTIDTHMSDYQRMIDNLQSEVSQLKTQLAEKESQLSIKPFERGVERELSWLDGLSHQISENVQDRINLQKALFELEETNLRNRTELQHLDDAIAKQATEKDVVEALSSRRQVILDNIRDNDEAGVNYQRDIEENEKHRCELQDMLNEAINNNGNKTYLHILNQYKLLGMGNTELQFEMAMRDQIIYNQREAQRNLWNLLMGLGVEEKQVFDLAAKQGITIEDWSSIALFPGLPYRKQTPSFIPANIPFVGHSYSKSSCTFQSYQDPSSKGQQWAPTPTLCREEHHSSYYFMRQEPPAFVNLRKSHDGWVGGSRPASRIDTGGNHRRVSYPQTVNNSSPRMASGPTFYQTPQREMLLNTTSPYSSPRVGLINGATTPSVQPFYGSPRAVTVRNGSYNTPLAPAAVSTKGARNQQRVFGTSPLSGTKGVKNSSYGQNSHTKLYRGGGTKGHSKGNNTQRQHQ

SEQ ID NO: 90485 - protein, 789 aa, Arabidopsis thaliana
  peptide (1)..(789): Ceres Seq. ID no. 12724100
MEKERGRDIVRVNNSKEVVVLDPDLSKDYLDRIQNRTKEKKYCFDHAFGPESTNKNVYRSMSSVISSVVHGLNATVFAYGSTGSGKTYTMVGTRSDPGLMVLSLNTIFDMIKSDKSSDEFEVTCSYLEVYNEVIYDLLEKSSGHLELREDPEQGIVVAGLRSIKVHSADRILELLNLGNSRRKTESTEMNGTSSRSHAVLEIAVKRRQKNQNQVMRGKLALVDLAGSERAAETNNGGQKLRDGANINRSLLALANCINALGKQHKKGLAYVPYRNSKLTRILKDGLSGNSQTVMVATISPADSQYHHTVNTLKYADRAKEIKTHIQKNIGTIDTHMSDYQRMIDNLQSEVSQLKTQLAEKESQLSIKPFERGVERELSWLDGLSHQISENVQDRINLQKALFELEETNLRNRTELQHLDDAIAKQATEKDVVEALSSRRQVILDNIRDNDEAGVNYQRDIEENEKHRCELQDMLNEAINNNGNKTYLHILNQYKLLGMGNTELQFEMAMRDQIIYNQREAQRNLWNLLMGLGVEEKQVFDLAAKQGITIEDWSSIALFPGLPYRKQTPSFIPANIPFVGHSYSKSSCTFQSYQDPSSKGQQWAPTPTLCREEHHSSYYFMRQEPPAFVNLRKSHDGWVGGSRPASRIDTGGNHRRVSYPQTVNNSSPRMASGPTFYQTPQREMLLNTTSPYSSPRVGLINGATTPSVQPFYGSPRAVTVRNGSYNTPLAPAAVSTKGARNQQRVFGTSPLSGTKGVKNSSYGQNSHTKLYRGGGTKGHSKGNNTQRQHQ

SEQ ID NO: 90486 - protein, 729 aa, Arabidopsis thaliana
  peptide (1)..(729): Ceres Seq. ID no. 12724101
MSSVISSVVHGLNATVFAYGSTGSGKTYTMVGTRSDPGLMVLSLNTIFDMIKSDKSSDEFEVTCSYLEVYNEVIYDLLEKSSGHLELREDPEQGIVVAGLRSIKVHSADRILELLNLGNSRRKTESTEMNGTSSRSHAVLEIAVKRRQKNQNQVMRGKLALVDLAGSERAAETNNGGQKLRDGANINRSLLALANCINALGKQHKKGLAYVPYRNSKLTRILKDGLSGNSQTVMVATISPADSQYHHTVNTLKYADRAKEIKTHIQKNIGTIDTHMSDYQRMIDNLQSEVSQLKTQLAEKESQLSIKPFERGVERELSWLDGLSHQISENVQDRINLQKALFELEETNLRNRTELQHLDDAIAKQATEKDVVEALSSRRQVILDNIRDNDEAGVNYQRDIEENEKHRCELQDMLNEAINNNGNKTYLHILNQYKLLGMGNTELQFEMAMRDQIIYNQREAQRNLWNLLMGLGVEEKQVFDLAAKQGITIEDWSSIALFPGLPYRKQTPSFIPANIPFVGHSYSKSSCTFQSYQDPSSKGQQWAPTPTLCREEHHSSYYFMRQEPPAFVNLRKSHDGWVGGSRPASRIDTGGNHRRVSYPQTVNNSSPRMASGPTFYQTPQREMLLNTTSPYSSPRVGLINGATTPSVQPFYGSPRAVTVRNGSYNTPLAPAAVSTKGARNQQRVFGTSPLSGTKGVKNSSYGQNSHTKLYRGGGTKGHSKGNNTQRQHQ

SEQ ID NO: 90487 - DNA, 954 bp, Arabidopsis thaliana
  misc_feature (1)..(954): Ceres Seq. ID no. 12724102
  misc_feature (1)..(954): Ortholog of  Ceres SEQ ID NO 14303446 as cited in SEQ ID NO 59378
atggcagaggaaattccagcaacagcatcattcactccatacgtccattcacaaactctaacatctcacaatcgcgccgtctcctccgtgaaattctcctccgatggacgtctcctcgcatccgcctccgccgacaaaacaatccgcacttacacaatcaacaccattaacgatccaatcgccgagcccgtacaagaattcaccggccatgaaaacggtatctccgatgttgcattctcttcagacgcgaggtttatagtctcagcttccgatgacaaaaccttaaagctatgggacgttgaaactggttcattgatcaagacgcttattggacacactaattacgccttctgtgtcaatttcaatcctcaatcaaatatgattgtatctggttcgtttgatgaaactgttcggatctgggatgtcactactggaaagtgtttgaaagttcttcccgcgcattctgatcctgttactgctgttgattttaatagagatgggtctctcattgtttcgagtagctatgatgggttgtgtcgtatatgggattctgggactggtcattgtgtgaaaactctgattgatgatgagaatcctcctgtttcgtttgttagattctctcctaatggcaagtttatcctcgttggtacacttgataacacgctgaggttgtggaacatttcgtctgctaagttcctcaaaacatacactggccacgtgaacgcacagtattgcatttcctctgcgttctccgtcacaaatggaaagcgaatagtcagtggatccgaggacaactgtgtacacatgtgggagctaaactccaagaaactgctacagaaacttgagggtcatactgagaccgtcatgaacgtagcatgccacccgacagagaacttgatcgcatcaggctcgctcgacaagacagtaaggatttggacacagaagaaagaataa

SEQ ID NO: 90488 - protein, 317 aa, Arabidopsis thaliana
  peptide (1)..(317): Ceres Seq. ID no. 12724103
MAEEIPATASFTPYVHSQTLTSHNRAVSSVKFSSDGRLLASASADKTIRTYTINTINDPIAEPVQEFTGHENGISDVAFSSDARFIVSASDDKTLKLWDVETGSLIKTLIGHTNYAFCVNFNPQSNMIVSGSFDETVRIWDVTTGKCLKVLPAHSDPVTAVDFNRDGSLIVSSSYDGLCRIWDSGTGHCVKTLIDDENPPVSFVRFSPNGKFILVGTLDNTLRLWNISSAKFLKTYTGHVNAQYCISSAFSVTNGKRIVSGSEDNCVHMWELNSKKLLQKLEGHTETVMNVACHPTENLIASGSLDKTVRIWTQKKE

SEQ ID NO: 90489 - protein, 191 aa, Arabidopsis thaliana
  peptide (1)..(191): Ceres Seq. ID no. 12724104
MIVSGSFDETVRIWDVTTGKCLKVLPAHSDPVTAVDFNRDGSLIVSSSYDGLCRIWDSGTGHCVKTLIDDENPPVSFVRFSPNGKFILVGTLDNTLRLWNISSAKFLKTYTGHVNAQYCISSAFSVTNGKRIVSGSEDNCVHMWELNSKKLLQKLEGHTETVMNVACHPTENLIASGSLDKTVRIWTQKKE

SEQ ID NO: 90490 - DNA, 2214 bp, Arabidopsis thaliana
  misc_feature (1)..(2214): Ceres Seq. ID no. 12724109
  misc_feature (1)..(2214): Ortholog of  Ceres SEQ ID NO 12586556 as cited in SEQ ID NO 64667
  misc_feature (1)..(2214): Ortholog of  Ceres SEQ ID NO 13660894 as cited in SEQ ID NO 67475
atgagaaaagctctatgtttaacagagagtttatcagccatagcagaaaactctaccacgttgctcaatttaaaccggagactaacgggtctcactcgttccggcgagaacagaaacgctctcaagctcttcgccgatgttcaccgttgcacaactctgagaccagaccagtacagtgtctcgttagctattactacagctaggcacctccgtgatactatctttggtggtcaggttcattgctatgcgattcgctctggtttattgtgtcactctcacgtttccaatacgcttctttcgctatatgagagattagggaacttagcttcgttgaagaagaagttcgacgagattgatgaacctgatgtttattcatggacgacgcttctgagtgcaagttttaagcttggtgatatagagtatgcctttgaggtgtttgataaaatgcctgagagagatgatgttgcgatttggaatgctatgattactggttgcaaagagagtgggtatcacgaaacgagtgttgagttgtttcgagaaatgcataagcttggtgttcgacatgataagtttgggtttgctactattttgagtatgtgtgactatggttctttggattttggtaagcaggtgcattcgctggttataaaagctggattttttattgcttcatctgttgtgaatgcactaattacaatgtatttcaattgccaagtggttgttgatgcttgtctggtgtttgaagaaactgatgttgctgttcgtgatcaggttacttttaatgtggttattgatggtttggctggtttcaaaagagacgagtctttgttggtgtttagaaaaatgctagaagctagtcttagaccaaccgatttgacctttgttagtgttatgggttcatgttcatgtgcggctatgggacaccaagtacatggactagccatcaagacaggttatgagaagtatactttggttagcaatgccactatgacaatgtattcttcttttgaagattttggtgcggctcataaggtttttgagtcattggaagagaaagacttggttacttggaacacaatgatctcaagttataaccaagcgaaattgggcaagtctgcgatgtcggtatacaagagaatgcacataataggagttaaaccggatgagtttacttttggaagtcttttagcaacctctctggatttagatgtcctggagatggttcaagcgtgtataatcaagtttgggcttagttcaaagattgaaatttccaatgcgttgatatctgcctactcgaagaatggacagatagaaaaagctgacctattatttgaaagatctctgaggaagaatcttatctcatggaatgcgataatctcagggttttaccataacgggtttccttttgaaggtttggaaaggttctcgtgcttgctagagtcagaggtccgaatcctacctgatgcttatactctcagtacccttttgagcatttgcgtaagcacttcatctttgatgctcggaagccaaactcacgcttacgtccttagacacggccaattcaaggagacattgataggtaatgccctcataaacatgtactctcaatgcgggactatacaaaactctcttgaagtgttcaatcagatgtctgaaaaagatgttgtgtcatggaattctctgatctctgcatactcgagacacggtgaaggagagaacgcggttaatacctacaagacaatgcaagatgaaggaaaggtcattcccgatgcagccacattctcagcggttctctctgcttgcagccacgccggtttagtggaagagggactcgagattttcaactcaatggtggaatttcacggtgtgatacgaaatgtagatcatttttcatgcttagttgaccttcttggtcgagcgggccacctcgatgaagcggaaagcttggtgaaaatcagcgaaaagaccatcgggtctcgggtagatgtgtggtgggctttgtttagtgcttgtgctgctcatggagatttgaagctagggaagatggttgcgaagttactaatggagaaagagaaggatgatccatcagtttatgttcaactgtccaatatctacgcaggagctggtatgtggaaagaagcagaagagacgagaagagccataaacatgattggagctatgaaacaacgaggttgcagctggatgagattgtaa

SEQ ID NO: 90491 - protein, 737 aa, Arabidopsis thaliana
  peptide (1)..(737): Ceres Seq. ID no. 12724110
MRKALCLTESLSAIAENSTTLLNLNRRLTGLTRSGENRNALKLFADVHRCTTLRPDQYSVSLAITTARHLRDTIFGGQVHCYAIRSGLLCHSHVSNTLLSLYERLGNLASLKKKFDEIDEPDVYSWTTLLSASFKLGDIEYAFEVFDKMPERDDVAIWNAMITGCKESGYHETSVELFREMHKLGVRHDKFGFATILSMCDYGSLDFGKQVHSLVIKAGFFIASSVVNALITMYFNCQVVVDACLVFEETDVAVRDQVTFNVVIDGLAGFKRDESLLVFRKMLEASLRPTDLTFVSVMGSCSCAAMGHQVHGLAIKTGYEKYTLVSNATMTMYSSFEDFGAAHKVFESLEEKDLVTWNTMISSYNQAKLGKSAMSVYKRMHIIGVKPDEFTFGSLLATSLDLDVLEMVQACIIKFGLSSKIEISNALISAYSKNGQIEKADLLFERSLRKNLISWNAIISGFYHNGFPFEGLERFSCLLESEVRILPDAYTLSTLLSICVSTSSLMLGSQTHAYVLRHGQFKETLIGNALINMYSQCGTIQNSLEVFNQMSEKDVVSWNSLISAYSRHGEGENAVNTYKTMQDEGKVIPDAATFSAVLSACSHAGLVEEGLEIFNSMVEFHGVIRNVDHFSCLVDLLGRAGHLDEAESLVKISEKTIGSRVDVWWALFSACAAHGDLKLGKMVAKLLMEKEKDDPSVYVQLSNIYAGAGMWKEAEETRRAINMIGAMKQRGCSWMRL

SEQ ID NO: 90492 - protein, 589 aa, Arabidopsis thaliana
  peptide (1)..(589): Ceres Seq. ID no. 12724111
MPERDDVAIWNAMITGCKESGYHETSVELFREMHKLGVRHDKFGFATILSMCDYGSLDFGKQVHSLVIKAGFFIASSVVNALITMYFNCQVVVDACLVFEETDVAVRDQVTFNVVIDGLAGFKRDESLLVFRKMLEASLRPTDLTFVSVMGSCSCAAMGHQVHGLAIKTGYEKYTLVSNATMTMYSSFEDFGAAHKVFESLEEKDLVTWNTMISSYNQAKLGKSAMSVYKRMHIIGVKPDEFTFGSLLATSLDLDVLEMVQACIIKFGLSSKIEISNALISAYSKNGQIEKADLLFERSLRKNLISWNAIISGFYHNGFPFEGLERFSCLLESEVRILPDAYTLSTLLSICVSTSSLMLGSQTHAYVLRHGQFKETLIGNALINMYSQCGTIQNSLEVFNQMSEKDVVSWNSLISAYSRHGEGENAVNTYKTMQDEGKVIPDAATFSAVLSACSHAGLVEEGLEIFNSMVEFHGVIRNVDHFSCLVDLLGRAGHLDEAESLVKISEKTIGSRVDVWWALFSACAAHGDLKLGKMVAKLLMEKEKDDPSVYVQLSNIYAGAGMWKEAEETRRAINMIGAMKQRGCSWMRL

SEQ ID NO: 90493 - protein, 577 aa, Arabidopsis thaliana
  peptide (1)..(577): Ceres Seq. ID no. 12724112
MITGCKESGYHETSVELFREMHKLGVRHDKFGFATILSMCDYGSLDFGKQVHSLVIKAGFFIASSVVNALITMYFNCQVVVDACLVFEETDVAVRDQVTFNVVIDGLAGFKRDESLLVFRKMLEASLRPTDLTFVSVMGSCSCAAMGHQVHGLAIKTGYEKYTLVSNATMTMYSSFEDFGAAHKVFESLEEKDLVTWNTMISSYNQAKLGKSAMSVYKRMHIIGVKPDEFTFGSLLATSLDLDVLEMVQACIIKFGLSSKIEISNALISAYSKNGQIEKADLLFERSLRKNLISWNAIISGFYHNGFPFEGLERFSCLLESEVRILPDAYTLSTLLSICVSTSSLMLGSQTHAYVLRHGQFKETLIGNALINMYSQCGTIQNSLEVFNQMSEKDVVSWNSLISAYSRHGEGENAVNTYKTMQDEGKVIPDAATFSAVLSACSHAGLVEEGLEIFNSMVEFHGVIRNVDHFSCLVDLLGRAGHLDEAESLVKISEKTIGSRVDVWWALFSACAAHGDLKLGKMVAKLLMEKEKDDPSVYVQLSNIYAGAGMWKEAEETRRAINMIGAMKQRGCSWMRL

SEQ ID NO: 90494 - DNA, 825 bp, Arabidopsis thaliana
  misc_feature (1)..(825): Ceres Seq. ID no. 12724113
  misc_feature (1)..(825): Ortholog of  Ceres SEQ ID NO 14311074 as cited in SEQ ID NO 53253
atgacaaggagtcaccggttactccttctccttctactaatcttccaaacggcacaacgtttaaccaccgccgatccaaacgacgaagcgtgtttgaaaaacctccggcaaaacttagaagatccggcgagtaatctccgtaactggacaaactccgtcttctcaaatccatgctccggcttcacctcatacctccccggagctacctgtaacaacggaagaatctacaaactctcactcacaaacctctctctccgcggctcaatctcaccgtttctatcaaactgtacaaatctccaatccctagatctatcatcaaaccagatctccggcgtaatcccaccggagattcagtatctcgttaacctcgccgtactaaacctctcatcgaatcatctctccggcgaaatcactccgcagctcgctctttgcgcttacttaaacgtaatcgatctccacgataacgaattatccggtcagattccgcagcaattaggtctattagcgaggctctcggcgtttgatgtgtcgaataacaaactttccggtcagattccgacgtatttgtcgaataggactgggaatttcccgaggtttaacgcgagttcgtttatagggaataaaggattgtatggttatccgttgcaggagatgatgatgaagagtaaaggtttgtctgtgatggccattgttgggattggacttgggagtggaatcgcgagcttgatgattagttttactggtgtttgtttatggttgaggattactgagaagaagattgttgaagaagaaggtaagattagtcaatctatgcctgattactaa

SEQ ID NO: 90495 - protein, 274 aa, Arabidopsis thaliana
  peptide (1)..(274): Ceres Seq. ID no. 12724114
MTRSHRLLLLLLLIFQTAQRLTTADPNDEACLKNLRQNLEDPASNLRNWTNSVFSNPCSGFTSYLPGATCNNGRIYKLSLTNLSLRGSISPFLSNCTNLQSLDLSSNQISGVIPPEIQYLVNLAVLNLSSNHLSGEITPQLALCAYLNVIDLHDNELSGQIPQQLGLLARLSAFDVSNNKLSGQIPTYLSNRTGNFPRFNASSFIGNKGLYGYPLQEMMMKSKGLSVMAIVGIGLGSGIASLMISFTGVCLWLRITEKKIVEEEGKISQSMPDY

SEQ ID NO: 90496 - DNA, 1101 bp, Arabidopsis thaliana
  misc_feature (1)..(1101): Ceres Seq. ID no. 12724115
  misc_feature (1)..(1101): Ortholog of  Ceres SEQ ID NO 12625831 as cited in SEQ ID NO 65139
atggataagttagggttgagcaaaaggggttattttgatttcgctctcaagaacaaaaaatggatattattagcagtaagtggttacggtgcttttagggtttatcattctccttcaatttcccagaaacggaaacgaatctctaagcttttcactcttcttctcaatctcatcgaagctgcttctgattccgctgaaaccgttagtgttatctccaaagatctaacagagtttctcagatccgattcagatcaaatcccaaatagtttgaagcagatttccaaaatcgcgaaatcagatgagcttaattcttctttgatccgattcactcaagctatgaccgttggattgatccgtggaattgatgatggatccgggtcgggttttactgatcgggttatggataagctctttacgaaatccgggtcgggttttgcttcggcgattgttggtagctttgcgaggaacttagtcgttgcgctttattcctccgccggcgatggatcgaattcgaaattgctcgacgcggttttctctgatgatgggaggagattgatcggcgattgcgttcagcgtttcgtgagtactgcggtttcggtttatctcgataagacgagcgatgttaacgtattcgacgatttattcgccggtttaaccaatccgaaacatgaaggaaaggttaagcaaacgcttgtaacgctatgtaacagcgcggttgagacgtttgtaagagcgtcgcggaaaccggttcaattgaaccggtcatcgtcatgtcaagattcgtctcaaacgctgaccgttggatcaacgaaacaagcgacgtggatcgatcgggtgtcgtcgtcgttatcggtaccgagtaaccggaaatatgtggtggatttaaccgggcgggtaacgtttgagacggttagatcgttgttagaagtgttgattgagagagcaaatggtaaagtggagagttatgtggagaaagtgagagagagaggaaatgagacaaggagatttgtgagagttaaaacatcacttcttcatagtttatgtttgtctctctgtttacagattgttgaagctccatggatgctgactccaagaaactga

SEQ ID NO: 90497 - protein, 366 aa, Arabidopsis thaliana
  peptide (1)..(366): Ceres Seq. ID no. 12724116
MDKLGLSKRGYFDFALKNKKWILLAVSGYGAFRVYHSPSISQKRKRISKLFTLLLNLIEAASDSAETVSVISKDLTEFLRSDSDQIPNSLKQISKIAKSDELNSSLIRFTQAMTVGLIRGIDDGSGSGFTDRVMDKLFTKSGSGFASAIVGSFARNLVVALYSSAGDGSNSKLLDAVFSDDGRRLIGDCVQRFVSTAVSVYLDKTSDVNVFDDLFAGLTNPKHEGKVKQTLVTLCNSAVETFVRASRKPVQLNRSSSCQDSSQTLTVGSTKQATWIDRVSSSLSVPSNRKYVVDLTGRVTFETVRSLLEVLIERANGKVESYVEKVRERGNETRRFVRVKTSLLHSLCLSLCLQIVEAPWMLTPRN

SEQ ID NO: 90498 - protein, 254 aa, Arabidopsis thaliana
  peptide (1)..(254): Ceres Seq. ID no. 12724117
MTVGLIRGIDDGSGSGFTDRVMDKLFTKSGSGFASAIVGSFARNLVVALYSSAGDGSNSKLLDAVFSDDGRRLIGDCVQRFVSTAVSVYLDKTSDVNVFDDLFAGLTNPKHEGKVKQTLVTLCNSAVETFVRASRKPVQLNRSSSCQDSSQTLTVGSTKQATWIDRVSSSLSVPSNRKYVVDLTGRVTFETVRSLLEVLIERANGKVESYVEKVRERGNETRRFVRVKTSLLHSLCLSLCLQIVEAPWMLTPRN

SEQ ID NO: 90499 - protein, 233 aa, Arabidopsis thaliana
  peptide (1)..(233): Ceres Seq. ID no. 12724118
MDKLFTKSGSGFASAIVGSFARNLVVALYSSAGDGSNSKLLDAVFSDDGRRLIGDCVQRFVSTAVSVYLDKTSDVNVFDDLFAGLTNPKHEGKVKQTLVTLCNSAVETFVRASRKPVQLNRSSSCQDSSQTLTVGSTKQATWIDRVSSSLSVPSNRKYVVDLTGRVTFETVRSLLEVLIERANGKVESYVEKVRERGNETRRFVRVKTSLLHSLCLSLCLQIVEAPWMLTPRN

SEQ ID NO: 90500 - DNA, 681 bp, Arabidopsis thaliana
  misc_feature (1)..(681): Ceres Seq. ID no. 12724127
  misc_feature (1)..(681): Ortholog of  Ceres SEQ ID NO 12609869 as cited in SEQ ID NO 52065
  misc_feature (1)..(681): Ortholog of  Ceres SEQ ID NO 14301506 as cited in SEQ ID NO 61159
  misc_feature (1)..(681): Ortholog of  Ceres SEQ ID NO 13597124 as cited in SEQ ID NO 64173
  misc_feature (1)..(681): Ortholog of  Ceres SEQ ID NO 12780602 as cited in SEQ ID NO 65695
atgagtaagggtccgggactattcgccgacatcggaaaatatgcgaaagatctgttgacgagagattacagtaccgatcagaaattcagtatctccactaacagtgtctccggcgtcgctcttacttccactgctctcaagaatggagtactacatgctgctaatgttgccacacaatacaagtacagaaacactttcttcgatgtcaagatcgatactgatttcaatgttaagtctcttgtttatccaatgaataaatttgtctcaattgatcacaatacgctaactgggtatgacaccacatctcgaactttcacaaagtacaacgtcggagtcagtgtcacaaagccagatcaatgtgtctccataatattgggagataaaggagattcgatcaaagcctcttatgtatattacctagatgagtcgacgagaagcgcaacagttggagaggttatcaggaaaatctcaactaatgagacaacagtaactgttggtggattgtatgcggttgatcacttaacgaatgtgaaagctaagctgaacagtaacggtaagtttggagctcttctgcaacacgagggccttccaaaatcgatagtgacaatctcaggtgagattgataccaagacattagacaagtacccaaggttaggtctctcgctttcccttaaaccttga

SEQ ID NO: 90501 - protein, 226 aa, Arabidopsis thaliana
  peptide (1)..(226): Ceres Seq. ID no. 12724128
MSKGPGLFADIGKYAKDLLTRDYSTDQKFSISTNSVSGVALTSTALKNGVLHAANVATQYKYRNTFFDVKIDTDFNVKSLVYPMNKFVSIDHNTLTGYDTTSRTFTKYNVGVSVTKPDQCVSIILGDKGDSIKASYVYYLDESTRSATVGEVIRKISTNETTVTVGGLYAVDHLTNVKAKLNSNGKFGALLQHEGLPKSIVTISGEIDTKTLDKYPRLGLSLSLKP

SEQ ID NO: 90502 - protein, 143 aa, Arabidopsis thaliana
  peptide (1)..(143): Ceres Seq. ID no. 12724129
MNKFVSIDHNTLTGYDTTSRTFTKYNVGVSVTKPDQCVSIILGDKGDSIKASYVYYLDESTRSATVGEVIRKISTNETTVTVGGLYAVDHLTNVKAKLNSNGKFGALLQHEGLPKSIVTISGEIDTKTLDKYPRLGLSLSLKP

SEQ ID NO: 90503 - DNA, 648 bp, Arabidopsis thaliana
  misc_feature (1)..(648): Ceres Seq. ID no. 12724130
  misc_feature (1)..(648): Ortholog of  Ceres SEQ ID NO 14305854 as cited in SEQ ID NO 52331
  misc_feature (1)..(648): Ortholog of  Ceres SEQ ID NO 15168588 as cited in SEQ ID NO 60235
atggctctcgacactctcaattctcccacctccaccaccacaaccaccgctcctcctcctttcctccgttgcctcgacgaaaccgagcccgaaaacctcgaatcatggaccaaaagaaaacgtacaaaacgtcaccgtatagatcaaccaaaccctcctccttctgaagaagagtatctcgctctttgcctccttatgctcgctcgtggctcctccgatcatcactctccaccgtcggatcatcactctctttctccactgtccgatcatcagaaagattacaagtgttccgtctgtggcaaatctttcccgtcttaccaagcgttaggtggacacaaaacaagtcaccggaaaccggttagtgtcgatgttaataatagtaacggaaccgttactaataacggaaatattagtaacggtttagttggtcaaagtgggaagactcataactgctctatatgttttaagtcgtttccctctggtcaagcattgggtggtcacaaacgttgtcactatgatggtggtaacggtaacagtaacggtgacaatagccacaagtttgacctaaatttaccggctgatcaagttagtgatgagacaattggaaaaagtcaactctccggtgaagaaacaaagtcggtgttgtga

SEQ ID NO: 90504 - protein, 215 aa, Arabidopsis thaliana
  peptide (1)..(215): Ceres Seq. ID no. 12724131
MALDTLNSPTSTTTTTAPPPFLRCLDETEPENLESWTKRKRTKRHRIDQPNPPPSEEEYLALCLLMLARGSSDHHSPPSDHHSLSPLSDHQKDYKCSVCGKSFPSYQALGGHKTSHRKPVSVDVNNSNGTVTNNGNISNGLVGQSGKTHNCSICFKSFPSGQALGGHKRCHYDGGNGNSNGDNSHKFDLNLPADQVSDETIGKSQLSGEETKSVL

SEQ ID NO: 90505 - protein, 150 aa, Arabidopsis thaliana
  peptide (1)..(150): Ceres Seq. ID no. 12724132
MLARGSSDHHSPPSDHHSLSPLSDHQKDYKCSVCGKSFPSYQALGGHKTSHRKPVSVDVNNSNGTVTNNGNISNGLVGQSGKTHNCSICFKSFPSGQALGGHKRCHYDGGNGNSNGDNSHKFDLNLPADQVSDETIGKSQLSGEETKSVL

SEQ ID NO: 90506 - DNA, 1596 bp, Arabidopsis thaliana
  misc_feature (1)..(1596): Ceres Seq. ID no. 12724155
  misc_feature (1)..(1596): Ortholog of  Ceres SEQ ID NO 13656091 as cited in SEQ ID NO 69094
atggtggctgtcttctacaaagacatgttgagctggtacttactcacccttaagatccgcgaaaaactcgaaacacaaaaccaagaatccgtattggttaatcaagatcaaaacctccccggtttacccgaaatcaccagatccgatcaagatcaaaacattcataacaaccagcaaactcaatccgatcccgctatctacgtaatcaaagagagtccaaaagattcacgagacgattgggtgatctcgatcacagacaagctcgaacaagcacatagagatgatgacacaacactctggggtaagctctgtatctacagagttccatattaccttcaagaaaacgacaacaaatcgtatttccctcagacagtctcgcttggtccgtaccatcatggtaagaaacggctccggtctatggaccgtcacaaatggcgtgctgtcaatagagtcttgaaacgtacgaaccaaggcattaaaatgtatatcgacgccatgagagagctagaggaaaaggctcgagcttgttacgaaggtcccttaagtttgagtagtaacgaatttatcgaaatgctagttcttgatggttgttttgtgcttgagctctttagaggagccgttgaaggattcactgaactcggatatgcacgtaacgatccagttttcgcgatgagaggatcgatgcattcgattcaacgtgacatggtaatgcttgaaaatcaacttcctttatttgttctaaaccggttattagagttacagcttggtacacggaaccaaaccggtttggtggcacaattagcaattcggttctttgatccactaatgccaacggacgagccgttgactaaatctggccagtcaaaactcgagaactcactggcaagagataaatcctttgacccattcgctgatatgggtgaactgcattgtctagatgttttccgtcgtagtttgttacggtctagtcctaaaccggagccgaggttaacaagaaagagatggtctcgaaacacgcgtgtggcggacaagcgccggcaacaattgatacattgtgtgacggaactaaaagaggctggtataaaattcagaagaaggaaaaccgaccggttttgggatatgcaattcaaaaacggttatctagaaataccgaggctacttatccatgacggtaccaaatctctttttctgaatcttatagcttttgagcagtgtcatatcgattcgagcaatgatataacatcctacataatcttcatggacaatctaatagattctcacgaagatgttagctacttacactactgtggtatcatcgaacattggctagggagcgattctgaagtcgcggatttgttcaaccgtttatgtcaagaagttgtattcgacaccgaagatagctatttatctaggttatcgattgaggttaatcgttactacgatcataagtggaatgcttggagggctacgttgaaacataagtacttcaataatccatgggcaattgtttctttctgtgctgcggttattctactagtcctcactttctctcaaagtttttacgctgtttacgcttattataagccaccttcttaa

SEQ ID NO: 90507 - protein, 531 aa, Arabidopsis thaliana
  peptide (1)..(531): Ceres Seq. ID no. 12724156
MVAVFYKDMLSWYLLTLKIREKLETQNQESVLVNQDQNLPGLPEITRSDQDQNIHNNQQTQSDPAIYVIKESPKDSRDDWVISITDKLEQAHRDDDTTLWGKLCIYRVPYYLQENDNKSYFPQTVSLGPYHHGKKRLRSMDRHKWRAVNRVLKRTNQGIKMYIDAMRELEEKARACYEGPLSLSSNEFIEMLVLDGCFVLELFRGAVEGFTELGYARNDPVFAMRGSMHSIQRDMVMLENQLPLFVLNRLLELQLGTRNQTGLVAQLAIRFFDPLMPTDEPLTKSGQSKLENSLARDKSFDPFADMGELHCLDVFRRSLLRSSPKPEPRLTRKRWSRNTRVADKRRQQLIHCVTELKEAGIKFRRRKTDRFWDMQFKNGYLEIPRLLIHDGTKSLFLNLIAFEQCHIDSSNDITSYIIFMDNLIDSHEDVSYLHYCGIIEHWLGSDSEVADLFNRLCQEVVFDTEDSYLSRLSIEVNRYYDHKWNAWRATLKHKYFNNPWAIVSFCAAVILLVLTFSQSFYAVYAYYKPPS

SEQ ID NO: 90508 - protein, 523 aa, Arabidopsis thaliana
  peptide (1)..(523): Ceres Seq. ID no. 12724157
MLSWYLLTLKIREKLETQNQESVLVNQDQNLPGLPEITRSDQDQNIHNNQQTQSDPAIYVIKESPKDSRDDWVISITDKLEQAHRDDDTTLWGKLCIYRVPYYLQENDNKSYFPQTVSLGPYHHGKKRLRSMDRHKWRAVNRVLKRTNQGIKMYIDAMRELEEKARACYEGPLSLSSNEFIEMLVLDGCFVLELFRGAVEGFTELGYARNDPVFAMRGSMHSIQRDMVMLENQLPLFVLNRLLELQLGTRNQTGLVAQLAIRFFDPLMPTDEPLTKSGQSKLENSLARDKSFDPFADMGELHCLDVFRRSLLRSSPKPEPRLTRKRWSRNTRVADKRRQQLIHCVTELKEAGIKFRRRKTDRFWDMQFKNGYLEIPRLLIHDGTKSLFLNLIAFEQCHIDSSNDITSYIIFMDNLIDSHEDVSYLHYCGIIEHWLGSDSEVADLFNRLCQEVVFDTEDSYLSRLSIEVNRYYDHKWNAWRATLKHKYFNNPWAIVSFCAAVILLVLTFSQSFYAVYAYYKPPS

SEQ ID NO: 90509 - protein, 392 aa, Arabidopsis thaliana
  peptide (1)..(392): Ceres Seq. ID no. 12724158
MDRHKWRAVNRVLKRTNQGIKMYIDAMRELEEKARACYEGPLSLSSNEFIEMLVLDGCFVLELFRGAVEGFTELGYARNDPVFAMRGSMHSIQRDMVMLENQLPLFVLNRLLELQLGTRNQTGLVAQLAIRFFDPLMPTDEPLTKSGQSKLENSLARDKSFDPFADMGELHCLDVFRRSLLRSSPKPEPRLTRKRWSRNTRVADKRRQQLIHCVTELKEAGIKFRRRKTDRFWDMQFKNGYLEIPRLLIHDGTKSLFLNLIAFEQCHIDSSNDITSYIIFMDNLIDSHEDVSYLHYCGIIEHWLGSDSEVADLFNRLCQEVVFDTEDSYLSRLSIEVNRYYDHKWNAWRATLKHKYFNNPWAIVSFCAAVILLVLTFSQSFYAVYAYYKPPS

SEQ ID NO: 90510 - DNA, 1695 bp, Arabidopsis thaliana
  misc_feature (1)..(1695): Ceres Seq. ID no. 12724159
  misc_feature (1)..(1695): Ortholog of  Ceres SEQ ID NO 14311028 as cited in SEQ ID NO 54464
  misc_feature (1)..(1695): Ortholog of  Ceres SEQ ID NO 13656091 as cited in SEQ ID NO 69094
atggtgcgtattctttcttttacaccaccgcctcctccaccaccaccaccatcgtttagatcaattcctcgtccaccaccaccaccatcttttagatcaattcctcctcggcggcatttcttcaaaaagaaaagcaaaagtctaccaccaccaccaccaccgctaccgccagcacgaccatttggaccgattcttccttggcggtattctgtcaaaagaaaaagaactaatcgaccacaaccgtctacgatccagaaagacatgttcacatggtactttctcaccctcatgatgcgccaaaaactccaaaaacaaaaccaaaaacccgaagagacacgagaagaatgggtgatctcaattagagacaaaatggagcaagcacttagagaagacgccacaactagttgggacaaactatgtatctatagagttccacaataccttcaagagaacaacaagaagtcctatttccctcagactgtctcacttggtccgttccaccatggcaacaaacatctcctacccatggaccgtcacaagtggcgtgcagtcaatatggtcatggcacgtaccaaacacgacattgaaatgtatattgacgccatgaaagaactcgaagacagggctcgtgcttgctatgaaggtcctatagatttgagcagcaacaagtttagtgaaatgctggttcttgatggttgtttcgttcttgaactctttagaggagctgatgaaggattctccgaactaggatatgatcgtaacgatccagttttcgcaatgcgaggatcaatgcattcgattcaacgtgacatggtaatgctagaaaatcaactccctttgtttgttctcaaccggttattagagatacagcttggtaaacggcaccaaaccggtttagtgtcgcgattagcagttcggttctttgatccactaatgccaaccgacgagccgttgaccaaaaccgacgactcgctggaacaagataaattctttaacccaattgctgataaggacaagggtgagttgcactgtctagatgttttccgtcgaaatctacttcggccttgttcgaatccggagccaaggttatcacgaatgagatggtcatggagaactcgcgtggcggataagcgccaacaacaactgatacattgcgtgaccgaactaagagaagccggtattaaattcaggacgaggaaaaccgaccggttttgggatattcgattcaaaaacggttatctcgagataccaaaactactaatccatgacggtaccaaatctctcttctcgaatcttatagccttcgaacaatgtcatattgactcgagcaacgatataacatcgtacataatctttatggataatctaatagattcgtcggaagatgttaggtatttgcattattgtggtatcatcgaacattggttagggaatgattatgaagttgcggatttgttcaaccggttatgtcaagaagtggctttcgacccccaaaatagttatttgtcacaattgtcgaataaagttgatcggaattatagccgaaagtggaatgttctgaaggcgatcttaaaacacaagtacttcaataatccttgggcatacttctctttttttgctgctcttgtcctgctagttctcacgttatttcagagtttctttactgcttatccttattttaacccaccttcttga

SEQ ID NO: 90511 - protein, 564 aa, Arabidopsis thaliana
  peptide (1)..(564): Ceres Seq. ID no. 12724160
MVRILSFTPPPPPPPPPSFRSIPRPPPPPSFRSIPPRRHFFKKKSKSLPPPPPPLPPARPFGPILPWRYSVKRKRTNRPQPSTIQKDMFTWYFLTLMMRQKLQKQNQKPEETREEWVISIRDKMEQALREDATTSWDKLCIYRVPQYLQENNKKSYFPQTVSLGPFHHGNKHLLPMDRHKWRAVNMVMARTKHDIEMYIDAMKELEDRARACYEGPIDLSSNKFSEMLVLDGCFVLELFRGADEGFSELGYDRNDPVFAMRGSMHSIQRDMVMLENQLPLFVLNRLLEIQLGKRHQTGLVSRLAVRFFDPLMPTDEPLTKTDDSLEQDKFFNPIADKDKGELHCLDVFRRNLLRPCSNPEPRLSRMRWSWRTRVADKRQQQLIHCVTELREAGIKFRTRKTDRFWDIRFKNGYLEIPKLLIHDGTKSLFSNLIAFEQCHIDSSNDITSYIIFMDNLIDSSEDVRYLHYCGIIEHWLGNDYEVADLFNRLCQEVAFDPQNSYLSQLSNKVDRNYSRKWNVLKAILKHKYFNNPWAYFSFFAALVLLVLTLFQSFFTAYPYFNPPS

SEQ ID NO: 90512 - protein, 477 aa, Arabidopsis thaliana
  peptide (1)..(477): Ceres Seq. ID no. 12724161
MFTWYFLTLMMRQKLQKQNQKPEETREEWVISIRDKMEQALREDATTSWDKLCIYRVPQYLQENNKKSYFPQTVSLGPFHHGNKHLLPMDRHKWRAVNMVMARTKHDIEMYIDAMKELEDRARACYEGPIDLSSNKFSEMLVLDGCFVLELFRGADEGFSELGYDRNDPVFAMRGSMHSIQRDMVMLENQLPLFVLNRLLEIQLGKRHQTGLVSRLAVRFFDPLMPTDEPLTKTDDSLEQDKFFNPIADKDKGELHCLDVFRRNLLRPCSNPEPRLSRMRWSWRTRVADKRQQQLIHCVTELREAGIKFRTRKTDRFWDIRFKNGYLEIPKLLIHDGTKSLFSNLIAFEQCHIDSSNDITSYIIFMDNLIDSSEDVRYLHYCGIIEHWLGNDYEVADLFNRLCQEVAFDPQNSYLSQLSNKVDRNYSRKWNVLKAILKHKYFNNPWAYFSFFAALVLLVLTLFQSFFTAYPYFNPPS

SEQ ID NO: 90513 - protein, 468 aa, Arabidopsis thaliana
  peptide (1)..(468): Ceres Seq. ID no. 12724162
MMRQKLQKQNQKPEETREEWVISIRDKMEQALREDATTSWDKLCIYRVPQYLQENNKKSYFPQTVSLGPFHHGNKHLLPMDRHKWRAVNMVMARTKHDIEMYIDAMKELEDRARACYEGPIDLSSNKFSEMLVLDGCFVLELFRGADEGFSELGYDRNDPVFAMRGSMHSIQRDMVMLENQLPLFVLNRLLEIQLGKRHQTGLVSRLAVRFFDPLMPTDEPLTKTDDSLEQDKFFNPIADKDKGELHCLDVFRRNLLRPCSNPEPRLSRMRWSWRTRVADKRQQQLIHCVTELREAGIKFRTRKTDRFWDIRFKNGYLEIPKLLIHDGTKSLFSNLIAFEQCHIDSSNDITSYIIFMDNLIDSSEDVRYLHYCGIIEHWLGNDYEVADLFNRLCQEVAFDPQNSYLSQLSNKVDRNYSRKWNVLKAILKHKYFNNPWAYFSFFAALVLLVLTLFQSFFTAYPYFNPPS

SEQ ID NO: 90514 - DNA, 1530 bp, Arabidopsis thaliana
  misc_feature (1)..(1530): Ceres Seq. ID no. 12724163
  misc_feature (1)..(1530): Ortholog of  Ceres SEQ ID NO 13656091 as cited in SEQ ID NO 69094
atggttttgttttccgatggtcgctcaacttccacccacaaaaggtacagacggttgtcatggttcgtgccaatccacagtttccatgaaattaccagacgtgatctaggccaaaacttgcacaaccacgtggagacttacgtggagcccagtaagatcgaagtaaaagaagaaaagccaagagagacacgagaagaatgggtgatctcgatcaaggacaagatggagaaagcacttagttacgacgcaacaaatagctgggacaagctctgtatctacagagttcctttctatcttcaagagaacgacaagaagtcttacttacctcaaactgtctctattggtccgtaccaccatggaaaggtacacctcagacccatggagcgtcacaaatggcgagcggtcaatatgatcatggcacgtaccaagcacaacattgaaatgtatattgacgccatgaaagagctcgaggaggaggctcgtgcttgctaccaaggtcccattgacatgaagaatagtaatgagttcacagaaatgcttgttcttgatggttgtttcgttctcgagctcttcaagggaacaattcaaggattccagaaaattggatatgcacgtaacgacccggttttcgctaagcgaggattgatgcattcgattcaacgtgacatgataatgttggaaaaccaacttcctctgttcgttctcgaccggttattagggctacaaaccggtacaccgaaccaaacgggtatagtggcagaagtagctgttcggttcttcaaaacactaatgccaactagcgaggtgctgaccaaatcagaaagatcgttagactcgcaggaaaaatccgatgaattgggtgacaatggcgggttgcactgtttggatgtgttccatcgaagtctcatccaatctagtgagacaactaatcaagggactccatatgaggatatgagcatggtggaaaagcaacaacaattgatacattgcgtgacagaactaagaggcgcaggtgttaacttcatgaggaaagaaaccggccagctttgggacattgaattcaaaaacggttatctaaagataccgaaactactaatccatgatggtaccaagtctcttttctcaaatcttattgctttcgagcagtgccatacacaatcaagcaacaacataacatcctacataatcttcatggataatctaataaactcttctcaagatgttagctacttgcaccacgacggtattattgagcattggttagggagtgattctgaagttgcagatttgttcaaccggttatgtaaagaagtgatctttgatccaaaagatgggtatctatctcaactgtctcgtgaagttaaccgttattatagtcgtaagtggaactcgttgaaggctactctaagacaaaagtacttcaataacccttgggcatatttctccttttcagctgcagttattctgctatttctcacattctttcaaagcttctttgctgtctatgcttattataagccactctcttag

SEQ ID NO: 90515 - protein, 509 aa, Arabidopsis thaliana
  peptide (1)..(509): Ceres Seq. ID no. 12724164
MVLFSDGRSTSTHKRYRRLSWFVPIHSFHEITRRDLGQNLHNHVETYVEPSKIEVKEEKPRETREEWVISIKDKMEKALSYDATNSWDKLCIYRVPFYLQENDKKSYLPQTVSIGPYHHGKVHLRPMERHKWRAVNMIMARTKHNIEMYIDAMKELEEEARACYQGPIDMKNSNEFTEMLVLDGCFVLELFKGTIQGFQKIGYARNDPVFAKRGLMHSIQRDMIMLENQLPLFVLDRLLGLQTGTPNQTGIVAEVAVRFFKTLMPTSEVLTKSERSLDSQEKSDELGDNGGLHCLDVFHRSLIQSSETTNQGTPYEDMSMVEKQQQLIHCVTELRGAGVNFMRKETGQLWDIEFKNGYLKIPKLLIHDGTKSLFSNLIAFEQCHTQSSNNITSYIIFMDNLINSSQDVSYLHHDGIIEHWLGSDSEVADLFNRLCKEVIFDPKDGYLSQLSREVNRYYSRKWNSLKATLRQKYFNNPWAYFSFSAAVILLFLTFFQSFFAVYAYYKPLS

SEQ ID NO: 90516 - protein, 435 aa, Arabidopsis thaliana
  peptide (1)..(435): Ceres Seq. ID no. 12724165
MEKALSYDATNSWDKLCIYRVPFYLQENDKKSYLPQTVSIGPYHHGKVHLRPMERHKWRAVNMIMARTKHNIEMYIDAMKELEEEARACYQGPIDMKNSNEFTEMLVLDGCFVLELFKGTIQGFQKIGYARNDPVFAKRGLMHSIQRDMIMLENQLPLFVLDRLLGLQTGTPNQTGIVAEVAVRFFKTLMPTSEVLTKSERSLDSQEKSDELGDNGGLHCLDVFHRSLIQSSETTNQGTPYEDMSMVEKQQQLIHCVTELRGAGVNFMRKETGQLWDIEFKNGYLKIPKLLIHDGTKSLFSNLIAFEQCHTQSSNNITSYIIFMDNLINSSQDVSYLHHDGIIEHWLGSDSEVADLFNRLCKEVIFDPKDGYLSQLSREVNRYYSRKWNSLKATLRQKYFNNPWAYFSFSAAVILLFLTFFQSFFAVYAYYKPLS

SEQ ID NO: 90517 - protein, 383 aa, Arabidopsis thaliana
  peptide (1)..(383): Ceres Seq. ID no. 12724166
MERHKWRAVNMIMARTKHNIEMYIDAMKELEEEARACYQGPIDMKNSNEFTEMLVLDGCFVLELFKGTIQGFQKIGYARNDPVFAKRGLMHSIQRDMIMLENQLPLFVLDRLLGLQTGTPNQTGIVAEVAVRFFKTLMPTSEVLTKSERSLDSQEKSDELGDNGGLHCLDVFHRSLIQSSETTNQGTPYEDMSMVEKQQQLIHCVTELRGAGVNFMRKETGQLWDIEFKNGYLKIPKLLIHDGTKSLFSNLIAFEQCHTQSSNNITSYIIFMDNLINSSQDVSYLHHDGIIEHWLGSDSEVADLFNRLCKEVIFDPKDGYLSQLSREVNRYYSRKWNSLKATLRQKYFNNPWAYFSFSAAVILLFLTFFQSFFAVYAYYKPLS

SEQ ID NO: 90518 - DNA, 1332 bp, Arabidopsis thaliana
  misc_feature (1)..(1332): Ceres Seq. ID no. 12724179
  misc_feature (1)..(1332): Ortholog of  Ceres SEQ ID NO 14303790 as cited in SEQ ID NO 55525
atggccgacgtaacttttatttcctcaagcattgttcgacctcaaatcataaaccaagaaggtcgtgaaaagatccatctaactccatttgatcttaatcttctctatgttgattatactcaaagaggtcttctcttccccaaacccgacccggaaacccatttcatctctcgattaagaacctctctttcttctgctctagatatttacttccccttcgctggtcgtcttaacaaagttgaaaatcatgaagacgaaacggtgtcgttttacatcaattgtgacggctctggtgctaaattcatccatgccgtatccgattctgtttcggtaagcgatcttcttcgacctgatggctctgttcctgactttttcaggattttctatcccatgaacggtgtcaaaagcatcgacggcctctcggagcccttgcttgctttacaagttaccgagatgagagatggagttttcatcggttttggttacaatcacatggtcgcagacggtgcttccatctggaatttcttcaggacttggtcaaagatttgctctaatggtcaacgggagaatcttcaacctcttgctctcaaaggattgttcgtggacgggatggatttcccgatacatattccggtttcagacacagagacgtcaccaccaagccgtgagctttctccgacattcaaagagagagtttttcacttcacaaagaggaatatctcagatctcaaagctaaagtcaacggagaaattggcttgcgtgaccataaagtctcgtccttacaagcggtctcggctcacatgtggcgatcaatcattagacacagtggtctaaaccaagaagaaaagacgcgttgctttgtagcagtggatctaaggcagagactaaaccctccgcttgacaaagagtgttttggtcatgtgatctataactcggtagttacaaccacagtgggggagttgcatgatcagggtctagggtgggcttttttgcaaataaataatatgttgagatctttgacgaatgaagactatagaatttatgctgagaattgggttagaaatatgaagattcaaaaatcaggtcttggaagtaaaatgactagggactctgtaattgtgtcaagctctcctcggtttgaagtgtacgataacgatttcggttggggcaaaccgatagcggttcgagctggaccgagtaacagtattagtggcaaactcgtgttttttcgtgggattgaagaaggctgtattgatgttcatgcgtttctattgcccgacgtacttgtgaaactactggctgacgtggaatttctggagaagtgtggctag

SEQ ID NO: 90519 - protein, 443 aa, Arabidopsis thaliana
  peptide (1)..(443): Ceres Seq. ID no. 12724180
MADVTFISSSIVRPQIINQEGREKIHLTPFDLNLLYVDYTQRGLLFPKPDPETHFISRLRTSLSSALDIYFPFAGRLNKVENHEDETVSFYINCDGSGAKFIHAVSDSVSVSDLLRPDGSVPDFFRIFYPMNGVKSIDGLSEPLLALQVTEMRDGVFIGFGYNHMVADGASIWNFFRTWSKICSNGQRENLQPLALKGLFVDGMDFPIHIPVSDTETSPPSRELSPTFKERVFHFTKRNISDLKAKVNGEIGLRDHKVSSLQAVSAHMWRSIIRHSGLNQEEKTRCFVAVDLRQRLNPPLDKECFGHVIYNSVVTTTVGELHDQGLGWAFLQINNMLRSLTNEDYRIYAENWVRNMKIQKSGLGSKMTRDSVIVSSSPRFEVYDNDFGWGKPIAVRAGPSNSISGKLVFFRGIEEGCIDVHAFLLPDVLVKLLADVEFLEKCG

SEQ ID NO: 90520 - protein, 313 aa, Arabidopsis thaliana
  peptide (1)..(313): Ceres Seq. ID no. 12724181
MNGVKSIDGLSEPLLALQVTEMRDGVFIGFGYNHMVADGASIWNFFRTWSKICSNGQRENLQPLALKGLFVDGMDFPIHIPVSDTETSPPSRELSPTFKERVFHFTKRNISDLKAKVNGEIGLRDHKVSSLQAVSAHMWRSIIRHSGLNQEEKTRCFVAVDLRQRLNPPLDKECFGHVIYNSVVTTTVGELHDQGLGWAFLQINNMLRSLTNEDYRIYAENWVRNMKIQKSGLGSKMTRDSVIVSSSPRFEVYDNDFGWGKPIAVRAGPSNSISGKLVFFRGIEEGCIDVHAFLLPDVLVKLLADVEFLEKCG

SEQ ID NO: 90521 - protein, 292 aa, Arabidopsis thaliana
  peptide (1)..(292): Ceres Seq. ID no. 12724182
MRDGVFIGFGYNHMVADGASIWNFFRTWSKICSNGQRENLQPLALKGLFVDGMDFPIHIPVSDTETSPPSRELSPTFKERVFHFTKRNISDLKAKVNGEIGLRDHKVSSLQAVSAHMWRSIIRHSGLNQEEKTRCFVAVDLRQRLNPPLDKECFGHVIYNSVVTTTVGELHDQGLGWAFLQINNMLRSLTNEDYRIYAENWVRNMKIQKSGLGSKMTRDSVIVSSSPRFEVYDNDFGWGKPIAVRAGPSNSISGKLVFFRGIEEGCIDVHAFLLPDVLVKLLADVEFLEKCG

SEQ ID NO: 90522 - DNA, 696 bp, Arabidopsis thaliana
  misc_feature (1)..(696): Ceres Seq. ID no. 12724191
  misc_feature (1)..(696): Ortholog of  Ceres SEQ ID NO 14313088 as cited in SEQ ID NO 58870
  misc_feature (1)..(696): Ortholog of  Ceres SEQ ID NO 14314571 as cited in SEQ ID NO 59360
atggataactccgacattctaatgaacatgatgatgcagcagatggagaagcttcctgaacacttctctaactcaaaccctaaccctaatccccataacattatgatgctttctgaatccaacacccacccgttcttcttcaaccccactcattctcatctcccatttgaccaaaccatgcctcaccaccaacccggtttaaatttccggtacgccccctccccgtcatcatctctcccggagaagagaggaggctgcagcgacaacgccaacatggcggcgatgagagagatgatctttcgaatagccgtgatgcagcctatacatattgatccggaatccgtaaagccaccaaagagaaagaacgtgaggatctctaaggatccacagagcgtggcagctcggcatcgaagggagaggataagcgagcggattcggattcttcagcggcttgttcccggtgggactaagatggatacggcgtcgatgctcgatgaggctatccattacgttaagtttctcaagaagcaagtgcagtcgctggaggaacatgcggtggttaacggcggaggaatgacggcggtggccggaggagcacttgcgggtactgttggtggaggatatggaggaaaagggtgtggcattatgcggtctgatcatcaccagatgcttggaaatgcacagattcttagatga

SEQ ID NO: 90523 - protein, 231 aa, Arabidopsis thaliana
  peptide (1)..(231): Ceres Seq. ID no. 12724192
MDNSDILMNMMMQQMEKLPEHFSNSNPNPNPHNIMMLSESNTHPFFFNPTHSHLPFDQTMPHHQPGLNFRYAPSPSSSLPEKRGGCSDNANMAAMREMIFRIAVMQPIHIDPESVKPPKRKNVRISKDPQSVAARHRRERISERIRILQRLVPGGTKMDTASMLDEAIHYVKFLKKQVQSLEEHAVVNGGGMTAVAGGALAGTVGGGYGGKGCGIMRSDHHQMLGNAQILR

SEQ ID NO: 90524 - protein, 224 aa, Arabidopsis thaliana
  peptide (1)..(224): Ceres Seq. ID no. 12724193
MNMMMQQMEKLPEHFSNSNPNPNPHNIMMLSESNTHPFFFNPTHSHLPFDQTMPHHQPGLNFRYAPSPSSSLPEKRGGCSDNANMAAMREMIFRIAVMQPIHIDPESVKPPKRKNVRISKDPQSVAARHRRERISERIRILQRLVPGGTKMDTASMLDEAIHYVKFLKKQVQSLEEHAVVNGGGMTAVAGGALAGTVGGGYGGKGCGIMRSDHHQMLGNAQILR

SEQ ID NO: 90525 - protein, 222 aa, Arabidopsis thaliana
  peptide (1)..(222): Ceres Seq. ID no. 12724194
MMMQQMEKLPEHFSNSNPNPNPHNIMMLSESNTHPFFFNPTHSHLPFDQTMPHHQPGLNFRYAPSPSSSLPEKRGGCSDNANMAAMREMIFRIAVMQPIHIDPESVKPPKRKNVRISKDPQSVAARHRRERISERIRILQRLVPGGTKMDTASMLDEAIHYVKFLKKQVQSLEEHAVVNGGGMTAVAGGALAGTVGGGYGGKGCGIMRSDHHQMLGNAQILR

SEQ ID NO: 90526 - DNA, 1401 bp, Arabidopsis thaliana
  misc_feature (1)..(1401): Ceres Seq. ID no. 12724197
  misc_feature (1)..(1401): Ortholog of  Ceres SEQ ID NO 15171438 as cited in SEQ ID NO 51665
  misc_feature (1)..(1401): Ortholog of  Ceres SEQ ID NO 15170203 as cited in SEQ ID NO 53291
  misc_feature (1)..(1401): Ortholog of  Ceres SEQ ID NO 14303083 as cited in SEQ ID NO 66573
atgcataagaaaggtacaagcagagacgtaaatagccaagcatttacaaaactaacgaaagtagaaactattccagatccagacatttacgacataacctacgtagatatctctccctccgaaggctcctcttcaccattatccaaatcaccatggtccgttcaagtcgatccatccgccgtagattctccgtatcattcggtgaaagttacgacggatacaaccaaagaaaaatcaaccaaccactctcctaatattctcttggggtcacttgttcgcgaagaaggtcatatctattcattagctacatcaggagatttactctacacaggatctgattccaagaacattagggtttggaaaaaccatgttgagttctcgagttttaaatcgaatagtggattggttaaagccattgttcttgctggagataaaatctttaccggtcatcaagatggtaagatccgtgtgtggaaagctgcatctaaagaatcaaacgttcatcgtcgtgtaggtacaatgcctaaccttctcgattatataagaaactccattgttccttcttcttacttcaacttcacgcgacgtaatcgtagcagtgctgcgttagggtttcgtcatttagacgcgatttcttgtcttgcgttaagcgaagataaacggttgttgtactctggttcttgggataaaacgtttaaggtttggagagtttcggatttgcggtgtgtggaatctgtgaacgctcatgaagatgcggtaaacgctgtcgtttccggttttgacggtttggtttttaccggttcagctgatggaacggttaaggtttggagaagagaagatcaagcgaaggatacgaaacatttcttctctgagacgttattgaaacaagactgtgccgttacggcgatcgctgtagatcaaagcgcgacgttagtttattgtggttcgtctgacggaaccgttaatttttgggaacgtgagaataatatgaaaaacggcggcgttttgaaaggtcataaactcgccgtgctttgtcttgtcgcggcggggaatttgatgtttagtggttctgctgatttagggatacgtgtgtggaggagaccagaaggtggaggtgagcatgtttgtctttcggttttgaccggacatgctggtccggtgaagtgtttggcggtggagagagatcaagaatcggtttccggtgagagacggtggattgtgtatagtgggagtttagatagatcggtgaagatgtggcgtgtgtcggagagttcaccgccgatggtgaatcaagagtttaagttgccggatcagtttggtggtggtggtggtggtggtccggcggagttaacggtggctcctagcttctcggctcaagggaggattagtccacaaaaatag

SEQ ID NO: 90527 - protein, 466 aa, Arabidopsis thaliana
  peptide (1)..(466): Ceres Seq. ID no. 12724198
MHKKGTSRDVNSQAFTKLTKVETIPDPDIYDITYVDISPSEGSSSPLSKSPWSVQVDPSAVDSPYHSVKVTTDTTKEKSTNHSPNILLGSLVREEGHIYSLATSGDLLYTGSDSKNIRVWKNHVEFSSFKSNSGLVKAIVLAGDKIFTGHQDGKIRVWKAASKESNVHRRVGTMPNLLDYIRNSIVPSSYFNFTRRNRSSAALGFRHLDAISCLALSEDKRLLYSGSWDKTFKVWRVSDLRCVESVNAHEDAVNAVVSGFDGLVFTGSADGTVKVWRREDQAKDTKHFFSETLLKQDCAVTAIAVDQSATLVYCGSSDGTVNFWERENNMKNGGVLKGHKLAVLCLVAAGNLMFSGSADLGIRVWRRPEGGGEHVCLSVLTGHAGPVKCLAVERDQESVSGERRWIVYSGSLDRSVKMWRVSESSPPMVNQEFKLPDQFGGGGGGGPAELTVAPSFSAQGRISPQK

SEQ ID NO: 90528 - protein, 293 aa, Arabidopsis thaliana
  peptide (1)..(293): Ceres Seq. ID no. 12724199
MPNLLDYIRNSIVPSSYFNFTRRNRSSAALGFRHLDAISCLALSEDKRLLYSGSWDKTFKVWRVSDLRCVESVNAHEDAVNAVVSGFDGLVFTGSADGTVKVWRREDQAKDTKHFFSETLLKQDCAVTAIAVDQSATLVYCGSSDGTVNFWERENNMKNGGVLKGHKLAVLCLVAAGNLMFSGSADLGIRVWRRPEGGGEHVCLSVLTGHAGPVKCLAVERDQESVSGERRWIVYSGSLDRSVKMWRVSESSPPMVNQEFKLPDQFGGGGGGGPAELTVAPSFSAQGRISPQK

SEQ ID NO: 90529 - DNA, 1691 bp, Arabidopsis thaliana
  misc_feature (1)..(1691): Ceres Seq. ID no. 12724226
  misc_feature (1)..(1691): Ortholog of  Ceres SEQ ID NO 13597546 as cited in SEQ ID NO 65017
  misc_feature (1)..(1691): Ortholog of  Ceres SEQ ID NO 14308015 as cited in SEQ ID NO 65798
  misc_feature (1)..(1691): Ortholog of  Ceres SEQ ID NO 14307908 as cited in SEQ ID NO 67189
  misc_feature (1)..(1691): Ortholog of  Ceres SEQ ID NO 13654353 as cited in SEQ ID NO 68318
gagtgagagagagagagaaactagctccatgttcgaaacagagcatcatactctcttacctcttcttcttctcccatcgcttttgtctcttcttctcttcttgattctcttgaagagaagaaatagaaaaaccagattcaatctacctccgggtaaatccggttggccatttcttggtgaaaccatcggttatcttaaaccgtacaccgccacaacactcggtgacttcatgcaacaacatgtctccaagtatggtaagatatatagatcgaacttgtttggagaaccaacgatcgtatcagctgatgctggacttaatagattcatattacaaaacgaaggaaggctctttgaatgtagttatcctagaagtataggtgggattcttgggaaatggtcgatgcttgttcttgttggtgacatgcatagagatatgagaagtatctcgcttaacttcttaagtcacgcacgtcttagaactattctacttaaagatgttgagagacatactttgtttgttcttgattcttggcaacaaaactctattttctctgctcaagacgaggccaaaaagtttacgtttaatctaatggcgaagcatataatgagtatggatcctggagaagaagaaacagagcaattaaagaaagagtatgtaactttcatgaaaggagttgtctctgctcctctaaatctaccaggaactgcttatcataaagctcttcagtcacgagcaacgatattgaagttcattgagaggaaaatggaagagagaaaattggatatcaaggaagaagatcaagaagaagaagaagtgaaaacagaggatgaagcagagatgagtaagagtgatcatgttaggaaacaaagaacagacgatgatcttttgggatgggttttgaaacattcgaatttatcgacggagcaaattctcgatctcattcttagtttgttatttgccggacatgagacttcttctgtagccattgctctcgctatcttcttcttgcaagcttgccctaaagccgttgaagagcttagggaagagcatcttgagatcgcgagggccaagaaggaactaggagagtcagaattaaattgggatgattacaagaaaatggactttactcaatgtgttataaatgaaactcttcgattgggaaatgtagttaggtttttgcatcgcaaagcactcaaagatgttcggtacaaaggatacgatatccctagtgggtggaaagtgttaccggtgatctcagccgtacatttggataattctcgttatgaccaacctaatctctttaatccttggagatggcaacagcaaaacaacggagcgtcatcctcaggaagtggtagtttttcgacgtggggaaacaactacatgccgtttggaggagggccaaggctatgtgctggttcagagctagccaagttagaaatggcagtgtttattcatcatctagttcttaaattcaattgggaattagcagaagatgataaaccatttgcttttccttttgttgattttcctaacggtttgcctattagggtttctcgtattctgtaaaaaaaaaaaaagatgaaagtatttttattctcttcttttttttttgataattttaaatcattttttttgcccaatgatatataaaaatttggataaataatattattggatattcgttttt

SEQ ID NO: 90530 - protein, 522 aa, Arabidopsis thaliana
  peptide (1)..(522): Ceres Seq. ID no. 12724227
SERERETSSMFETEHHTLLPLLLLPSLLSLLLFLILLKRRNRKTRFNLPPGKSGWPFLGETIGYLKPYTATTLGDFMQQHVSKYGKIYRSNLFGEPTIVSADAGLNRFILQNEGRLFECSYPRSIGGILGKWSMLVLVGDMHRDMRSISLNFLSHARLRTILLKDVERHTLFVLDSWQQNSIFSAQDEAKKFTFNLMAKHIMSMDPGEEETEQLKKEYVTFMKGVVSAPLNLPGTAYHKALQSRATILKFIERKMEERKLDIKEEDQEEEEVKTEDEAEMSKSDHVRKQRTDDDLLGWVLKHSNLSTEQILDLILSLLFAGHETSSVAIALAIFFLQACPKAVEELREEHLEIARAKKELGESELNWDDYKKMDFTQCVINETLRLGNVVRFLHRKALKDVRYKGYDIPSGWKVLPVISAVHLDNSRYDQPNLFNPWRWQQQNNGASSSGSGSFSTWGNNYMPFGGGPRLCAGSELAKLEMAVFIHHLVLKFNWELAEDDKPFAFPFVDFPNGLPIRVSRIL

SEQ ID NO: 90531 - protein, 513 aa, Arabidopsis thaliana
  peptide (1)..(513): Ceres Seq. ID no. 12724228
MFETEHHTLLPLLLLPSLLSLLLFLILLKRRNRKTRFNLPPGKSGWPFLGETIGYLKPYTATTLGDFMQQHVSKYGKIYRSNLFGEPTIVSADAGLNRFILQNEGRLFECSYPRSIGGILGKWSMLVLVGDMHRDMRSISLNFLSHARLRTILLKDVERHTLFVLDSWQQNSIFSAQDEAKKFTFNLMAKHIMSMDPGEEETEQLKKEYVTFMKGVVSAPLNLPGTAYHKALQSRATILKFIERKMEERKLDIKEEDQEEEEVKTEDEAEMSKSDHVRKQRTDDDLLGWVLKHSNLSTEQILDLILSLLFAGHETSSVAIALAIFFLQACPKAVEELREEHLEIARAKKELGESELNWDDYKKMDFTQCVINETLRLGNVVRFLHRKALKDVRYKGYDIPSGWKVLPVISAVHLDNSRYDQPNLFNPWRWQQQNNGASSSGSGSFSTWGNNYMPFGGGPRLCAGSELAKLEMAVFIHHLVLKFNWELAEDDKPFAFPFVDFPNGLPIRVSRIL

SEQ ID NO: 90532 - protein, 446 aa, Arabidopsis thaliana
  peptide (1)..(446): Ceres Seq. ID no. 12724229
MQQHVSKYGKIYRSNLFGEPTIVSADAGLNRFILQNEGRLFECSYPRSIGGILGKWSMLVLVGDMHRDMRSISLNFLSHARLRTILLKDVERHTLFVLDSWQQNSIFSAQDEAKKFTFNLMAKHIMSMDPGEEETEQLKKEYVTFMKGVVSAPLNLPGTAYHKALQSRATILKFIERKMEERKLDIKEEDQEEEEVKTEDEAEMSKSDHVRKQRTDDDLLGWVLKHSNLSTEQILDLILSLLFAGHETSSVAIALAIFFLQACPKAVEELREEHLEIARAKKELGESELNWDDYKKMDFTQCVINETLRLGNVVRFLHRKALKDVRYKGYDIPSGWKVLPVISAVHLDNSRYDQPNLFNPWRWQQQNNGASSSGSGSFSTWGNNYMPFGGGPRLCAGSELAKLEMAVFIHHLVLKFNWELAEDDKPFAFPFVDFPNGLPIRVSRIL

SEQ ID NO: 90533 - DNA, 2424 bp, Arabidopsis thaliana
  misc_feature (1)..(2424): Ceres Seq. ID no. 12724230
  misc_feature (1)..(2424): Ortholog of  Ceres SEQ ID NO 14316208 as cited in SEQ ID NO 53539
  misc_feature (1)..(2424): Ortholog of  Ceres SEQ ID NO 14305019 as cited in SEQ ID NO 53897
gttttgcttcttctctctgcaaaaatcctccatccgcttcctcacgaaaaaccctagcacagctccgagatcccttttgtcgccatgggagactccggcgatcctttcttgcgtaatccaaacgccgctgttcaagctcgcgctaaagttcagaacagagccaatgttcttcagcttaagctgatgggtcagagccaccctactggcttaacaaacaatctcttgaagctttttgagccacgtccgccattggagtacaaaccaccaccagagaagagaaagtgcccgccttatacaggtatggctcagtttgtaagtaactttgctgagcctggggatccagaatacgctccacctaagccagaagttgaattaccttcgcagaaaagggaaagaattcataaattgcgactggagaaaggtgttgaaaaggctgctgaggacttaaagaaatatgaccccaataatgatccaaatgctactggagatccatacaagacattgttcgtttcaagacttaactacgaatcctcagagagtaagattaaaagggagtttgaatcttatggaccaattaaacgggtaggttattctgagcattcccttgctggttcggtaagaatttgtgtaatggcttccctctctagagctctttgctcaatttgttttattttatctacaaaagtcttccaaggttagaatttttcagtcccttataaatttgcatcttttctgctagaccaaaaggccattctacatttgctttgttttgcatgccttctttagactgtgtaaagccatcaagtctcttagacctttctcaataactgaatatatagatgcataagtgcttctcatataatgacacagctcctctctccatggtgtttgtttgagatgttttcggtaaatttggcctggtatttttatttccttgtcccttcagagagcaaatacttttacaatgatatatcatatagtggttataggcacacggtttacctaatcaattagttgttttctgaatctataatgagctcaactcatcctgctggtaagcaacttataaaatattatctgcccatatcccaaagccattcaaatgctttattttcaagcaaccaaggttggattatcgaaaacccttctctcttttcctatcttaacatctatatatattcagtatctgggacttgggctactatgaaggtgatctggttcactttttaatacatttttagttatctaagtttctataccctggtaaggggtggtttattagactcttcaaaaatggtaattttgctgcaatacatccatttttctgccaattcttgatgtgggtggtgacattctcggatttggacacaacataaaggttgcctgccttatagagctgcatgtttgtttgatatgaaacacttttatcttgaatctgattttgttctcacagatttgatttgttaattgtcttcttctgaaacttctcaggttcatttggtgactgatcagctgaccaataaacccaaaggatatgctttcattgagtacatgcacacccgtgacatgaaagctgcatataagcaagctgatggacaaaagattgacggcagaagagttttggttgatgtggagagaggtagaaccgtcccaaactggcgtccacgcaggcttggtggtggacttgggacctcaagagtgggtggtggtgaagaaattgttggggaacaacaaccgcaaggaagaacctcccagtcagaggagccatcgagaccacgggaagagcgtgagaaatctcgggaaaagggaaaagaaagggaaaggtctcgtgagctgtctcacgaacaacctcgagagaggtctcgtgacagaccgagagaggataagcaccacagagaccgagaccaaggaggcagagacagggatagggacagcagacgtgatcgtgaccggacccgtgacagaggagacagagaccgccgtgaccgtgacaggggacgggatcgtacttcaagggatcatgaccgagaccgcagtagaaagaaggagcgggattatgaaggaggtgaatatgagcatgagggtggtggtcggtcccgtgagagagatgcagagtaccgtggcgagccagaagaaactcgtggctactatgaagacgatcaaggggacacagaccggtacagtcatcgctacgataaaatggaggaagatgacttcagatatgaacgtgagtacaagcggtctaagagatcagaatcgcgagagtatgttcgttgatgtttcattcggctgtttaaaactctaaaaacttaagaatcctttttgtttattctaaatcaaaacttgatgcaattctgtttgttacctctgaacttgattgctattttttctcttttgaagtttgtcatattattaatcaaaatc

SEQ ID NO: 90534 - protein, 241 aa, Arabidopsis thaliana
  peptide (1)..(241): Ceres Seq. ID no. 12724231
MHTRDMKAAYKQADGQKIDGRRVLVDVERGRTVPNWRPRRLGGGLGTSRVGGGEEIVGEQQPQGRTSQSEEPSRPREEREKSREKGKERERSRELSHEQPRERSRDRPREDKHHRDRDQGGRDRDRDSRRDRDRTRDRGDRDRRDRDRGRDRTSRDHDRDRSRKKERDYEGGEYEHEGGGRSRERDAEYRGEPEETRGYYEDDQGDTDRYSHRYDKMEEDDFRYEREYKRSKRSESREYVR

SEQ ID NO: 90535 - protein, 237 aa, Arabidopsis thaliana
  peptide (1)..(237): Ceres Seq. ID no. 12724232
MDKRLTAEEFWLMWREVEPSQTGVHAGLVVDLGPQEWVVVKKLLGNNNRKEEPPSQRSHRDHGKSVRNLGKREKKGKGLVSCLTNNLERGLVTDRERISTTETETKEAETGIGTADVIVTGPVTEETETAVTVTGDGIVLQGIMTETAVERRSGIMKEVNMSMRVVVGPVREMQSTVASQKKLVATMKTIKGTQTGTVIATIKWRKMTSDMNVSTSGLRDQNRESMFVDVSFGCLKL

SEQ ID NO: 90536 - protein, 236 aa, Arabidopsis thaliana
  peptide (1)..(236): Ceres Seq. ID no. 12724233
MKAAYKQADGQKIDGRRVLVDVERGRTVPNWRPRRLGGGLGTSRVGGGEEIVGEQQPQGRTSQSEEPSRPREEREKSREKGKERERSRELSHEQPRERSRDRPREDKHHRDRDQGGRDRDRDSRRDRDRTRDRGDRDRRDRDRGRDRTSRDHDRDRSRKKERDYEGGEYEHEGGGRSRERDAEYRGEPEETRGYYEDDQGDTDRYSHRYDKMEEDDFRYEREYKRSKRSESREYVR

SEQ ID NO: 90537 - DNA, 1113 bp, Arabidopsis thaliana
  misc_feature (1)..(1113): Ceres Seq. ID no. 12724242
  misc_feature (1)..(1113): Ortholog of  Ceres SEQ ID NO 13593889 as cited in SEQ ID NO 53305
  misc_feature (1)..(1113): Ortholog of  Ceres SEQ ID NO 13581959 as cited in SEQ ID NO 56156
atgatatctcgaatgattttcagaaactatccttctcacaatgagtccgacgacgagccattccatttcagtatcagcagagaattgcttctcgaccgaaacgatgtcgtagtgggagagatgattggagaaggagcttactccatcgtctacaaaggattgctaagaaaccaatttcccgtggcggtgaagatcatggatccgagtacaacttccgctgtaaccaaagcgcacaaaaaaacgtttcaaaaggaagttctgttactatccaagatgaaacatgacaacattgtgaagtttgttggagcttgcatagaaccacaattgattatagttaccgaactcgttgaaggcggcactctacagaggttcatgcactctcgtccgggtcctcttgacctaaagatgtcactaagctttgctttggatatttcacgagccatggagtttgtgcactcaaatggcatcattcaccgtgatttaaatccaaggaatttgttggtaaccggtgatctgaaacatgtgaaattggctgactttggaattgcaagagaagaaactagaggtggcatgacctgtgaggctggcacctctaaatggatggctcctgaggtgtatagccctgagccgctgagagttggggagaagaaggaatatgaccataaggctgatatttacagctttgccatagtattatggcagctggttacgaacgaagaaccattccctgacgtgcctaatagcctctttgttccctatcttgttagccaaggtcggagaccaatacttacgaagactcccgacgtgtttgtcccaatcgttgaatcatgttgggcacaagacccggatgcgcgtccggaatttaaagagatttcggttatgctgacaaacttgctaagaagaatgagctcagacagtagcattggcacaacactaccggatggggaagcttatgaaggtgagatggaggaatcagagaactctcctcttcttcaagagcatttttgcaaggtgaagaaacctaaggagaagaagaagaagaagaaactggtgaagatgagatttcctttctttaagaagttcaaggtttggttgtacaactacaagccatga

SEQ ID NO: 90538 - protein, 370 aa, Arabidopsis thaliana
  peptide (1)..(370): Ceres Seq. ID no. 12724243
MISRMIFRNYPSHNESDDEPFHFSISRELLLDRNDVVVGEMIGEGAYSIVYKGLLRNQFPVAVKIMDPSTTSAVTKAHKKTFQKEVLLLSKMKHDNIVKFVGACIEPQLIIVTELVEGGTLQRFMHSRPGPLDLKMSLSFALDISRAMEFVHSNGIIHRDLNPRNLLVTGDLKHVKLADFGIAREETRGGMTCEAGTSKWMAPEVYSPEPLRVGEKKEYDHKADIYSFAIVLWQLVTNEEPFPDVPNSLFVPYLVSQGRRPILTKTPDVFVPIVESCWAQDPDARPEFKEISVMLTNLLRRMSSDSSIGTTLPDGEAYEGEMEESENSPLLQEHFCKVKKPKEKKKKKKLVKMRFPFFKKFKVWLYNYKP

SEQ ID NO: 90539 - protein, 366 aa, Arabidopsis thaliana
  peptide (1)..(366): Ceres Seq. ID no. 12724244
MIFRNYPSHNESDDEPFHFSISRELLLDRNDVVVGEMIGEGAYSIVYKGLLRNQFPVAVKIMDPSTTSAVTKAHKKTFQKEVLLLSKMKHDNIVKFVGACIEPQLIIVTELVEGGTLQRFMHSRPGPLDLKMSLSFALDISRAMEFVHSNGIIHRDLNPRNLLVTGDLKHVKLADFGIAREETRGGMTCEAGTSKWMAPEVYSPEPLRVGEKKEYDHKADIYSFAIVLWQLVTNEEPFPDVPNSLFVPYLVSQGRRPILTKTPDVFVPIVESCWAQDPDARPEFKEISVMLTNLLRRMSSDSSIGTTLPDGEAYEGEMEESENSPLLQEHFCKVKKPKEKKKKKKLVKMRFPFFKKFKVWLYNYKP

SEQ ID NO: 90540 - protein, 330 aa, Arabidopsis thaliana
  peptide (1)..(330): Ceres Seq. ID no. 12724245
MIGEGAYSIVYKGLLRNQFPVAVKIMDPSTTSAVTKAHKKTFQKEVLLLSKMKHDNIVKFVGACIEPQLIIVTELVEGGTLQRFMHSRPGPLDLKMSLSFALDISRAMEFVHSNGIIHRDLNPRNLLVTGDLKHVKLADFGIAREETRGGMTCEAGTSKWMAPEVYSPEPLRVGEKKEYDHKADIYSFAIVLWQLVTNEEPFPDVPNSLFVPYLVSQGRRPILTKTPDVFVPIVESCWAQDPDARPEFKEISVMLTNLLRRMSSDSSIGTTLPDGEAYEGEMEESENSPLLQEHFCKVKKPKEKKKKKKLVKMRFPFFKKFKVWLYNYKP

SEQ ID NO: 90541 - DNA, 2820 bp, Arabidopsis thaliana
  misc_feature (1)..(2820): Ceres Seq. ID no. 12724263
  misc_feature (1)..(2820): Ortholog of  Ceres SEQ ID NO 13593889 as cited in SEQ ID NO 53305
  misc_feature (1)..(2820): Ortholog of  Ceres SEQ ID NO 13581959 as cited in SEQ ID NO 56156
aagttttccaaaattgttgactctcttttacaactacacaaaaacctttcttcaaaatattctcagattctcttcttcttccttcgagctttcacagttgattcaattcccgatttcaaactcaatcaccttcagattccgatctccattctctacatcaatcacaatggagaatccgaatccaccagcagagaagctattgaagaagatacgagagctagaagaaagccaagaagatctaaagcgagagatgtcaaaactcaaagtatcagcagagattaaaaggcgttcgcattcttcatcacctaaacgaccttcaaggagaaacagtggagaaggaactccgttatggagaaaaaccggcgccgcatcgttccgtcacgcttctccgttacggaaagagagtcattctaaagacggagtagctggtggtggtgatggaccatcggcaggcaagttcaccgataaacagtatttgaatattttgcagtctatggctcaagctgttcatgtcttcgatcttaatggccaaattatcttttggaactcgatggcggagaagctttatggattctcagctgcagaagcgttagggaaggactcgattaatatactcgtagatggtcaagatgctgctgttgcaaaaaatatctttcagcgttgcagcagtggagagagttggactggagagtttcctgttaagaataaaatgggagagaggttttcggttgtgactacgatttctcctttttatgatgatgatggtttgcttattgggattatatgtatcacgaatgattcggcactttttcaacggccgagagttcctcccgctaaaaacaggtggcaagaaggggattcaagcttttgccgggggactaatggtgttgcttctaggcttggttttgattccaaagaagctgttgtgtcgaaacttggccttgattctcagcagcctattcaagctgctatagcatctaagatctcagatttggcatccaaggtgggcaacaaggtcaggtcgaaaatgcgagcaggtgataataacgcctcacaccctgagggtggaaatgggggcagtcatcagtctgatcagggtttcttcgatgctgctttctctgaccagagggaagatgcagaaacaaatgatgctagcacacctagggggaatttgatccagtctccttttggtgtgttcttatgtaacgatgataagtcttcttcaaaagcctccggagaatccaatgatgaaaatgatagaaactctgttgtccctaagaaacttacctcaaagactgaagagtggatggtaaagaaaggactgtcatggccatggaaaggaaatgagcgggaaggtttggaaagaagaaatgctcattctgtgtggccttgggtgcataatgaacaacaaaaagaagaggctcatcatagtaattcctataacagtgttaagtctgaaagcctggcaagtgaaagtaataaacctgccaataatgagaatatgggttctgttaatgtgaatagcgcaagcagtgctagcagctgtggaagtaccagcagcagtgttatgaacaaggttgacatggatagcgactgcttagactatgaaatcttatgggaggatttgacaattggagaacaaatcgggcaaggttcatgtggaactgtctatcatggtctatggtttggatctgatgtggctgtaaaggtgttttccaaacaagaatattcagaagagatcataacatctttcaaacaagaggtatcattgatgaaaaggcttagacatccaaacgttctgctgtttatgggagctgtggcatcacctcagcgtctttgtatagtgacagagtttctaccacgtggaagtctctttcgtttgctgcagaggaacaagtcaaaactagatttgaggcgacgtatccatatggcatcagacattgctcgtggcatgaattatcttcaccactgtagtcctcccatcattcaccgtgatctgaagtcgtcaaatctactggttgatcggaactggactgtgaaggttgctgattttggtctttctcgcatcaagcatgagacgtacctcactacaaacggaaggggaacgcctcaatggatggcaccagaagttcttcgaaatgaggctgctgatgaaaagtctgacgtttacagttttggagtagtactatgggagcttgtgacagagaagatcccatgggaaaatctaaatgctatgcaggtgattggagccgtggggttcatgaaccagaggctggaagtcccaaaagacgttgaccctcagtggattgctttaatggaaagctgctggcacagcgaaccgcaatgtagaccatcgttccaagaattgatggacaaattaagagagcttcaaagaaagtatactatacagttccaagcagctcgtgctgcatcgatagacaactcttctctcaaggaaaaataaacccaacgagcagagaatctgaatatgcatttcgcgatcaacacaacaaaagaagaaagctcaatgaagaaatgcaataaagaaaagcagctaaagcagactttgatatgctctctcattgcgtgagagaggcattctttatatggagttcaattcgaaatcgtcatgtgatgcgatgcgagctacagaggttatacatatgtaattgttgtgccaatctatttatgtaattcttaacagagagagagagagagacagacccagtttttaagaatagtctgtacatgtaacaaacgagtaaaaaccaagatttgtaaccctgatttttagtaaatattgtcacatttatttggatc

SEQ ID NO: 90542 - protein, 820 aa, Arabidopsis thaliana
  peptide (1)..(820): Ceres Seq. ID no. 12724264
SFPKLLTLFYNYTKTFLQNILRFSSSSFELSQLIQFPISNSITFRFRSPFSTSITMENPNPPAEKLLKKIRELEESQEDLKREMSKLKVSAEIKRRSHSSSPKRPSRRNSGEGTPLWRKTGAASFRHASPLRKESHSKDGVAGGGDGPSAGKFTDKQYLNILQSMAQAVHVFDLNGQIIFWNSMAEKLYGFSAAEALGKDSINILVDGQDAAVAKNIFQRCSSGESWTGEFPVKNKMGERFSVVTTISPFYDDDGLLIGIICITNDSALFQRPRVPPAKNRWQEGDSSFCRGTNGVASRLGFDSKEAVVSKLGLDSQQPIQAAIASKISDLASKVGNKVRSKMRAGDNNASHPEGGNGGSHQSDQGFFDAAFSDQREDAETNDASTPRGNLIQSPFGVFLCNDDKSSSKASGESNDENDRNSVVPKKLTSKTEEWMVKKGLSWPWKGNEREGLERRNAHSVWPWVHNEQQKEEAHHSNSYNSVKSESLASESNKPANNENMGSVNVNSASSASSCGSTSSSVMNKVDMDSDCLDYEILWEDLTIGEQIGQGSCGTVYHGLWFGSDVAVKVFSKQEYSEEIITSFKQEVSLMKRLRHPNVLLFMGAVASPQRLCIVTEFLPRGSLFRLLQRNKSKLDLRRRIHMASDIARGMNYLHHCSPPIIHRDLKSSNLLVDRNWTVKVADFGLSRIKHETYLTTNGRGTPQWMAPEVLRNEAADEKSDVYSFGVVLWELVTEKIPWENLNAMQVIGAVGFMNQRLEVPKDVDPQWIALMESCWHSEPQCRPSFQELMDKLRELQRKYTIQFQAARAASIDNSSLKEK

SEQ ID NO: 90543 - protein, 765 aa, Arabidopsis thaliana
  peptide (1)..(765): Ceres Seq. ID no. 12724265
MENPNPPAEKLLKKIRELEESQEDLKREMSKLKVSAEIKRRSHSSSPKRPSRRNSGEGTPLWRKTGAASFRHASPLRKESHSKDGVAGGGDGPSAGKFTDKQYLNILQSMAQAVHVFDLNGQIIFWNSMAEKLYGFSAAEALGKDSINILVDGQDAAVAKNIFQRCSSGESWTGEFPVKNKMGERFSVVTTISPFYDDDGLLIGIICITNDSALFQRPRVPPAKNRWQEGDSSFCRGTNGVASRLGFDSKEAVVSKLGLDSQQPIQAAIASKISDLASKVGNKVRSKMRAGDNNASHPEGGNGGSHQSDQGFFDAAFSDQREDAETNDASTPRGNLIQSPFGVFLCNDDKSSSKASGESNDENDRNSVVPKKLTSKTEEWMVKKGLSWPWKGNEREGLERRNAHSVWPWVHNEQQKEEAHHSNSYNSVKSESLASESNKPANNENMGSVNVNSASSASSCGSTSSSVMNKVDMDSDCLDYEILWEDLTIGEQIGQGSCGTVYHGLWFGSDVAVKVFSKQEYSEEIITSFKQEVSLMKRLRHPNVLLFMGAVASPQRLCIVTEFLPRGSLFRLLQRNKSKLDLRRRIHMASDIARGMNYLHHCSPPIIHRDLKSSNLLVDRNWTVKVADFGLSRIKHETYLTTNGRGTPQWMAPEVLRNEAADEKSDVYSFGVVLWELVTEKIPWENLNAMQVIGAVGFMNQRLEVPKDVDPQWIALMESCWHSEPQCRPSFQELMDKLRELQRKYTIQFQAARAASIDNSSLKEK

SEQ ID NO: 90544 - protein, 737 aa, Arabidopsis thaliana
  peptide (1)..(737): Ceres Seq. ID no. 12724266
MSKLKVSAEIKRRSHSSSPKRPSRRNSGEGTPLWRKTGAASFRHASPLRKESHSKDGVAGGGDGPSAGKFTDKQYLNILQSMAQAVHVFDLNGQIIFWNSMAEKLYGFSAAEALGKDSINILVDGQDAAVAKNIFQRCSSGESWTGEFPVKNKMGERFSVVTTISPFYDDDGLLIGIICITNDSALFQRPRVPPAKNRWQEGDSSFCRGTNGVASRLGFDSKEAVVSKLGLDSQQPIQAAIASKISDLASKVGNKVRSKMRAGDNNASHPEGGNGGSHQSDQGFFDAAFSDQREDAETNDASTPRGNLIQSPFGVFLCNDDKSSSKASGESNDENDRNSVVPKKLTSKTEEWMVKKGLSWPWKGNEREGLERRNAHSVWPWVHNEQQKEEAHHSNSYNSVKSESLASESNKPANNENMGSVNVNSASSASSCGSTSSSVMNKVDMDSDCLDYEILWEDLTIGEQIGQGSCGTVYHGLWFGSDVAVKVFSKQEYSEEIITSFKQEVSLMKRLRHPNVLLFMGAVASPQRLCIVTEFLPRGSLFRLLQRNKSKLDLRRRIHMASDIARGMNYLHHCSPPIIHRDLKSSNLLVDRNWTVKVADFGLSRIKHETYLTTNGRGTPQWMAPEVLRNEAADEKSDVYSFGVVLWELVTEKIPWENLNAMQVIGAVGFMNQRLEVPKDVDPQWIALMESCWHSEPQCRPSFQELMDKLRELQRKYTIQFQAARAASIDNSSLKEK

SEQ ID NO: 90545 - DNA, 964 bp, Arabidopsis thaliana
  misc_feature (1)..(964): Ceres Seq. ID no. 12724275
  misc_feature (1)..(964): Ortholog of  Ceres SEQ ID NO 14308278 as cited in SEQ ID NO 55403
  misc_feature (1)..(964): Ortholog of  Ceres SEQ ID NO 12618176 as cited in SEQ ID NO 64489
  misc_feature (1)..(964): Ortholog of  Ceres SEQ ID NO 15179231 as cited in SEQ ID NO 0
caagagcgaagctctaaaacagtacatcatggaaacgtcagcgtatccaagagagcatgaattgctcaaggaacttcgaaaagctactgtccaaaaatacggaaatttaagcgagatggaggttccggttgatgagggtcatttcctatcgatgcttgtaaagatcatgaatgcgaaaaacactatcgagatcggtgttttcaccggttactcgcttctcactacagctcttgctttacctgaagatggccgtattaccgcgatagacattgataaagaagcttacgaagttggactagagtttattaagaaggctggtgttgatcacaagattaattttatccattccgatggtcttaaggccttagaccaattggtgaacgacaaatgtgagtttgattttgcatttgcggatgctgacaaatcaagctacgtcaacttccatgagaggcttctaaaattggtgaaggttgggggaatcattgcgttcgacaacaccttgtggtttggttttgtggcggaggatgaagatggagttccggagcatatgagagaatatagagcagctcttatagaattcaataagaaattggctttggatccccgagtcgaggtctctcagatttccattggagatggtatcacgctctgtagacgtcttgtttgatcaaaagactacttgaagagtacgtagcagaaccaaagtcggagagtttggaataaaagtgttagatggttcaataacgacttcgtcttttgtcacaactttgcttgtaatggtgtgtttgattgatgctcactctttatcttctttctatgttgtggtttcgtcgatgttgttctgtctggcaacaaaactattagtacactaaattacttttaataataattgttgtaacattataatttttttttttctggtcgacacattattattactgttttttttctttttaagtgtttg

SEQ ID NO: 90546 - protein, 221 aa, Arabidopsis thaliana
  peptide (1)..(221): Ceres Seq. ID no. 12724276
KSEALKQYIMETSAYPREHELLKELRKATVQKYGNLSEMEVPVDEGHFLSMLVKIMNAKNTIEIGVFTGYSLLTTALALPEDGRITAIDIDKEAYEVGLEFIKKAGVDHKINFIHSDGLKALDQLVNDKCEFDFAFADADKSSYVNFHERLLKLVKVGGIIAFDNTLWFGFVAEDEDGVPEHMREYRAALIEFNKKLALDPRVEVSQISIGDGITLCRRLV

SEQ ID NO: 90547 - protein, 212 aa, Arabidopsis thaliana
  peptide (1)..(212): Ceres Seq. ID no. 12724277
METSAYPREHELLKELRKATVQKYGNLSEMEVPVDEGHFLSMLVKIMNAKNTIEIGVFTGYSLLTTALALPEDGRITAIDIDKEAYEVGLEFIKKAGVDHKINFIHSDGLKALDQLVNDKCEFDFAFADADKSSYVNFHERLLKLVKVGGIIAFDNTLWFGFVAEDEDGVPEHMREYRAALIEFNKKLALDPRVEVSQISIGDGITLCRRLV

SEQ ID NO: 90548 - protein, 183 aa, Arabidopsis thaliana
  peptide (1)..(183): Ceres Seq. ID no. 12724278
MEVPVDEGHFLSMLVKIMNAKNTIEIGVFTGYSLLTTALALPEDGRITAIDIDKEAYEVGLEFIKKAGVDHKINFIHSDGLKALDQLVNDKCEFDFAFADADKSSYVNFHERLLKLVKVGGIIAFDNTLWFGFVAEDEDGVPEHMREYRAALIEFNKKLALDPRVEVSQISIGDGITLCRRLV

SEQ ID NO: 90549 - DNA, 1092 bp, Arabidopsis thaliana
  misc_feature (1)..(1092): Ceres Seq. ID no. 12724283
  misc_feature (1)..(1092): Ortholog of  Ceres SEQ ID NO 13658153 as cited in SEQ ID NO 66326
atgggaaaagtggagattgttcgtaactcacttcctatgagtgggggagatggtccgaacagctactctaagaattctcatttgcagagaaaaacaacaagtttgttgaaagagaaaatagacaaactggtattagagaaactcaatgcaaaaaccctaatctcatctgactccaacacattccggatagccgatcttggttgtgcaactggaccaaatacattctttctcgttgacaacatcatcaaatccattgaaaccagcttaagaaaatcaaactcgtcaaaaccagagtttcttgtcttcttcaacgacctcccacaaaacgacttcaacactctcttcacatctctccctcaagaccggagttacttggcggtcggagtcccgggttcgttctacggccgtgtccttcctcaatcctccgttcatattgtagtgacgatgggggccacacactggctatcgagtgtaccaaaagaggtgttggacaaaagctccaaggcgtggaataaaggcaaggttcactactcaaatgccgcggatgaagttgtgaaggcttatagagatcagtttggtcgggacatggagaagtttctagaagctagggctacagaaatagtaagtggaggtcttttggttgttggaatgtgtgggattcctaaaggaatgcctttctccaatcttgccgacagtatcatgtatacgtccatggctgatgttctcactcaaatgcattccgagggtttgatcagcgaagagcaagtcgataccttcaacatacctatctactcagcaacgcctgaggaggtaacagtcctggtagtgaaaaatggatgcttcactgtcgaatctatggagctgatggacccaacggcctggctcaaacggccgacgaacgtggaggatgttaggcattggatggtttgcataaaggcaacaatgggatctctcttcatcaaccattttggtgaacatctcctcgacgatgtcttcgaccgtctcaccgcaaaactggttggactcaccgagaaaattgaatccagctaccgtgagaaggtcatgttgttctttgcgttgcaacgaaaataa

SEQ ID NO: 90550 - protein, 363 aa, Arabidopsis thaliana
  peptide (1)..(363): Ceres Seq. ID no. 12724284
MGKVEIVRNSLPMSGGDGPNSYSKNSHLQRKTTSLLKEKIDKLVLEKLNAKTLISSDSNTFRIADLGCATGPNTFFLVDNIIKSIETSLRKSNSSKPEFLVFFNDLPQNDFNTLFTSLPQDRSYLAVGVPGSFYGRVLPQSSVHIVVTMGATHWLSSVPKEVLDKSSKAWNKGKVHYSNAADEVVKAYRDQFGRDMEKFLEARATEIVSGGLLVVGMCGIPKGMPFSNLADSIMYTSMADVLTQMHSEGLISEEQVDTFNIPIYSATPEEVTVLVVKNGCFTVESMELMDPTAWLKRPTNVEDVRHWMVCIKATMGSLFINHFGEHLLDDVFDRLTAKLVGLTEKIESSYREKVMLFFALQRK

SEQ ID NO: 90551 - protein, 351 aa, Arabidopsis thaliana
  peptide (1)..(351): Ceres Seq. ID no. 12724285
MSGGDGPNSYSKNSHLQRKTTSLLKEKIDKLVLEKLNAKTLISSDSNTFRIADLGCATGPNTFFLVDNIIKSIETSLRKSNSSKPEFLVFFNDLPQNDFNTLFTSLPQDRSYLAVGVPGSFYGRVLPQSSVHIVVTMGATHWLSSVPKEVLDKSSKAWNKGKVHYSNAADEVVKAYRDQFGRDMEKFLEARATEIVSGGLLVVGMCGIPKGMPFSNLADSIMYTSMADVLTQMHSEGLISEEQVDTFNIPIYSATPEEVTVLVVKNGCFTVESMELMDPTAWLKRPTNVEDVRHWMVCIKATMGSLFINHFGEHLLDDVFDRLTAKLVGLTEKIESSYREKVMLFFALQRK

SEQ ID NO: 90552 - protein, 215 aa, Arabidopsis thaliana
  peptide (1)..(215): Ceres Seq. ID no. 12724286
MGATHWLSSVPKEVLDKSSKAWNKGKVHYSNAADEVVKAYRDQFGRDMEKFLEARATEIVSGGLLVVGMCGIPKGMPFSNLADSIMYTSMADVLTQMHSEGLISEEQVDTFNIPIYSATPEEVTVLVVKNGCFTVESMELMDPTAWLKRPTNVEDVRHWMVCIKATMGSLFINHFGEHLLDDVFDRLTAKLVGLTEKIESSYREKVMLFFALQRK

SEQ ID NO: 90553 - DNA, 951 bp, Arabidopsis thaliana
  misc_feature (1)..(951): Ceres Seq. ID no. 12724287
  misc_feature (1)..(951): Ortholog of  Ceres SEQ ID NO 12484482 as cited in SEQ ID NO 53324
atggcaacaatgaaaataccaatgacggtaccttctcctcgagtcgatgctgaccaactctttaaggccttcaaaggaagaggctgcgatacttcggtgatcatcaacatcttagctcatcgcaatgcaacacaacgagctctcatcgaacaagaatacgaaaccaaattctcggatgacctccgaaaacgtctccactctgagcttcatggtcatctcaagaaagccgttcttttgtggatgcctgaagcagtggagcgagacgcttcaatactgaaacgctccttaagaggagccgtgactgatcataaagcgattgctgagattatatgcacacgatctggctctcagcttcgtcagatcaaacaggtctactcaaacactttcggtgtgaaacttgaagaggacatcgaatccgaagcttctggcaatcacaaaagagttttgctcgcgtatttgaacactacgcgatatgaaggaccagagatcgataatgcgagtgtagagaacgatgctaggactctcaagagcgcggttgcaaggaagcataaatctgatgaccagacgttgattcagatattcactgaccgaagcaggactcatttggtcgctgtaagatctacttaccgttccatgtacggcaaagaacttggaaaggccataagagatgagactcgcgggaacttcgagcatgtccttctaacaattttacaatgtgctgaaaactcttgtttctatttcgcaaaggcattgaggaaatcaatgaaaggattaggaacagatgacacggcgttgataagaatcgtggtgacgagagcagaggtggatatgcagttcatcatcacagaataccgtaagagatacaagaagactttgtacaatgctgttcattctgatacaactagtcattacaggacttttctcctctctcttttaggccccaacgtttga

SEQ ID NO: 90554 - protein, 316 aa, Arabidopsis thaliana
  peptide (1)..(316): Ceres Seq. ID no. 12724288
MATMKIPMTVPSPRVDADQLFKAFKGRGCDTSVIINILAHRNATQRALIEQEYETKFSDDLRKRLHSELHGHLKKAVLLWMPEAVERDASILKRSLRGAVTDHKAIAEIICTRSGSQLRQIKQVYSNTFGVKLEEDIESEASGNHKRVLLAYLNTTRYEGPEIDNASVENDARTLKSAVARKHKSDDQTLIQIFTDRSRTHLVAVRSTYRSMYGKELGKAIRDETRGNFEHVLLTILQCAENSCFYFAKALRKSMKGLGTDDTALIRIVVTRAEVDMQFIITEYRKRYKKTLYNAVHSDTTSHYRTFLLSLLGPNV

SEQ ID NO: 90555 - protein, 313 aa, Arabidopsis thaliana
  peptide (1)..(313): Ceres Seq. ID no. 12724289
MKIPMTVPSPRVDADQLFKAFKGRGCDTSVIINILAHRNATQRALIEQEYETKFSDDLRKRLHSELHGHLKKAVLLWMPEAVERDASILKRSLRGAVTDHKAIAEIICTRSGSQLRQIKQVYSNTFGVKLEEDIESEASGNHKRVLLAYLNTTRYEGPEIDNASVENDARTLKSAVARKHKSDDQTLIQIFTDRSRTHLVAVRSTYRSMYGKELGKAIRDETRGNFEHVLLTILQCAENSCFYFAKALRKSMKGLGTDDTALIRIVVTRAEVDMQFIITEYRKRYKKTLYNAVHSDTTSHYRTFLLSLLGPNV

SEQ ID NO: 90556 - protein, 309 aa, Arabidopsis thaliana
  peptide (1)..(309): Ceres Seq. ID no. 12724290
MTVPSPRVDADQLFKAFKGRGCDTSVIINILAHRNATQRALIEQEYETKFSDDLRKRLHSELHGHLKKAVLLWMPEAVERDASILKRSLRGAVTDHKAIAEIICTRSGSQLRQIKQVYSNTFGVKLEEDIESEASGNHKRVLLAYLNTTRYEGPEIDNASVENDARTLKSAVARKHKSDDQTLIQIFTDRSRTHLVAVRSTYRSMYGKELGKAIRDETRGNFEHVLLTILQCAENSCFYFAKALRKSMKGLGTDDTALIRIVVTRAEVDMQFIITEYRKRYKKTLYNAVHSDTTSHYRTFLLSLLGPNV

SEQ ID NO: 90557 - DNA, 1521 bp, Arabidopsis thaliana
  misc_feature (1)..(1521): Ceres Seq. ID no. 12724298
  misc_feature (1)..(1521): Ortholog of  Ceres SEQ ID NO 13595861 as cited in SEQ ID NO 58153
  misc_feature (1)..(1521): Ortholog of  Ceres SEQ ID NO 13584292 as cited in SEQ ID NO 63687
gaaagagaaactccgataccagagcttggtggagcagtggagacgcttccacgcgaatctcgcagtcccactcgtcttcctccttccctctcttcctttgaataccttacctctctcggtctcgctccctccctcgattcaagcctattcgtcttcttacgctgtgtcttgaaaccctaatctttttcatttcaatccctaaaggtgtgattttgagattatggccaaagctaggaaggcaggacgtagggttccttcacgacgcttcagggcaagagcaaaaccatacaaatttccatcttctaaaagacttgtggcgagaaacatgtttgcggaagattgttcaaagtgtctagagaagagggattgggagaatgttatatgttcggtttgcatggagtgtccacacaacgctgtccttcttctctgctcatctcatgacaagggatgtcgtccttacatgtgtggaaccagtttccggtattctaattgcttagatcagtacaagaaagcgtcagctaagctgaagacatcgggccatcaacagatcaataagtctgagcttggaaatctcacatgcccactttgtagaggacaggtgaaaggttggacaatcgtacagcctgctcgtgactttttgaatcttaagaagaggatctgtatgcaggagaactgtgtttatgctggaaccttcaaagagctgaggaaacacatgaaagtggaccaccctagtgcgaagccgcgtgaagtggatcctgatgtggagcagaattggagaaggcttgagatcgagcatgaccgggacgatgttatgagcacgattaggtcgacaatgcctggtacagtggtgtatggtgattacgtaattgaaaggaacaatgccaacggttcagattcagacgagggtggtgatgatgatgggatcgatgctgcatttggtaggaatcttgtgaatgttttccttctgttacatgcttttggggcatcaggtaatcagatcagacgctctgattcagattcgaatgactcgacaacaatcaaccgaggaacaagtgagctgaatttctctgaagaagaagaggaagaggaggaggaggagaggcatagtaacagtaactctttggcaagtcgaatgaggcgacaaggacgcgttctgctgggacgttcaggtaggagacgtagagatagagaagctaaccagaacacaggtcctcctcctagatgagagagaatcacacgaattcaaaagaaaaccctgtctgattttgggtttcaggtaagctttatggtatggttaggtacaaatgtagtttcgacaagtttaaaacaaaacaaaaaaaggcttttggcctttctgctatcaccattggagaatttgggaatttgactcgaaattctttcatatgctagagaagcaggcttgcaatctcatgttttatttactgtattctgatgtaactttctgggtggaaaattcacaaatatctatccttgtgaataagcatgatcagtgatgatgac

SEQ ID NO: 90558 - protein, 334 aa, Arabidopsis thaliana
  peptide (1)..(334): Ceres Seq. ID no. 12724299
MAKARKAGRRVPSRRFRARAKPYKFPSSKRLVARNMFAEDCSKCLEKRDWENVICSVCMECPHNAVLLLCSSHDKGCRPYMCGTSFRYSNCLDQYKKASAKLKTSGHQQINKSELGNLTCPLCRGQVKGWTIVQPARDFLNLKKRICMQENCVYAGTFKELRKHMKVDHPSAKPREVDPDVEQNWRRLEIEHDRDDVMSTIRSTMPGTVVYGDYVIERNNANGSDSDEGGDDDGIDAAFGRNLVNVFLLLHAFGASGNQIRRSDSDSNDSTTINRGTSELNFSEEEEEEEEEERHSNSNSLASRMRRQGRVLLGRSGRRRRDREANQNTGPPPR

SEQ ID NO: 90559 - protein, 299 aa, Arabidopsis thaliana
  peptide (1)..(299): Ceres Seq. ID no. 12724300
MFAEDCSKCLEKRDWENVICSVCMECPHNAVLLLCSSHDKGCRPYMCGTSFRYSNCLDQYKKASAKLKTSGHQQINKSELGNLTCPLCRGQVKGWTIVQPARDFLNLKKRICMQENCVYAGTFKELRKHMKVDHPSAKPREVDPDVEQNWRRLEIEHDRDDVMSTIRSTMPGTVVYGDYVIERNNANGSDSDEGGDDDGIDAAFGRNLVNVFLLLHAFGASGNQIRRSDSDSNDSTTINRGTSELNFSEEEEEEEEEERHSNSNSLASRMRRQGRVLLGRSGRRRRDREANQNTGPPPR

SEQ ID NO: 90560 - protein, 276 aa, Arabidopsis thaliana
  peptide (1)..(276): Ceres Seq. ID no. 12724301
MECPHNAVLLLCSSHDKGCRPYMCGTSFRYSNCLDQYKKASAKLKTSGHQQINKSELGNLTCPLCRGQVKGWTIVQPARDFLNLKKRICMQENCVYAGTFKELRKHMKVDHPSAKPREVDPDVEQNWRRLEIEHDRDDVMSTIRSTMPGTVVYGDYVIERNNANGSDSDEGGDDDGIDAAFGRNLVNVFLLLHAFGASGNQIRRSDSDSNDSTTINRGTSELNFSEEEEEEEEEERHSNSNSLASRMRRQGRVLLGRSGRRRRDREANQNTGPPPR

SEQ ID NO: 90561 - DNA, 1125 bp, Arabidopsis thaliana
  misc_feature (1)..(1125): Ceres Seq. ID no. 12724302
  misc_feature (1)..(1125): Ortholog of  Ceres SEQ ID NO 13585587 as cited in SEQ ID NO 65515
atgggatttgactttagcacttcaaaatccaaagctaaaagacaaaaaagaatagaggttcgatttgcatctccattaatgggcatcgatctttctcttaagctcgaggccgaggagaaaaagaaagagatagaaggatcgaaacatagccgtgagaacaaagaagacgaagaacatgatgctagtggtgatgaagatgaacaaatggtgaaagaagacgaagatgattcttcttctttaggtttaagaacccgagaagaagaaaacgaacgtgaagagctcttgcagctacagatccagatggaaagtgtgaaagaagagaatactaggttgaggaagcttgtcgagcagactcttgaagattatcgtcatcttgagatgaaattcccggttatcgataaaaccaagaagatggatcttgaaatgttccttggagtacaaggcaaacgatgtgtggatataacaagtaaggctcggaaaagaggagctgagagatctccgtcaatggaaagagaaatagggctttcactttctctagagaaaaaacagaaacaagaagagagcaaagaagctgttcagtctcatcaccaaagatacaatagtagcagcttagatatgaatatgccacgtatcatttcatcttctcaaggtaatagaaaggccagggtgtccgtgagggcgagatgtgagaccgcaacaatgaatgatggatgccaatggaggaagtacggtcagaaaaccgcgaaagggaatccatgtcctcgagcttattaccgatgcaccgtggctccaggatgtcccgttagaaaacaggtgcaaaggtgtttagaagacatgtcaatactgataacaacctacgaaggaacacataaccatccacttccggtcggagcaacagccatggcttccactgcctctacttctccattcttgttactcgattccagtgacaacctctctcatccttcctattaccaaactcctcaagccatagactcttctttgattacatacccacaaaatagcagctacaacaatcgaaccataagaagcttgaactttgatggtccatctagaggagatcacgtttcatcttctcaaaaccgattaaattggatgatgtag

SEQ ID NO: 90562 - protein, 374 aa, Arabidopsis thaliana
  peptide (1)..(374): Ceres Seq. ID no. 12724303
MGFDFSTSKSKAKRQKRIEVRFASPLMGIDLSLKLEAEEKKKEIEGSKHSRENKEDEEHDASGDEDEQMVKEDEDDSSSLGLRTREEENEREELLQLQIQMESVKEENTRLRKLVEQTLEDYRHLEMKFPVIDKTKKMDLEMFLGVQGKRCVDITSKARKRGAERSPSMEREIGLSLSLEKKQKQEESKEAVQSHHQRYNSSSLDMNMPRIISSSQGNRKARVSVRARCETATMNDGCQWRKYGQKTAKGNPCPRAYYRCTVAPGCPVRKQVQRCLEDMSILITTYEGTHNHPLPVGATAMASTASTSPFLLLDSSDNLSHPSYYQTPQAIDSSLITYPQNSSYNNRTIRSLNFDGPSRGDHVSSSQNRLNWMM

SEQ ID NO: 90563 - protein, 348 aa, Arabidopsis thaliana; identical to SEQ ID NO: 88886
  peptide (1)..(348): Ceres Seq. ID no. 12724304

SEQ ID NO: 90564 - protein, 306 aa, Arabidopsis thaliana; identical to SEQ ID NO: 88887
  peptide (1)..(306): Ceres Seq. ID no. 12724305

SEQ ID NO: 90565 - DNA, 1071 bp, Arabidopsis thaliana
  misc_feature (1)..(1071): Ceres Seq. ID no. 12724330
  misc_feature (1)..(1071): Ortholog of  Ceres SEQ ID NO 14313599 as cited in SEQ ID NO 54989
  misc_feature (1)..(1071): Ortholog of  Ceres SEQ ID NO 15176204 as cited in SEQ ID NO 55608
  misc_feature (1)..(1071): Ortholog of  Ceres SEQ ID NO 15225111 as cited in SEQ ID NO 58444
  misc_feature (1)..(1071): Ortholog of  Ceres SEQ ID NO 14313064 as cited in SEQ ID NO 59543
  misc_feature (1)..(1071): Ortholog of  Ceres SEQ ID NO 13584238 as cited in SEQ ID NO 64216
  misc_feature (1)..(1071): Ortholog of  Ceres SEQ ID NO 13661001 as cited in SEQ ID NO 67531
  misc_feature (1)..(1071): Ortholog of  Ceres SEQ ID NO 15178920 as cited in SEQ ID NO 0
atggaaaattcgatgaagaagaagaagagcttcaaagaaagtgaagatgaagaactaagaagagggccttggactttggaggaagacacacttctcacaaattacatcctccataacggtgagggtcgttggaatcacgtcgccaaatgtgctgggctaaagagaactgggaaaagttgtagattgagatggttgaattacttgaaacccgacataagacgagggaatcttactcctcaagaacagcttttgatccttgagcttcactctaaatggggtaataggtggtccaagattgcacagtacttgccaggaagaacggataacgagatcaagaactattggagaacaagagttcaaaaacaagctcgtcaactcaacatcgaatctaacagcgacaagttctttgacgctgttcgtagtttttgggtccctagattgatcgagaagatggaacaaaactcatccactactactacttattgttgtccccaaaacaacaacaacaactctcttcttcttccttctcaatctcacgactctttaagtatgcaaaaagatatagattactcgggtttcagcaacatagacggttcttcttcaacttctacttgcatgtctcatctaacaacagttccacactttatggatcaaagcaacaccaatatcatcgatggctcgatgtgtttccatgaaggcaatgttcaagaattcggaggatatgttcctggcatggaggattacatggtaaactcggacatctcaatggaatgtcacgtggcggatggttattcagcgtacgaggatgttacacaagatcccatgtggaatgtggatgacatttggcagtttagggagtaattaagtcgtcaagagatgagatggtagagcctaccactacggttctattatatggactaatatacttcttttgcttaactaagcaaaaagtttcgaaccttttacccatattatctcgggttggagactagaacatgttaaatttgtatcttctttgttgcgagtacttactaagtcattggataaatatttataatgatagtttcttgt

SEQ ID NO: 90566 - protein, 286 aa, Arabidopsis thaliana
  peptide (1)..(286): Ceres Seq. ID no. 12724331
MENSMKKKKSFKESEDEELRRGPWTLEEDTLLTNYILHNGEGRWNHVAKCAGLKRTGKSCRLRWLNYLKPDIRRGNLTPQEQLLILELHSKWGNRWSKIAQYLPGRTDNEIKNYWRTRVQKQARQLNIESNSDKFFDAVRSFWVPRLIEKMEQNSSTTTTYCCPQNNNNNSLLLPSQSHDSLSMQKDIDYSGFSNIDGSSSTSTCMSHLTTVPHFMDQSNTNIIDGSMCFHEGNVQEFGGYVPGMEDYMVNSDISMECHVADGYSAYEDVTQDPMWNVDDIWQFRE

SEQ ID NO: 90567 - protein, 282 aa, Arabidopsis thaliana
  peptide (1)..(282): Ceres Seq. ID no. 12724332
MKKKKSFKESEDEELRRGPWTLEEDTLLTNYILHNGEGRWNHVAKCAGLKRTGKSCRLRWLNYLKPDIRRGNLTPQEQLLILELHSKWGNRWSKIAQYLPGRTDNEIKNYWRTRVQKQARQLNIESNSDKFFDAVRSFWVPRLIEKMEQNSSTTTTYCCPQNNNNNSLLLPSQSHDSLSMQKDIDYSGFSNIDGSSSTSTCMSHLTTVPHFMDQSNTNIIDGSMCFHEGNVQEFGGYVPGMEDYMVNSDISMECHVADGYSAYEDVTQDPMWNVDDIWQFRE

SEQ ID NO: 90568 - DNA, 1730 bp, Arabidopsis thaliana
  misc_feature (1)..(1730): Ceres Seq. ID no. 12724350
  misc_feature (1)..(1730): Ortholog of  Ceres SEQ ID NO 14316204 as cited in SEQ ID NO 59644
gttgcaatctttttccctggattcttgtttgcaacctacctataattctggtcagatctgcatttgttgttgtcgaaaccaaaacggtcgaagaagaagaagaagaacatcagagtactaagtaaagtttgttgtatcttggctacgaattcatgacttcttggctcagaaagattgtgttataagatttgagagtgtgaagggtctttcaagaagttgttacaatggcgtctagagaaggaaagagacgtaatcataatcatgatgatgagaagcttgtgcctcttgctgctttgataagtagagagacgaaagctgctaaaatggagaaaccgattgtgagatttggacaagctgctcaatctaggaaaggagaagattatgtcttgatcaagactgatagtcttcgtgttccttccaattcttcaactgctttctctgtttttgcggtatttgatgggcataatggaaaagcggcagcggtttatacaagggagaatctgttgaaccatgttattagtgctcttcctagtgggcttagccgtgacgagtggcttcacgctttacctcgtgcattagtttctggatttgtgaagactgataaggagtttcagagcagaggggaaacttctggaacaacagcaacgtttgtgatagtagatggatggactgtgaccgttgcatgtgttggcgactcgcgctgcatcttggatactaagggtggttcagtttctaaccttactgttgatcacaggcttgaagataatacagaagagagggaacgcgttactgcgagtggtggagaagttggcaggctaagcattgttggaggcgttgagattggtccactacggtgttggcctggaggtctctgcctttcaaggtctattggggatatggatgttggggagttcattgttccagttccctttgtaaagcaagtgaagctatcaaaccttggaggaaggcttatcattgcatcagatggcatatgggatgctctctcctcagaagtcgcagctaaaacttgccgtgggttatctgctgaacttgctgctagacaagtagttaaggaagcattgagaagaaggggacttaaggatgacacaacttgcattgtggtcgacataatcccacccgaaaacttccaagaaccaccgccttcacctcctaagaagcacaacaacttctttaaatcattactcttcagaaagaaatcaaactcatctaacaaactctccaagaaactttccactgttggtattgttgaagagctcttcgaagaaggttcggcaatgctcgctgaaaggttaggatcaggtgactgttctaaggaatcaacaacaggaggagggatattcacgtgtgccatatgccaactagacctagctccaagcgagggaatatcagtccacgcaggttcaatcttctcgacaagtctaaaaccgtggcaaggaccgttcttatgcacagattgtcgtgacaaaaaagacgcgatggaagggaaacgtccaagtggagttaaagtcatctagattgaaagatggtaatctgcatcatctctcacttacacacacacattctctattcgttcattataattctttcttctttcgttctttgttgttacattacatctacgcatccattggaataaaatttgagtagtagacctgattctttatggatctgagaatcgggttcgatatagagtgagtttgattgattgg

SEQ ID NO: 90569 - protein, 436 aa, Arabidopsis thaliana
  peptide (1)..(436): Ceres Seq. ID no. 12724351
MASREGKRRNHNHDDEKLVPLAALISRETKAAKMEKPIVRFGQAAQSRKGEDYVLIKTDSLRVPSNSSTAFSVFAVFDGHNGKAAAVYTRENLLNHVISALPSGLSRDEWLHALPRALVSGFVKTDKEFQSRGETSGTTATFVIVDGWTVTVACVGDSRCILDTKGGSVSNLTVDHRLEDNTEERERVTASGGEVGRLSIVGGVEIGPLRCWPGGLCLSRSIGDMDVGEFIVPVPFVKQVKLSNLGGRLIIASDGIWDALSSEVAAKTCRGLSAELAARQVVKEALRRRGLKDDTTCIVVDIIPPENFQEPPPSPPKKHNNFFKSLLFRKKSNSSNKLSKKLSTVGIVEELFEEGSAMLAERLGSGDCSKESTTGGGIFTCAICQLDLAPSEGISVHAGSIFSTSLKPWQGPFLCTDCRDKKDAMEGKRPSGVKVI

SEQ ID NO: 90570 - protein, 403 aa, Arabidopsis thaliana
  peptide (1)..(403): Ceres Seq. ID no. 12724352
MEKPIVRFGQAAQSRKGEDYVLIKTDSLRVPSNSSTAFSVFAVFDGHNGKAAAVYTRENLLNHVISALPSGLSRDEWLHALPRALVSGFVKTDKEFQSRGETSGTTATFVIVDGWTVTVACVGDSRCILDTKGGSVSNLTVDHRLEDNTEERERVTASGGEVGRLSIVGGVEIGPLRCWPGGLCLSRSIGDMDVGEFIVPVPFVKQVKLSNLGGRLIIASDGIWDALSSEVAAKTCRGLSAELAARQVVKEALRRRGLKDDTTCIVVDIIPPENFQEPPPSPPKKHNNFFKSLLFRKKSNSSNKLSKKLSTVGIVEELFEEGSAMLAERLGSGDCSKESTTGGGIFTCAICQLDLAPSEGISVHAGSIFSTSLKPWQGPFLCTDCRDKKDAMEGKRPSGVKVI

SEQ ID NO: 90571 - DNA, 983 bp, Arabidopsis thaliana
  misc_feature (1)..(983): Ceres Seq. ID no. 12724364
  misc_feature (1)..(983): Ortholog of  Ceres SEQ ID NO 14312281 as cited in SEQ ID NO 59172
  misc_feature (1)..(983): Ortholog of  Ceres SEQ ID NO 14302299 as cited in SEQ ID NO 68665
  misc_feature (1)..(983): Ortholog of  Ceres SEQ ID NO 15174396 as cited in SEQ ID NO 0
caaaagttgaaaaataccagctcattcacttatgactcatgagtaacttcttccttataaattcaaattgttcacaacttccttgagttccatttccgaacacaaacacacatcatacgtatatttgtcactaataaacatataaaggaatatgagaatcagctgcaacgggtgtagggttctacgcaaaggttgcaaccaagattgcaccattcgaccatgccttcaatggatcaaatccgcagactctcaagccaatgctacactcttccttgctaagttctacggtcgagccggtcttcttaacctcatcgaatccggtcctgatcaccttcgtcccgcaatatttaggtcacttctgtacgaggcttgtggtcggatcgtgaaccctgtagatggttcggttggtttgatgtggtcagggaactgggctcagtgccaagcagctgttgacgccgtgctcaacggcttacccataactcacacacctcttccaagtgcatccgcgtcgcaccagatcattcctccccacaggacttacgatatacgccacgtggctaaagatccaacaaccggcggcgacagttcggagaatctggccacacgtgtaaacgctaacaagagcaagacgcaaactggccgattcaaacgtgaatccgtgaaccaactaggtgaatgtagtcatgacatgtggcaactcccaagttctagtgctacgcatggttatggccacttcacgttggagaatgtggagagccgaagggaagctccatttaatcaaagttctccaaatcttgggtttgatgatcaagtcgatatcaacgaggttggcttagagctcagacttggttagaaccagaagattgcattattattatcataattctgtctttttaattaataatttcactttctatataaaaggagaaaaaaaaactaaagcaaatcaaatttagtattattgtcaatcattaggttatcat

SEQ ID NO: 90572 - protein, 233 aa, Arabidopsis thaliana
  peptide (1)..(233): Ceres Seq. ID no. 12724365
MRISCNGCRVLRKGCNQDCTIRPCLQWIKSADSQANATLFLAKFYGRAGLLNLIESGPDHLRPAIFRSLLYEACGRIVNPVDGSVGLMWSGNWAQCQAAVDAVLNGLPITHTPLPSASASHQIIPPHRTYDIRHVAKDPTTGGDSSENLATRVNANKSKTQTGRFKRESVNQLGECSHDMWQLPSSSATHGYGHFTLENVESRREAPFNQSSPNLGFDDQVDINEVGLELRLG

SEQ ID NO: 90573 - protein, 146 aa, Arabidopsis thaliana
  peptide (1)..(146): Ceres Seq. ID no. 12724366
MWSGNWAQCQAAVDAVLNGLPITHTPLPSASASHQIIPPHRTYDIRHVAKDPTTGGDSSENLATRVNANKSKTQTGRFKRESVNQLGECSHDMWQLPSSSATHGYGHFTLENVESRREAPFNQSSPNLGFDDQVDINEVGLELRLG

SEQ ID NO: 90574 - DNA, 1860 bp, Arabidopsis thaliana
  misc_feature (1)..(1860): Ceres Seq. ID no. 12724367
  misc_feature (1)..(1860): Ortholog of  Ceres SEQ ID NO 14303366 as cited in SEQ ID NO 54418
  misc_feature (1)..(1860): Ortholog of  Ceres SEQ ID NO 13503610 as cited in SEQ ID NO 62416
  misc_feature (1)..(1860): Ortholog of  Ceres SEQ ID NO 13657610 as cited in SEQ ID NO 66165
  misc_feature (1)..(1860): Ortholog of  Ceres SEQ ID NO 13598312 as cited in SEQ ID NO 68448
  misc_feature (1)..(1860): Ortholog of  Ceres SEQ ID NO 13596100 as cited in SEQ ID NO 68573
attaactcatcttcaaaaataccctaatcacattttgtaacaataatacaattatacattaaaactctccgacgatgcctcaggcaccgatgccagagttctctagctcggtgaagctcaagtacgtgaaacttggttaccaatatttggttaaccatttcttgagttttcttttgatcccgatcatggctattgtcgccgttgagcttcttcggatgggtcctgaagagatccttaatgtttggaattcactccagtttgacctagttcaggttctatgttcttccttctttgtcatcttcatctccactgtttacttcatgtccaagccacgcaccatctacctcgttgactattcttgttacaagccacctgtcacgtgtcgtgtccccttcgcaactttcatggaacactctcgtttgatcctcaaggacaagcctaagagcgtcgagttccaaatgagaatccttgaacgttctggcctcggtgaggagacttgtctccctccggctattcattatattcctcccacaccaaccatggacgcggctagaagcgaggctcagatggttatcttcgaggccatggacgatcttttcaagaaaaccggtcttaaacctaaagacgtcgacatccttatcgtcaactgctctcttttctctcccacaccatcgctctcagctatggtcatcaacaaatataagcttaggagtaatatcaagagcttcaatctttcggggatgggctgcagcgcgggcctgatctcagttgatctagcccgcgacttgctccaagttcatcccaattcaaatgcaatcatcgtcagcacggagatcataacgcctaattactatcaaggcaacgagagagccatgttgttacccaattgtctcttccgcatgggtgcggcagccatacacatgtcaaaccgccggtctgaccggtggcgagccaaatacaagctttcccacctcgtccggacacaccgtggcgctgacgacaagtctttctactgtgtctacgaacaggaagacaaagaaggacacgttggcatcaacttgtccaaagatctcatggccatcgccggtgaagccctcaaggcaaacatcaccacaataggtcctttggtcctaccggcgtcagaacaacttctcttcctcacgtccctaatcggacgtaaaatcttcaacccgaaatggaaaccatacataccggatttcaagctggccttcgaacacttttgcattcacgcaggaggcagagcggtgatcgacgagctccaaaagaatctacaactatcaggagaacacgttgaggcctcaagaatgacactacatcgttttggtaacacgtcatcttcatcgttatggtacgagcttagctacatcgagtctaaagggagaatgaggagaggcgatcgcgtttggcaaatcgcgtttgggagtggtttcaagtgtaactctgccgtgtggaaatgtaaccgtacgattaagacacctaaggacggaccatggtccgattgtatcgaccgttaccctgtctttattcccgaagttgtcaaactctaaactgaaaacgtctttgaacggtttagtaacggtttgattttgtgttacggtttaggtttatttggtctcgggatttggtttaaaggggattgagaaatgggaagttagagagaagaaaaagcaaagcataaatgtttgtatttaattgctctgcatatacttaaatctctgcttttcatttggggtattttttagtttctcgtgctgtaattaataacttgtggtgtactcaaataagaatatttctctctgttttattatttttaaattggagaataaacttctttgtttt

SEQ ID NO: 90575 - protein, 497 aa, Arabidopsis thaliana; identical to SEQ ID NO: 23374
  peptide (1)..(497): Ceres Seq. ID no. 12724368

SEQ ID NO: 90576 - protein, 492 aa, Arabidopsis thaliana; identical to SEQ ID NO: 23375
  peptide (1)..(492): Ceres Seq. ID no. 12724369

SEQ ID NO: 90577 - protein, 460 aa, Arabidopsis thaliana; identical to SEQ ID NO: 23376
  peptide (1)..(460): Ceres Seq. ID no. 12724370

SEQ ID NO: 90578 - DNA, 3048 bp, Arabidopsis thaliana
  misc_feature (1)..(3048): Ceres Seq. ID no. 12724375
  misc_feature (1)..(3048): Ortholog of  Ceres SEQ ID NO 13518411 as cited in SEQ ID NO 55230
  misc_feature (1)..(3048): Ortholog of  Ceres SEQ ID NO 13654989 as cited in SEQ ID NO 63117
  misc_feature (1)..(3048): Ortholog of  Ceres SEQ ID NO 13584744 as cited in SEQ ID NO 69137
aacgtagcattgaagcattttctcagagagtagagaagacgctgcgaaactcagaaaattaaattttcaagctcggaaggaaactctgattcattattacagattcgaagtttcagagaagaagggacaagacaaagtttaactgcttacttgttgtgtttttgctctctggtcttcaattgctgaagttttataacggagatgtttcagttatgatcttacagatctgaggttattgcatatccactcaaattgggtaatctcagtgatctggaattttggtggaagcaaagcaaaatttgtgttttttttgctcggccgatctgggtttgatctattacatcgtcttctctgctttgtcttgaaattagctgtgttgtgatttcgaaagtttgctacttcttcacgtttagtgttcttagttggtaaagtttggtactttcaggatactgtcatactcaaagtctgggacttttaggtgtttttgattgttcatttggtgattgatcatcgtctctgatcgttacttggaggaaagattccaaatttttgaatgagaagttgatttgttgatcggaattgagatggcaacaacaccggttcaacctccggtttcaaattctccaccggtgacttcgccgccgccgccactgaataatgctacttctccggctacaccaccaccagtaacatcgccgctacctccgtcagcacctccaccaaatagagctcctcctcctcctcctccggtgactacctcaccaccaccagttgctaatggagctcctcctcctccactgccaaaaccacctgagagctcttctccgccaccacaaccagtgatcccttcacctcctccttcaacttcgccgccaccacaaccagtaatcccttcacctcctccttcagcatctccaccacctgcattagtcccaccactaccttcttctcctccacctcctgcatctgttcctcctcctcggccatcgccttcaccaccaatcttagtacgttctcctccgccctcagtgcgtccaattcaatctcctcctcctccgccttcagaccgtcccactcaatctcctcctcctccttctcctccttcaccaccttcagagcgtcctactcaatctcctccttcgccaccttcagaacgtcctactcaatctcctccgcctccttctcctccttcaccgccttcagaccgtccctctcaatctcctcctccaccaccagaggatactaaaccccaacctcccaggagaagtccaaattctccaccaccaacattctcttctcctccacgttctcctcctgaaatacttgtcccaggttctaacaatccatctcaaaacaaccctactcttagacctcctcttgatgctccaaattctactaataatagtggaattggtactggtgctgttgttggtatcagtgtagcagtagcacttgtggtcttcactctttttggtatctttgtctggtgcttgaggaaacgagaaaaacgcctttcagctgttagtggtggcgatgttacaccatcaccaatgagctctaccgcaagatcagattcagcattttttaggatgcagtcatctgcacctgttggagcaagcaagcgttcgggcagttatcaatcacaatccggtggcttaggcaattcgaaagcattgttttcctatgaagaacttgtgaaggcaacaaatggtttttcacaagaaaatctattaggtgaaggtggatttggttgtgtatataaagggatattacctgatgggagagtagttgctgtgaaacaactaaagatcggtggaggacaaggtgacagggagtttaaagccgaagttgaaactcttagcagaattcatcaccgccatttggtttcaatcgtgggacattgtatctctggtgaccgtagattgcttatctatgattatgtttctaacaatgacctttacttccaccttcatggagaaaaatctgttctagactgggcaacacgtgttaaaattgcggctggggcagctcgtggactagcttatcttcatgaagattgtcatccgcgtatcattcacagggacatcaagtcgtctaacattcttttagaggacaactttgatgctcgggtttctgactttggccttgcaagattagctcttgattgtaacactcatatcaccacacgggtcatcggaacatttggctatatggctcctgaatatgcatcaagtggaaaattaacagagaaatcagatgtattctcctttggggttgttctgctggagttaatcactggacgtaaaccggtggatacatcgcaaccactgggagatgagagccttgttgaatgggcccggcctttgataagtcatgccatagaaaccgaggaatttgattctttagcagatcctaagcttggaggaaactatgtagaatctgaaatgtttagaatgattgaagcagcaggagcctgcgtgcggcatttagctaccaagagacctcggatgggacaaattgtgagagcttttgaaagtttagctgcggaagaccttactaacggaatgagactaggcgaaagcgaggtctttaactcagctcaacagtcagcagagatcagattgtttagaagaatggcatttggtagccaaaattacagtacagattttttctcgcatagtagttacaatagcagagacgcaaacgtgtaaatatcatacacagattgttctttttcttctctcgccattagtggcacaaaccattaagaaatatcctagttgtgtctcaaaaactcaccatctttcgcgactaaaaccagcacatcaaagctgagccttctcagagtgattgaaacaaaacagaggattacagaggagctagtggttgaacagaaagatgagaaaaagggatatagatgggtacaagagaggcttcgtttcttacatgaaattacttttgtatctattttttctattcttatacgttcaagtttgcacattatgtgacattacttatataataaatcaataaaaatcaatttgtctc

SEQ ID NO: 90579 - protein, 708 aa, Arabidopsis thaliana
  peptide (1)..(708): Ceres Seq. ID no. 12724376
MATTPVQPPVSNSPPVTSPPPPLNNATSPATPPPVTSPLPPSAPPPNRAPPPPPPVTTSPPPVANGAPPPPLPKPPESSSPPPQPVIPSPPPSTSPPPQPVIPSPPPSASPPPALVPPLPSSPPPPASVPPPRPSPSPPILVRSPPPSVRPIQSPPPPPSDRPTQSPPPPSPPSPPSERPTQSPPSPPSERPTQSPPPPSPPSPPSDRPSQSPPPPPEDTKPQPPRRSPNSPPPTFSSPPRSPPEILVPGSNNPSQNNPTLRPPLDAPNSTNNSGIGTGAVVGISVAVALVVFTLFGIFVWCLRKREKRLSAVSGGDVTPSPMSSTARSDSAFFRMQSSAPVGASKRSGSYQSQSGGLGNSKALFSYEELVKATNGFSQENLLGEGGFGCVYKGILPDGRVVAVKQLKIGGGQGDREFKAEVETLSRIHHRHLVSIVGHCISGDRRLLIYDYVSNNDLYFHLHGEKSVLDWATRVKIAAGAARGLAYLHEDCHPRIIHRDIKSSNILLEDNFDARVSDFGLARLALDCNTHITTRVIGTFGYMAPEYASSGKLTEKSDVFSFGVVLLELITGRKPVDTSQPLGDESLVEWARPLISHAIETEEFDSLADPKLGGNYVESEMFRMIEAAGACVRHLATKRPRMGQIVRAFESLAAEDLTNGMRLGESEVFNSAQQSAEIRLFRRMAFGSQNYSTDFFSHSSYNSRDANV

SEQ ID NO: 90580 - protein, 386 aa, Arabidopsis thaliana
  peptide (1)..(386): Ceres Seq. ID no. 12724377
MSSTARSDSAFFRMQSSAPVGASKRSGSYQSQSGGLGNSKALFSYEELVKATNGFSQENLLGEGGFGCVYKGILPDGRVVAVKQLKIGGGQGDREFKAEVETLSRIHHRHLVSIVGHCISGDRRLLIYDYVSNNDLYFHLHGEKSVLDWATRVKIAAGAARGLAYLHEDCHPRIIHRDIKSSNILLEDNFDARVSDFGLARLALDCNTHITTRVIGTFGYMAPEYASSGKLTEKSDVFSFGVVLLELITGRKPVDTSQPLGDESLVEWARPLISHAIETEEFDSLADPKLGGNYVESEMFRMIEAAGACVRHLATKRPRMGQIVRAFESLAAEDLTNGMRLGESEVFNSAQQSAEIRLFRRMAFGSQNYSTDFFSHSSYNSRDANV

SEQ ID NO: 90581 - protein, 373 aa, Arabidopsis thaliana
  peptide (1)..(373): Ceres Seq. ID no. 12724378
MQSSAPVGASKRSGSYQSQSGGLGNSKALFSYEELVKATNGFSQENLLGEGGFGCVYKGILPDGRVVAVKQLKIGGGQGDREFKAEVETLSRIHHRHLVSIVGHCISGDRRLLIYDYVSNNDLYFHLHGEKSVLDWATRVKIAAGAARGLAYLHEDCHPRIIHRDIKSSNILLEDNFDARVSDFGLARLALDCNTHITTRVIGTFGYMAPEYASSGKLTEKSDVFSFGVVLLELITGRKPVDTSQPLGDESLVEWARPLISHAIETEEFDSLADPKLGGNYVESEMFRMIEAAGACVRHLATKRPRMGQIVRAFESLAAEDLTNGMRLGESEVFNSAQQSAEIRLFRRMAFGSQNYSTDFFSHSSYNSRDANV

SEQ ID NO: 90582 - DNA, 1709 bp, Arabidopsis thaliana
  misc_feature (1)..(1709): Ceres Seq. ID no. 12724407
  misc_feature (1)..(1709): Ortholog of  Ceres SEQ ID NO 15178169 as cited in SEQ ID NO 58511
ctcttgaaattttccgcgaaaaatctcaacttttccatctgaaaaccccccaaaatcaaacaattggatcttgatttttagctgtgatttagtgattaagaggcttagggtttgtggcgaaatgttggtacagagaagagtaatgagttggagaagagtctggaagtcgtttcaagcggcttctgcgcattgtttactcttctccttcacgcttcttctcgctttgaagcttgatcatgttgtttctcattcatggtggtttgtatttgcacccttgtggttgtttcatgctgtgattgctcgtggtagattttcattgcctgctccatcaatgcctcatgatcgacattgggctccttttcactcggttatggcaacaccacttcttgttgcttttgagatccttctctgtgtacatcttgaagataaatatgttgttgacttaaagattgtctttctaccgttgcttgcatttgaggtagcaattttgatagataatgtcagaatgtgcaggacgctcatgcctggagatgaagaaactatgagtgatgaagccatatgggaaacacttcctcatttctgggtttccatatctatggttttcttcattgccgcaacaaccttcactcttcttaaattatgtggtgacgtagctgcgttgggatggtgggacttatttataaacttcggaatagcagagtgctttgcgtttcttgtctgtacaaagtggagcaatcagtcaattcataggtattcacatataccggaacctagctcatcttcaatggtagtaagatatctggattggaacagaggtctagtagtaaccgctgacgacgagcatcagcaaagcaacagaatatgtggtctccaagatattggtggacatgttatgaaaattccatttgtgacctttcaaatcatccttttcatgcgcttagagggaacgccagcttctgccaaaaacattccgattttagttctgtttgtacctctttttctgttacaaggagctggggtactttttgctatgtatagattggttgagaaatcagtcttattaataaatagtggtagtggttcttatggaagatattttaccgcaacatcatcagctcgtgaattcctgggattctttcaacatggtgcaagattacttggctggtggtctatcgatgaaggaagtcgggaagaacaagcaaggctctactctggagaagctactggatacaacaccttctcaccagaggttgtgaagaaaatgccaaagtctgatcttgttgaagagatatggagacttcaagctgcattgagtgagcaaacagatatcaccagttatagccagcaagagtacgaaaggcttcaaaacgagaagattctttgtagagtttgctttgaagatccgatcaacgtggttctactcccatgtagacatcacgtcctctgcagtacatgctgcgagaaatgcaagaaatgtccgatttgtcgtgtcctgatcgaggagcgtatgcctgtatacgatgtgtagatttcagagctccaatccagaaatgaagaatacatttcttgcttgtttggttttgttttagtaatgaagcaagcactatatatatatatgttacaacttgcataggaaaaattctgattcgttttcgagtggatgtaaataatactgtaaaccatcgtatatgtcatgaatcttctttctc

SEQ ID NO: 90583 - protein, 468 aa, Arabidopsis thaliana
  peptide (1)..(468): Ceres Seq. ID no. 12724408
MLVQRRVMSWRRVWKSFQAASAHCLLFSFTLLLALKLDHVVSHSWWFVFAPLWLFHAVIARGRFSLPAPSMPHDRHWAPFHSVMATPLLVAFEILLCVHLEDKYVVDLKIVFLPLLAFEVAILIDNVRMCRTLMPGDEETMSDEAIWETLPHFWVSISMVFFIAATTFTLLKLCGDVAALGWWDLFINFGIAECFAFLVCTKWSNQSIHRYSHIPEPSSSSMVVRYLDWNRGLVVTADDEHQQSNRICGLQDIGGHVMKIPFVTFQIILFMRLEGTPASAKNIPILVLFVPLFLLQGAGVLFAMYRLVEKSVLLINSGSGSYGRYFTATSSAREFLGFFQHGARLLGWWSIDEGSREEQARLYSGEATGYNTFSPEVVKKMPKSDLVEEIWRLQAALSEQTDITSYSQQEYERLQNEKILCRVCFEDPINVVLLPCRHHVLCSTCCEKCKKCPICRVLIEERMPVYDV

SEQ ID NO: 90584 - protein, 461 aa, Arabidopsis thaliana
  peptide (1)..(461): Ceres Seq. ID no. 12724409
MSWRRVWKSFQAASAHCLLFSFTLLLALKLDHVVSHSWWFVFAPLWLFHAVIARGRFSLPAPSMPHDRHWAPFHSVMATPLLVAFEILLCVHLEDKYVVDLKIVFLPLLAFEVAILIDNVRMCRTLMPGDEETMSDEAIWETLPHFWVSISMVFFIAATTFTLLKLCGDVAALGWWDLFINFGIAECFAFLVCTKWSNQSIHRYSHIPEPSSSSMVVRYLDWNRGLVVTADDEHQQSNRICGLQDIGGHVMKIPFVTFQIILFMRLEGTPASAKNIPILVLFVPLFLLQGAGVLFAMYRLVEKSVLLINSGSGSYGRYFTATSSAREFLGFFQHGARLLGWWSIDEGSREEQARLYSGEATGYNTFSPEVVKKMPKSDLVEEIWRLQAALSEQTDITSYSQQEYERLQNEKILCRVCFEDPINVVLLPCRHHVLCSTCCEKCKKCPICRVLIEERMPVYDV

SEQ ID NO: 90585 - protein, 398 aa, Arabidopsis thaliana
  peptide (1)..(398): Ceres Seq. ID no. 12724410
MPHDRHWAPFHSVMATPLLVAFEILLCVHLEDKYVVDLKIVFLPLLAFEVAILIDNVRMCRTLMPGDEETMSDEAIWETLPHFWVSISMVFFIAATTFTLLKLCGDVAALGWWDLFINFGIAECFAFLVCTKWSNQSIHRYSHIPEPSSSSMVVRYLDWNRGLVVTADDEHQQSNRICGLQDIGGHVMKIPFVTFQIILFMRLEGTPASAKNIPILVLFVPLFLLQGAGVLFAMYRLVEKSVLLINSGSGSYGRYFTATSSAREFLGFFQHGARLLGWWSIDEGSREEQARLYSGEATGYNTFSPEVVKKMPKSDLVEEIWRLQAALSEQTDITSYSQQEYERLQNEKILCRVCFEDPINVVLLPCRHHVLCSTCCEKCKKCPICRVLIEERMPVYDV

SEQ ID NO: 90586 - DNA, 1241 bp, Arabidopsis thaliana
  misc_feature (1)..(1241): Ceres Seq. ID no. 12724415
  misc_feature (1)..(1241): Ortholog of  Ceres SEQ ID NO 13596474 as cited in SEQ ID NO 62169
  misc_feature (1)..(1241): Ortholog of  Ceres SEQ ID NO 13598714 as cited in SEQ ID NO 62656
  misc_feature (1)..(1241): Ortholog of  Ceres SEQ ID NO 13596969 as cited in SEQ ID NO 63375
  misc_feature (1)..(1241): Ortholog of  Ceres SEQ ID NO 13597519 as cited in SEQ ID NO 64759
  misc_feature (1)..(1241): Ortholog of  Ceres SEQ ID NO 13587054 as cited in SEQ ID NO 0
cacatattttcccaaaatttggatcaaaaagttttccgatagaagaaattaaatatgatgagactcctctttgtattcttcatggttcacaccatctttatcccatgcttttcctttgatacaccggggaaggatcttcctttaaccctagattattacaagtctacttgtccaaccgtatttgacgtcatcaagaaagaaatggaatgcatagtgaaggaagatcctagaaatgcagccataattattcgtcttcacttccacgactgctttgtccaaggatgtgatggatcggtgttgctagacgagacagaaactctacagggagagaagaaagcttctcccaacataaattcattgaaaggatacaaaattgtcgacagaatcaagaacataatcgaatccgaatgtcctggagttgtttcatgcgctgatcttctcacaattggtgctagagatgctacaatcctggtgggtgggccttactgggatgttcctgtgggaagaaaagattcaaaaaccgcaagctacgagcttgccacaacaaaccttccaactccagaagagggtttaatcagcatcattgctaagttctattctcaaggtctctcggttgaagacatggtcgctcttataggagcgcacacgatcggaaaagcacaatgtcgcaacttccgatcccgaatttatggagattttcaagtgacgtcagccctaaatccagtttcggagacgtacttggcaagtcttcgagagatttgtccggcgagtagcggagaaggtgatagtaacgtgacggcgatagacaatgtgacgccgaatctcttcgataactcgatctaccacacactgctaagaggagaagggttactgaattcggaccaggagatgtacacgagcttgttcgggatacaaacgcggcgaatcgtgagcaagtatgcggaggatccagtggctttcttcgagcaattctcgaagtcgatggtaaagatggggaacattttgaactctgaaagcttggctgatggagaagttagaagaaattgcagatttgtgaatacatgattcatcaacaacgaaactaaaaaatggagaaaataatctatttctgatctttatttatataagaaagaaaaaatttaatttgatgttattctttcccttatttatttctacatttttaaaactatagggttcttgaatgtttaaaaccttattctaatgattttcaattgatctgg

SEQ ID NO: 90587 - protein, 336 aa, Arabidopsis thaliana
  peptide (1)..(336): Ceres Seq. ID no. 12724416
MMRLLFVFFMVHTIFIPCFSFDTPGKDLPLTLDYYKSTCPTVFDVIKKEMECIVKEDPRNAAIIIRLHFHDCFVQGCDGSVLLDETETLQGEKKASPNINSLKGYKIVDRIKNIIESECPGVVSCADLLTIGARDATILVGGPYWDVPVGRKDSKTASYELATTNLPTPEEGLISIIAKFYSQGLSVEDMVALIGAHTIGKAQCRNFRSRIYGDFQVTSALNPVSETYLASLREICPASSGEGDSNVTAIDNVTPNLFDNSIYHTLLRGEGLLNSDQEMYTSLFGIQTRRIVSKYAEDPVAFFEQFSKSMVKMGNILNSESLADGEVRRNCRFVNT

SEQ ID NO: 90588 - protein, 335 aa, Arabidopsis thaliana
  peptide (1)..(335): Ceres Seq. ID no. 12724417
MRLLFVFFMVHTIFIPCFSFDTPGKDLPLTLDYYKSTCPTVFDVIKKEMECIVKEDPRNAAIIIRLHFHDCFVQGCDGSVLLDETETLQGEKKASPNINSLKGYKIVDRIKNIIESECPGVVSCADLLTIGARDATILVGGPYWDVPVGRKDSKTASYELATTNLPTPEEGLISIIAKFYSQGLSVEDMVALIGAHTIGKAQCRNFRSRIYGDFQVTSALNPVSETYLASLREICPASSGEGDSNVTAIDNVTPNLFDNSIYHTLLRGEGLLNSDQEMYTSLFGIQTRRIVSKYAEDPVAFFEQFSKSMVKMGNILNSESLADGEVRRNCRFVNT

SEQ ID NO: 90589 - protein, 327 aa, Arabidopsis thaliana
  peptide (1)..(327): Ceres Seq. ID no. 12724418
MVHTIFIPCFSFDTPGKDLPLTLDYYKSTCPTVFDVIKKEMECIVKEDPRNAAIIIRLHFHDCFVQGCDGSVLLDETETLQGEKKASPNINSLKGYKIVDRIKNIIESECPGVVSCADLLTIGARDATILVGGPYWDVPVGRKDSKTASYELATTNLPTPEEGLISIIAKFYSQGLSVEDMVALIGAHTIGKAQCRNFRSRIYGDFQVTSALNPVSETYLASLREICPASSGEGDSNVTAIDNVTPNLFDNSIYHTLLRGEGLLNSDQEMYTSLFGIQTRRIVSKYAEDPVAFFEQFSKSMVKMGNILNSESLADGEVRRNCRFVNT

SEQ ID NO: 90590 - DNA, 2232 bp, Arabidopsis thaliana
  misc_feature (1)..(2232): Ceres Seq. ID no. 12724430
  misc_feature (1)..(2232): Ortholog of  Ceres SEQ ID NO 12586556 as cited in SEQ ID NO 64667
  misc_feature (1)..(2232): Ortholog of  Ceres SEQ ID NO 13660894 as cited in SEQ ID NO 67475
atggcgtcgaactactactctgttcagataaagcaatgcattgggttgggagctagaaatcagagtcgttatgtgaagatgatccacgggaatatcatcagagctcttccatatccagagacgtttttgtataacaacatcgtccacgcgtatgcgttaatgaaaagctccacttatgcacgccgagtgttcgacagaattccccaaccaaaccttttctcctggaacaatcttctcttagcttattcaaaagctgggcttatctcagagatggaaagtacctttgagaagcttcctgatagagatggtgtcacttggaacgtgcttattgaaggctattcattgagtggattggttggtgcagctgttaaggcttataatacgatgatgagagatttttctgctaatttgactagggttacgttgatgacaatgttgaaactttcttctagcaatggccatgttagtttggggaagcagattcatgggcaggttatcaaacttgggtttgagtcttatcttttagttgggagtccattgttgtatatgtatgcaaatgttggttgcatctctgatgcaaagaaggttttttacgggttggacgatagaaatacggttatgtacaattcgttgatgggtggacttctagcatgtggaatgattgaagatgcactgcagttgtttcgaggaatggagaaagattcagtttcttgggcagcgatgattaaaggacttgctcaaaacggacttgcaaaggaggctattgaatgtttcagagagatgaaagtacaaggcttgaagatggatcagtatccttttggaagtgtactgcctgcttgtggaggattaggagcaataaacgaagggaaacagattcatgcttgtataatcaggaccaattttcaggatcacatttatgtaggtagtgctctcattgacatgtattgcaagtgtaagtgtttacattatgcaaagactgtttttgatagaatgaagcagaagaatgttgtgtcttggacagcaatggttgtgggttatggccagaccgggcgtgctgaagaggctgttaagattttccttgatatgcaaagaagtggaattgacccagatcattatactctgggacaagcgatcagtgcttgtgccaacgtaagtagcttagaagagggctcccagtttcatggaaaagctataacttctggcctaatacattatgtcactgtttcaaattcattggtgactctgtatggaaaatgtggagatattgatgattcgactaggttgttcaacgagatgaatgtcagggatgcagtctcttggactgcaatggtttctgcgtatgcgcaatttggaagggccgtcgagactattcagttgtttgacaaaatggtacaacatggtctaaaacctgatggagtgactttgaccggtgttatttcagcttgcagtagggcaggattagtggagaaaggacaaagatattttaagttaatgacaagtgaatatggaatagtgccaagtattggtcattattcttgcatgatcgatctcttcagtcgatctggaaggttagaggaagccatgcgttttataaatgggatgccttttcctccagatgcaattggttggactactttactcagcgcatgtagaaataaaggtaacttggaaataggtaaatgggcggctgaatcactcatagaattagatcctcatcatcccgctggttatacgctattatcaagcatatacgcttcaaaagggaaatgggatagtgtggcccagttaagacggggaatgagagagaagaacgtgaagaaagaacccggacagagttggatcaaatggaaaggaaaattgcacagtttctcagctgatgacgagtcaagtccatatttagatcagatatatgctaagcttgaggaattgaacaataaaatcatagataatggttataaaccagataccagttttgtccatcatgatgtcgaggaagctgttaaggtaaagatgcttaactatcacagtgaaaggcttgcaatagcttttggattgatatttgtaccctcagggcaacctattagagtaggaaaaaatcttagagtgtgtgtggattgccacaatgccactaaacatatctccagcgtcactggtagagagatacttgtcagagatgctgttaggtttcaccgttttaaagatggaacttgctcatgtggagatttctggtag

SEQ ID NO: 90591 - protein, 743 aa, Arabidopsis thaliana
  peptide (1)..(743): Ceres Seq. ID no. 12724431
MASNYYSVQIKQCIGLGARNQSRYVKMIHGNIIRALPYPETFLYNNIVHAYALMKSSTYARRVFDRIPQPNLFSWNNLLLAYSKAGLISEMESTFEKLPDRDGVTWNVLIEGYSLSGLVGAAVKAYNTMMRDFSANLTRVTLMTMLKLSSSNGHVSLGKQIHGQVIKLGFESYLLVGSPLLYMYANVGCISDAKKVFYGLDDRNTVMYNSLMGGLLACGMIEDALQLFRGMEKDSVSWAAMIKGLAQNGLAKEAIECFREMKVQGLKMDQYPFGSVLPACGGLGAINEGKQIHACIIRTNFQDHIYVGSALIDMYCKCKCLHYAKTVFDRMKQKNVVSWTAMVVGYGQTGRAEEAVKIFLDMQRSGIDPDHYTLGQAISACANVSSLEEGSQFHGKAITSGLIHYVTVSNSLVTLYGKCGDIDDSTRLFNEMNVRDAVSWTAMVSAYAQFGRAVETIQLFDKMVQHGLKPDGVTLTGVISACSRAGLVEKGQRYFKLMTSEYGIVPSIGHYSCMIDLFSRSGRLEEAMRFINGMPFPPDAIGWTTLLSACRNKGNLEIGKWAAESLIELDPHHPAGYTLLSSIYASKGKWDSVAQLRRGMREKNVKKEPGQSWIKWKGKLHSFSADDESSPYLDQIYAKLEELNNKIIDNGYKPDTSFVHHDVEEAVKVKMLNYHSERLAIAFGLIFVPSGQPIRVGKNLRVCVDCHNATKHISSVTGREILVRDAVRFHRFKDGTCSCGDFW

SEQ ID NO: 90592 - protein, 717 aa, Arabidopsis thaliana
  peptide (1)..(717): Ceres Seq. ID no. 12724432
MIHGNIIRALPYPETFLYNNIVHAYALMKSSTYARRVFDRIPQPNLFSWNNLLLAYSKAGLISEMESTFEKLPDRDGVTWNVLIEGYSLSGLVGAAVKAYNTMMRDFSANLTRVTLMTMLKLSSSNGHVSLGKQIHGQVIKLGFESYLLVGSPLLYMYANVGCISDAKKVFYGLDDRNTVMYNSLMGGLLACGMIEDALQLFRGMEKDSVSWAAMIKGLAQNGLAKEAIECFREMKVQGLKMDQYPFGSVLPACGGLGAINEGKQIHACIIRTNFQDHIYVGSALIDMYCKCKCLHYAKTVFDRMKQKNVVSWTAMVVGYGQTGRAEEAVKIFLDMQRSGIDPDHYTLGQAISACANVSSLEEGSQFHGKAITSGLIHYVTVSNSLVTLYGKCGDIDDSTRLFNEMNVRDAVSWTAMVSAYAQFGRAVETIQLFDKMVQHGLKPDGVTLTGVISACSRAGLVEKGQRYFKLMTSEYGIVPSIGHYSCMIDLFSRSGRLEEAMRFINGMPFPPDAIGWTTLLSACRNKGNLEIGKWAAESLIELDPHHPAGYTLLSSIYASKGKWDSVAQLRRGMREKNVKKEPGQSWIKWKGKLHSFSADDESSPYLDQIYAKLEELNNKIIDNGYKPDTSFVHHDVEEAVKVKMLNYHSERLAIAFGLIFVPSGQPIRVGKNLRVCVDCHNATKHISSVTGREILVRDAVRFHRFKDGTCSCGDFW

SEQ ID NO: 90593 - protein, 690 aa, Arabidopsis thaliana
  peptide (1)..(690): Ceres Seq. ID no. 12724433
MKSSTYARRVFDRIPQPNLFSWNNLLLAYSKAGLISEMESTFEKLPDRDGVTWNVLIEGYSLSGLVGAAVKAYNTMMRDFSANLTRVTLMTMLKLSSSNGHVSLGKQIHGQVIKLGFESYLLVGSPLLYMYANVGCISDAKKVFYGLDDRNTVMYNSLMGGLLACGMIEDALQLFRGMEKDSVSWAAMIKGLAQNGLAKEAIECFREMKVQGLKMDQYPFGSVLPACGGLGAINEGKQIHACIIRTNFQDHIYVGSALIDMYCKCKCLHYAKTVFDRMKQKNVVSWTAMVVGYGQTGRAEEAVKIFLDMQRSGIDPDHYTLGQAISACANVSSLEEGSQFHGKAITSGLIHYVTVSNSLVTLYGKCGDIDDSTRLFNEMNVRDAVSWTAMVSAYAQFGRAVETIQLFDKMVQHGLKPDGVTLTGVISACSRAGLVEKGQRYFKLMTSEYGIVPSIGHYSCMIDLFSRSGRLEEAMRFINGMPFPPDAIGWTTLLSACRNKGNLEIGKWAAESLIELDPHHPAGYTLLSSIYASKGKWDSVAQLRRGMREKNVKKEPGQSWIKWKGKLHSFSADDESSPYLDQIYAKLEELNNKIIDNGYKPDTSFVHHDVEEAVKVKMLNYHSERLAIAFGLIFVPSGQPIRVGKNLRVCVDCHNATKHISSVTGREILVRDAVRFHRFKDGTCSCGDFW

SEQ ID NO: 90594 - DNA, 1845 bp, Arabidopsis thaliana
  misc_feature (1)..(1845): Ceres Seq. ID no. 12724478
  misc_feature (1)..(1845): Ortholog of  Ceres SEQ ID NO 13585382 as cited in SEQ ID NO 63889
atggcgtctctctccttcacccaattcttatcattccccagatgcaatgcagatgttccttgtctgctccagtcgcatggttttgtgaagtttagaggtgaaagatggaatgggaaacaaagcttttctatggctgctggtaggagaaagttatcagagtcagcacctcttgaagaagaaggtaatgatggaaacggtgcggttgtgggaaagaaaccatctaaaagtgttaagagaacaacgaagaagaaggttgtggttaaggatgaaccattagaagaaatttctgaatttttggttgataatgatgatgttttagacaaggaaagcattgtctcagctttgaaaccaaaaaagacaagaactagaaagaaagctgcagcagcttcttctgatgtggaggaagtaaaaaccgagaagaaagtgagacgaaagaggactgttaagaaagataaagatgtggaggatgatttagctactattatggatgctgaggttagtgatgtcgaggaagcattggctgttgaaagcactgatacagagagtgaagaagaagagattgatctgagtaaacatgaaggtgaagatattagtcacacttatggatggcctcctctcgtgtgttgctttggatctgcacaacatgcttttgtgccttcgggaaggccagcaaacaggctattagattatgaactacacgaacggatgagagatgcaaagtgggctccagagaagtatatccgggctcctggaggatgtgcaggaggtgttgctattgctcttgcaagcttgggtggtaaggttgcttttatgggcaaacttggggctgatgactatggtcaagccatgttgtattatctgaatgtgtgcaaagtccaaactagatcagttaagattgatggtaaaagggttacggcgtgttctactatgaagatcagcaagagaggtcgcttgaaatcgacttgtattaagccatgtgcagaggattcactttcaaaatctgaaatcaacgttgatgtgctcaaagaggcgaaaatgttctacttcagcacgcattctctactcgataagaagatgatgtcaactacgatacaagccatcaagatatcaaagcaactaggcaatgtcattttttatgacttgaatctccctttaccactatggcactccagcgaagaaaccaagtctttcatacaggaagtgtggaatcttgcagacgtcattgaaatcacaaaacaggaacttgaattcttatgcggaatcgagcctactgaagagttcgatacagaaaacaatgacatcagtaagtttgtccattacccgccagaaactgtggaacagctttggcatgaaaatctcaaggtcttgtttgtgaccaatggcacttctaagatccattactataccaaagagcacaatggtgctgtttccggaatggaggatgttcccattactccttttacaagggatatgtcagcatctggagatggcatcgttgcaggtctaataagaatgcttacggttcagccagatcttatgaacaataaagggtacctggaacgcacagcgagatatgcaattgagtgtggtattattgatcaatggttgctggcacaaacccgaggatatcctccaaaggatgacatggaagaagaagaagatgatgaagaagaagatgaagtggaatcagatccaaacggtataagatcgataacagagaaggaatacagaacctcaaagccttatgatgaaccagatggtccatacgttatgaaaccagtagaggaaagggagtacaagaagttagagcttgttggctcaatgtttgaagatggtagtttatga

SEQ ID NO: 90595 - protein, 614 aa, Arabidopsis thaliana
  peptide (1)..(614): Ceres Seq. ID no. 12724479
MASLSFTQFLSFPRCNADVPCLLQSHGFVKFRGERWNGKQSFSMAAGRRKLSESAPLEEEGNDGNGAVVGKKPSKSVKRTTKKKVVVKDEPLEEISEFLVDNDDVLDKESIVSALKPKKTRTRKKAAAASSDVEEVKTEKKVRRKRTVKKDKDVEDDLATIMDAEVSDVEEALAVESTDTESEEEEIDLSKHEGEDISHTYGWPPLVCCFGSAQHAFVPSGRPANRLLDYELHERMRDAKWAPEKYIRAPGGCAGGVAIALASLGGKVAFMGKLGADDYGQAMLYYLNVCKVQTRSVKIDGKRVTACSTMKISKRGRLKSTCIKPCAEDSLSKSEINVDVLKEAKMFYFSTHSLLDKKMMSTTIQAIKISKQLGNVIFYDLNLPLPLWHSSEETKSFIQEVWNLADVIEITKQELEFLCGIEPTEEFDTENNDISKFVHYPPETVEQLWHENLKVLFVTNGTSKIHYYTKEHNGAVSGMEDVPITPFTRDMSASGDGIVAGLIRMLTVQPDLMNNKGYLERTARYAIECGIIDQWLLAQTRGYPPKDDMEEEEDDEEEDEVESDPNGIRSITEKEYRTSKPYDEPDGPYVMKPVEEREYKKLELVGSMFEDGSL

SEQ ID NO: 90596 - protein, 571 aa, Arabidopsis thaliana
  peptide (1)..(571): Ceres Seq. ID no. 12724480
MAAGRRKLSESAPLEEEGNDGNGAVVGKKPSKSVKRTTKKKVVVKDEPLEEISEFLVDNDDVLDKESIVSALKPKKTRTRKKAAAASSDVEEVKTEKKVRRKRTVKKDKDVEDDLATIMDAEVSDVEEALAVESTDTESEEEEIDLSKHEGEDISHTYGWPPLVCCFGSAQHAFVPSGRPANRLLDYELHERMRDAKWAPEKYIRAPGGCAGGVAIALASLGGKVAFMGKLGADDYGQAMLYYLNVCKVQTRSVKIDGKRVTACSTMKISKRGRLKSTCIKPCAEDSLSKSEINVDVLKEAKMFYFSTHSLLDKKMMSTTIQAIKISKQLGNVIFYDLNLPLPLWHSSEETKSFIQEVWNLADVIEITKQELEFLCGIEPTEEFDTENNDISKFVHYPPETVEQLWHENLKVLFVTNGTSKIHYYTKEHNGAVSGMEDVPITPFTRDMSASGDGIVAGLIRMLTVQPDLMNNKGYLERTARYAIECGIIDQWLLAQTRGYPPKDDMEEEEDDEEEDEVESDPNGIRSITEKEYRTSKPYDEPDGPYVMKPVEEREYKKLELVGSMFEDGSL

SEQ ID NO: 90597 - protein, 453 aa, Arabidopsis thaliana
  peptide (1)..(453): Ceres Seq. ID no. 12724481
MDAEVSDVEEALAVESTDTESEEEEIDLSKHEGEDISHTYGWPPLVCCFGSAQHAFVPSGRPANRLLDYELHERMRDAKWAPEKYIRAPGGCAGGVAIALASLGGKVAFMGKLGADDYGQAMLYYLNVCKVQTRSVKIDGKRVTACSTMKISKRGRLKSTCIKPCAEDSLSKSEINVDVLKEAKMFYFSTHSLLDKKMMSTTIQAIKISKQLGNVIFYDLNLPLPLWHSSEETKSFIQEVWNLADVIEITKQELEFLCGIEPTEEFDTENNDISKFVHYPPETVEQLWHENLKVLFVTNGTSKIHYYTKEHNGAVSGMEDVPITPFTRDMSASGDGIVAGLIRMLTVQPDLMNNKGYLERTARYAIECGIIDQWLLAQTRGYPPKDDMEEEEDDEEEDEVESDPNGIRSITEKEYRTSKPYDEPDGPYVMKPVEEREYKKLELVGSMFEDGSL

SEQ ID NO: 90598 - DNA, 1371 bp, Arabidopsis thaliana
  misc_feature (1)..(1371): Ceres Seq. ID no. 12724488
  misc_feature (1)..(1371): Ortholog of  Ceres SEQ ID NO 13599613 as cited in SEQ ID NO 0
atgggaaactctttaagatgcatatcacaagaacaagatccaaaccagaagaaacctagctccgtcgtcaacggtaatagctccgagaaacacgttcggaggctgtctttgataccatctttccgacgccggacattactaccatctctctcttgctccggatcctcaacttcgtctacgtccaagaaaggagggatcaagacaaaaaagaagataagagaaagacaccaccaagagcaacatcatcatgatcatgagaaagactctcttattcaagaccaaacattagctgccactaatattctctttagtcaaacgcctcgtaacagcaactctgctcctcctttccgacgctccacctccgtcgtttacactcagccacctaccgccgctgtagccgcctccgtaggttctgtttccggcgccttgactcctaagaaatccacttatggatacgttagaagttctagcaataggcagagatcaagcactgatcctgttcttaaacccaatcagcttctagacaaggcaagcaaatttaatttgcctatctcccacaataatgagctaaaggtcgaaggtgcggagacaaagcggttcgtgctggttcatggaggagggtttggtgcatggtgttggtacaaaaccataacgctcttagagaaacatggtttccaagtagacgccgttgacttgaccggttccggtgtcagctcttttgacacaaacaacatcactagcctcgctcaatacgtcaaaccactcctccatttctttgacacccttaaacccaccgagaaggtgatattagtggggcatgattttggaggagcttgtatgtcttatgccatggagatgtacccttctaagatcgctaaggctattttcatatctgctgctatgttggctaatgcccaaagcactctcgatctctttaaccaacagcctgactcaaattatgatctgatggaacaagtccatctatttctgtacgccaacggcaaaaagaaccctccaacagccgttgatttcgacagatcattgcttagagattttttctttaatcagagccctccaaaggacgttgcattagcgtcggtatcgatgagaccaatcccgttcgcaccagtggtcgaaaagctccacgtgtcggagaaaaattacggttcaatccgacggttctacatcaaaaccatggaggatgattacgctgtaccggtttctctccaagatgcaatgatcaaatcaaaccctccagaacaagtttttcatctcaaaggctctgaccatgcacctttcttctctcgtcctcagtctttgaaccggatactcgttgagatttctcaattacctcccaagaaatcttcttga

SEQ ID NO: 90599 - protein, 456 aa, Arabidopsis thaliana
  peptide (1)..(456): Ceres Seq. ID no. 12724489
MGNSLRCISQEQDPNQKKPSSVVNGNSSEKHVRRLSLIPSFRRRTLLPSLSCSGSSTSSTSKKGGIKTKKKIRERHHQEQHHHDHEKDSLIQDQTLAATNILFSQTPRNSNSAPPFRRSTSVVYTQPPTAAVAASVGSVSGALTPKKSTYGYVRSSSNRQRSSTDPVLKPNQLLDKASKFNLPISHNNELKVEGAETKRFVLVHGGGFGAWCWYKTITLLEKHGFQVDAVDLTGSGVSSFDTNNITSLAQYVKPLLHFFDTLKPTEKVILVGHDFGGACMSYAMEMYPSKIAKAIFISAAMLANAQSTLDLFNQQPDSNYDLMEQVHLFLYANGKKNPPTAVDFDRSLLRDFFFNQSPPKDVALASVSMRPIPFAPVVEKLHVSEKNYGSIRRFYIKTMEDDYAVPVSLQDAMIKSNPPEQVFHLKGSDHAPFFSRPQSLNRILVEISQLPPKKSS

SEQ ID NO: 90600 - DNA, 2364 bp, Arabidopsis thaliana
  misc_feature (1)..(2364): Ceres Seq. ID no. 12724494
  misc_feature (1)..(2364): Ortholog of  Ceres SEQ ID NO 12586556 as cited in SEQ ID NO 64667
  misc_feature (1)..(2364): Ortholog of  Ceres SEQ ID NO 13660894 as cited in SEQ ID NO 67475
atgacgcagtacatgccattgtttagatcatgctcgagcttacgattagtaagtcagcttcatgctcacctacttgtcaccggtcgtctccgtcgtgaccctcttccagtgacgaagctcattgaatcatacgctttcatgggttctccagattcgtctaggctcgtctttgaagcttttccttaccctgattccttcatgtacggtgttctcatcaaatgcaacgtctggtgtcatttactcgacgccgccattgatctgtaccataggttggtttcggagacgacccaaatcagtaagtttgtgtttccgtctgttttgagggcttgtgcgggttcgagggagcatctgagtgttggtgggaaagtccatgggagaattatcaagggcggtgtagacgacgacgctgtgatagagacgtctctgttgtgtatgtatggtcaaactgggaatttaagtgatgcagagaaggtgttcgatggaatgcctgtgagagaccttgtggcttggagtactcttgtttctagctgtctcgagaatggtgaggtggtgaaagcattgaggatgtttaagtgtatggtggatgatggtgttgagcccgatgctgtgacgatgatcagcgttgtagaaggatgtgctgagcttggatgtttgaggatcgctagatcagttcatggccagataacgaggaaaatgtttgatttagatgaaacattatgcaattctctgcttacaatgtacagtaagtgtggggatttgcttagctcggagagaatctttgagaagatcgccaagaagaatgctgtttcgtggacagccatgatttctagttacaaccgtggcgagttctctgaaaaggcattgagaagtttcagtgagatgataaagtctggaattgagcctaatttggttaccctttatagtgttttgagctcttgtggtttgatagggttgattagagaaggtaagtcggtccatggttttgcagttagacgagagctggatccgaattacgagtcgctttctctggccttagttgagctgtacgctgaatgcgggaaactaagcgactgtgagacagttttacgtgtggttagtgatagaaatattgtcgcatggaactctcttatatctctatatgcacacagaggtatggtgattcaagcattgggcttgtttagacagatggtgacacagagaataaaaccagacgcattcactttggccagctcaatctcagcatgcgagaatgctggtttagttccgctagggaaacagattcacggacatgttataaggacagatgtttcagatgagtttgtgcagaactcgttgatagacatgtactctaaaagcggatctgtggattcagcaagcacagtgtttaatcaaatcaagcataggagcgttgtgacatggaactcaatgctctgcgggttttctcagaatggtaactctgtagaggcaattagcctcttcgactatatgtatcatagctatctcgagatgaatgaagttacatttttggcggttattcaagcatgctcaagcataggttcactggagaaagggaaatgggttcaccacaagctcattatttccggtttaaaggatcttttcactgatacagctctaatcgacatgtatgccaaatgtggagatctcaacgcagctgaaacagtcttcagggccatgtcgagtagaagcattgtgtcatggagtagtatgatcaatgcctatggaatgcacggacggataggatccgccatatctacattcaatcaaatggtggaatccggaacgaaacctaacgaagttgtcttcatgaacgttctctctgcttgtggtcactctggttccgttgaagaaggtaagtactactttaacttgatgaaaagttttggcgtatcaccaaactcagagcatttcgcctgtttcatcgaccttttgagccgttctggtgatctcaaagaagcatatagaaccatcaaggagatgccttttctagctgatgcttcagtttggggttctctggtcaatggatgcagaatccatcagaaaatggatatcatcaaagccattaaaaacgatctttcggatattgttacagatgatacgggatactacactctcttgtccaatatatatgctgaagaaggggaatgggaagaattcaggagactgagatcagctatgaagagttcgaatcttaagaaagttcctgggtacagcgcgattgagattgatcaaaaagttttcagatttggagctggtgaagaaaatcgtatccaaacagatgaaatctataggtttcttggaaatttgcagaatctaacgaatgaagaacatgtcgtagattcttag

SEQ ID NO: 90601 - protein, 787 aa, Arabidopsis thaliana
  peptide (1)..(787): Ceres Seq. ID no. 12724495
MTQYMPLFRSCSSLRLVSQLHAHLLVTGRLRRDPLPVTKLIESYAFMGSPDSSRLVFEAFPYPDSFMYGVLIKCNVWCHLLDAAIDLYHRLVSETTQISKFVFPSVLRACAGSREHLSVGGKVHGRIIKGGVDDDAVIETSLLCMYGQTGNLSDAEKVFDGMPVRDLVAWSTLVSSCLENGEVVKALRMFKCMVDDGVEPDAVTMISVVEGCAELGCLRIARSVHGQITRKMFDLDETLCNSLLTMYSKCGDLLSSERIFEKIAKKNAVSWTAMISSYNRGEFSEKALRSFSEMIKSGIEPNLVTLYSVLSSCGLIGLIREGKSVHGFAVRRELDPNYESLSLALVELYAECGKLSDCETVLRVVSDRNIVAWNSLISLYAHRGMVIQALGLFRQMVTQRIKPDAFTLASSISACENAGLVPLGKQIHGHVIRTDVSDEFVQNSLIDMYSKSGSVDSASTVFNQIKHRSVVTWNSMLCGFSQNGNSVEAISLFDYMYHSYLEMNEVTFLAVIQACSSIGSLEKGKWVHHKLIISGLKDLFTDTALIDMYAKCGDLNAAETVFRAMSSRSIVSWSSMINAYGMHGRIGSAISTFNQMVESGTKPNEVVFMNVLSACGHSGSVEEGKYYFNLMKSFGVSPNSEHFACFIDLLSRSGDLKEAYRTIKEMPFLADASVWGSLVNGCRIHQKMDIIKAIKNDLSDIVTDDTGYYTLLSNIYAEEGEWEEFRRLRSAMKSSNLKKVPGYSAIEIDQKVFRFGAGEENRIQTDEIYRFLGNLQNLTNEEHVVDS

SEQ ID NO: 90602 - protein, 783 aa, Arabidopsis thaliana
  peptide (1)..(783): Ceres Seq. ID no. 12724496
MPLFRSCSSLRLVSQLHAHLLVTGRLRRDPLPVTKLIESYAFMGSPDSSRLVFEAFPYPDSFMYGVLIKCNVWCHLLDAAIDLYHRLVSETTQISKFVFPSVLRACAGSREHLSVGGKVHGRIIKGGVDDDAVIETSLLCMYGQTGNLSDAEKVFDGMPVRDLVAWSTLVSSCLENGEVVKALRMFKCMVDDGVEPDAVTMISVVEGCAELGCLRIARSVHGQITRKMFDLDETLCNSLLTMYSKCGDLLSSERIFEKIAKKNAVSWTAMISSYNRGEFSEKALRSFSEMIKSGIEPNLVTLYSVLSSCGLIGLIREGKSVHGFAVRRELDPNYESLSLALVELYAECGKLSDCETVLRVVSDRNIVAWNSLISLYAHRGMVIQALGLFRQMVTQRIKPDAFTLASSISACENAGLVPLGKQIHGHVIRTDVSDEFVQNSLIDMYSKSGSVDSASTVFNQIKHRSVVTWNSMLCGFSQNGNSVEAISLFDYMYHSYLEMNEVTFLAVIQACSSIGSLEKGKWVHHKLIISGLKDLFTDTALIDMYAKCGDLNAAETVFRAMSSRSIVSWSSMINAYGMHGRIGSAISTFNQMVESGTKPNEVVFMNVLSACGHSGSVEEGKYYFNLMKSFGVSPNSEHFACFIDLLSRSGDLKEAYRTIKEMPFLADASVWGSLVNGCRIHQKMDIIKAIKNDLSDIVTDDTGYYTLLSNIYAEEGEWEEFRRLRSAMKSSNLKKVPGYSAIEIDQKVFRFGAGEENRIQTDEIYRFLGNLQNLTNEEHVVDS

SEQ ID NO: 90603 - protein, 741 aa, Arabidopsis thaliana; identical to SEQ ID NO: 88898
  peptide (1)..(741): Ceres Seq. ID no. 12724497

SEQ ID NO: 90604 - DNA, 993 bp, Arabidopsis thaliana
  misc_feature (1)..(993): Ceres Seq. ID no. 12724534
  misc_feature (1)..(993): Ortholog of  Ceres SEQ ID NO 13647762 as cited in SEQ ID NO 20426
atggagatggtgcatgctgacgtggcgtctctctccataacaccttgcttcccgtcttctttgtcttcgtcctcacatcatcactataaccaacaacaacattgtatcatgtcggaagatcaacaccattcgatggatcagaccacttcatcggactacttctctttaaatatcgacaatgctcaacatctccgtagctactacacaagtcatagagaagaagacatgaaccctaatctaagtgattacagtaattgcaacaagaaagacacaacagtctatagaagctgtggacactcgtcaaaagcttcggtgtctagaggacattggagaccagctgaagatactaagctcaaagaactagtcgccgtctacggtccacaaaactggaacctcatagctgagaagctccaaggaagatccgggaaaagctgtaggcttcgatggtttaaccaactagacccaaggataaatagaagagccttcactgaggaagaagaagagaggctaatgcaagctcataggctttatggtaacaaatgggcgatgatagcgaggcttttccctggtaggactgataattctgtgaagaaccattggcatgttataatggctcgcaagtttagggaacaatcttcttcttaccgtaggaggaagacgatggtttctcttaagccactcattaaccctaatcctcacattttcaatgattttgaccctacccggttagctttgacccaccttgctagtagtgaccataagcagcttatgttaccagttccttgcttcccaggttatgatcatgaaaatgagagtccattaatggtggatatgttcgaaacccaaatgatggttggcgattacattgcatggacacaagaggcaactacattcgatttcttaaaccaaaccgggaagagtgagatatttgaaagaatcaatgaggagaagaaaccaccatttttcgattttcttgggttggggacggtgtga

SEQ ID NO: 90605 - protein, 330 aa, Arabidopsis thaliana
  peptide (1)..(330): Ceres Seq. ID no. 12724535
MEMVHADVASLSITPCFPSSLSSSSHHHYNQQQHCIMSEDQHHSMDQTTSSDYFSLNIDNAQHLRSYYTSHREEDMNPNLSDYSNCNKKDTTVYRSCGHSSKASVSRGHWRPAEDTKLKELVAVYGPQNWNLIAEKLQGRSGKSCRLRWFNQLDPRINRRAFTEEEEERLMQAHRLYGNKWAMIARLFPGRTDNSVKNHWHVIMARKFREQSSSYRRRKTMVSLKPLINPNPHIFNDFDPTRLALTHLASSDHKQLMLPVPCFPGYDHENESPLMVDMFETQMMVGDYIAWTQEATTFDFLNQTGKSEIFERINEEKKPPFFDFLGLGTV

SEQ ID NO: 90606 - protein, 328 aa, Arabidopsis thaliana
  peptide (1)..(328): Ceres Seq. ID no. 12724536
MVHADVASLSITPCFPSSLSSSSHHHYNQQQHCIMSEDQHHSMDQTTSSDYFSLNIDNAQHLRSYYTSHREEDMNPNLSDYSNCNKKDTTVYRSCGHSSKASVSRGHWRPAEDTKLKELVAVYGPQNWNLIAEKLQGRSGKSCRLRWFNQLDPRINRRAFTEEEEERLMQAHRLYGNKWAMIARLFPGRTDNSVKNHWHVIMARKFREQSSSYRRRKTMVSLKPLINPNPHIFNDFDPTRLALTHLASSDHKQLMLPVPCFPGYDHENESPLMVDMFETQMMVGDYIAWTQEATTFDFLNQTGKSEIFERINEEKKPPFFDFLGLGTV

SEQ ID NO: 90607 - protein, 294 aa, Arabidopsis thaliana
  peptide (1)..(294): Ceres Seq. ID no. 12724537
MSEDQHHSMDQTTSSDYFSLNIDNAQHLRSYYTSHREEDMNPNLSDYSNCNKKDTTVYRSCGHSSKASVSRGHWRPAEDTKLKELVAVYGPQNWNLIAEKLQGRSGKSCRLRWFNQLDPRINRRAFTEEEEERLMQAHRLYGNKWAMIARLFPGRTDNSVKNHWHVIMARKFREQSSSYRRRKTMVSLKPLINPNPHIFNDFDPTRLALTHLASSDHKQLMLPVPCFPGYDHENESPLMVDMFETQMMVGDYIAWTQEATTFDFLNQTGKSEIFERINEEKKPPFFDFLGLGTV

SEQ ID NO: 90608 - DNA, 729 bp, Arabidopsis thaliana
  misc_feature (1)..(729): Ceres Seq. ID no. 12724541
  misc_feature (1)..(729): Ortholog of  Ceres SEQ ID NO 13528157 as cited in SEQ ID NO 60102
atggatttgtcttccaaaccacaacaacaacttctaaactctcttcccatcgccggagaactaactgtcaccggagaaatgggtgtttgttacaaagagtgtttgaaaaaccacgcggctaatctcggcggccatgctctcgacggttgcggcgagtttatgccgagtcccacggctacttccaccgatccttcttctctccgttgcgctgcttgtggctgccaccgtaacttccaccgccgtgacccttccgagaatctcaacttcctcaccgcgcctccgatttcttctccctccggcactgagtcgccgccgtctcgtcacgtgtcttctcctgttccttgctcttactacacctcagctcctccacatcacgtgattctctctctcagctccggtttccctggaccgtcagatcaagatccaacggtggttaggtcagagaacagttcaagaggagcaatgaggaaacgaacaagaaccaaattcacgccggagcagaagatcaagatgagagccttcgcagagaaagctggttggaaaatcaacggatgtgatgaaaagtcggtgagagagttttgtaacgaagttgggattgagagaggagttcttaaagtgtggatgcataacaacaagtactcacttctcaatggcaagatcagagagatcgaacatggcctgtgtctgaacactcacagcaatgatggtgatgggtcttcatcttcttga

SEQ ID NO: 90609 - protein, 242 aa, Arabidopsis thaliana
  peptide (1)..(242): Ceres Seq. ID no. 12724542
MDLSSKPQQQLLNSLPIAGELTVTGEMGVCYKECLKNHAANLGGHALDGCGEFMPSPTATSTDPSSLRCAACGCHRNFHRRDPSENLNFLTAPPISSPSGTESPPSRHVSSPVPCSYYTSAPPHHVILSLSSGFPGPSDQDPTVVRSENSSRGAMRKRTRTKFTPEQKIKMRAFAEKAGWKINGCDEKSVREFCNEVGIERGVLKVWMHNNKYSLLNGKIREIEHGLCLNTHSNDGDGSSSS

SEQ ID NO: 90610 - protein, 216 aa, Arabidopsis thaliana
  peptide (1)..(216): Ceres Seq. ID no. 12724543
MGVCYKECLKNHAANLGGHALDGCGEFMPSPTATSTDPSSLRCAACGCHRNFHRRDPSENLNFLTAPPISSPSGTESPPSRHVSSPVPCSYYTSAPPHHVILSLSSGFPGPSDQDPTVVRSENSSRGAMRKRTRTKFTPEQKIKMRAFAEKAGWKINGCDEKSVREFCNEVGIERGVLKVWMHNNKYSLLNGKIREIEHGLCLNTHSNDGDGSSSS

SEQ ID NO: 90611 - protein, 189 aa, Arabidopsis thaliana
  peptide (1)..(189): Ceres Seq. ID no. 12724544
MPSPTATSTDPSSLRCAACGCHRNFHRRDPSENLNFLTAPPISSPSGTESPPSRHVSSPVPCSYYTSAPPHHVILSLSSGFPGPSDQDPTVVRSENSSRGAMRKRTRTKFTPEQKIKMRAFAEKAGWKINGCDEKSVREFCNEVGIERGVLKVWMHNNKYSLLNGKIREIEHGLCLNTHSNDGDGSSSS

SEQ ID NO: 90612 - DNA, 2379 bp, Arabidopsis thaliana
  misc_feature (1)..(2379): Ceres Seq. ID no. 12724555
  misc_feature (1)..(2379): Ortholog of  Ceres SEQ ID NO 14304565 as cited in SEQ ID NO 53297
  misc_feature (1)..(2379): Ortholog of  Ceres SEQ ID NO 15225368 as cited in SEQ ID NO 58345
  misc_feature (1)..(2379): Ortholog of  Ceres SEQ ID NO 15172170 as cited in SEQ ID NO 58957
  misc_feature (1)..(2379): Ortholog of  Ceres SEQ ID NO 13584744 as cited in SEQ ID NO 69137
atgagttcttataatagtttttctctttggattctcttctctttgcaactctgttttattctagattctgcggatcgcacagtttccttatgtcaacccgactgtggaggaatcaagatcccgtacccctttggaatgggaaagggttgttatctggagaagtggtacgaaattacttgtaatacctctacttctggaaagctcgtcccttatctttccgtgatcaacaaggaagttgtgggtatctctcttccgactgaaggcaggggttctagatataacaatccataccagtccgttaacattaaaaacccaatagcctcaaaggagtgctcaagcaatggagaagagcttggatcacttttgaatttgacgggtacccctttttatgttagccagcacaatgaactggtagcggttggttgcaacaacacggcatcgctgacaaatgtgaagccaagcatagtgcaatgcacatcaagctgcagcacaaaaccccatacgcatatcaaagattatcttgcagtactaaattgtcagaattacaatggctacgagaagaattgtaatgaggacagcagtatggatgaaagcattatggatgaaacaagctgcaatggtattggatgctgcaatgcatacatgcgcggcggtagtattcaacagattgttggtgtcacaatagaaaacaccataacgagagggtgcaaagttgccttcttgacaaacaaggcagaatatttgtctaataaatctgatccgcaaaagcttcatgctagaggatacagtacggtcgagctaggatggtttatccatacgacgaatcattcgtttataaagtctctgggatgctatagtgtaaaagagtacaacaatgaaagatacactagtacccagagaagaattaacataacaagttgtatatgcgatgacaatgcttatctaagctatgcaagatgctcatgcactaggggtttccaaggcaacccataccgtttaggcggatgcaaagatatcaatgaatgtaaagaagaagagggcatgacttactgtgggaccaacaaatgtgtcaatttgcaaggacactttaaatgtgtgtacaacaatcatcggccacttgctatagggcttggtgctagttttggctcattgatctttgttgttggaatatacttgttatacaaatttattaaaaagcaaaggaagttaaaccaaaagaagaagttcttcaagcgtaatggtggtctattgttgcaacaacaattgatttcaacagtaggcatggtcgaaaagacaatagtgttcagttcgcgagagttggagaaagctactgaaaacttcagttcaaacagaatacttggccagggtggtcaaggtacagtgtacaagggaatgcttgtcgatggaagaatcgttgcagtaaaaaagtccaaagtcgtggacgaagacaagctagaagagttcatcaatgaggttgtcattctttcacagatcaaccacaggaacatcgtgaaactcttgggatgttgccttgagacaaaagtccctgttctcgtctacgagtttattcctaatggtaaccttttcgaacatcttcatgatgagtttgatgaaaacattatggctacttggaatatacgtctccgcattgctatagatattgcaggagctctctcatacttgcactcgtctgcatcgtctccaatctatcacagagacgtcaagtctacaaacataatgttggatgagaaatatcgagccaaggtgtctgattttggaacgtcaagaacggtgacagtggatcatacccacttgacaacggtagtttcaggtacggtgggatatatggatccagagtactttcagtctagccaattcacagacaaaagtgatgtctatagcttcggggtcgtgctagtggagctaataactggagaaaagtcgatttctttcttgaggtctcaagaaaacaggacattggcaacttatttcattcttgcaatgaaagaaaacaaactcttcgatattatcgatgctcgaataagagatggttgcatgttgagtcaagtgactgcaacggcaaaagttgcaaggaagtgtctcaatctgaaagggagaaaacgaccaagcatgagagaagtgtcgatggagcttgatagtattcgtatgccttgtggagatatgcaactgcaagaatgtgttagcgaaaacgaggaaggggaagaacaaaacaaaggacttgtggaagatatcatgagggcagaatcaaggagcaaagagtttgttaccgctccagcttctcactacaataatattgctgctgcctcatcttcttcgtggtcagatgttgaaccattgtttcctcttcaaacacggtaa

SEQ ID NO: 90613 - protein, 792 aa, Arabidopsis thaliana
  peptide (1)..(792): Ceres Seq. ID no. 12724556
MSSYNSFSLWILFSLQLCFILDSADRTVSLCQPDCGGIKIPYPFGMGKGCYLEKWYEITCNTSTSGKLVPYLSVINKEVVGISLPTEGRGSRYNNPYQSVNIKNPIASKECSSNGEELGSLLNLTGTPFYVSQHNELVAVGCNNTASLTNVKPSIVQCTSSCSTKPHTHIKDYLAVLNCQNYNGYEKNCNEDSSMDESIMDETSCNGIGCCNAYMRGGSIQQIVGVTIENTITRGCKVAFLTNKAEYLSNKSDPQKLHARGYSTVELGWFIHTTNHSFIKSLGCYSVKEYNNERYTSTQRRINITSCICDDNAYLSYARCSCTRGFQGNPYRLGGCKDINECKEEEGMTYCGTNKCVNLQGHFKCVYNNHRPLAIGLGASFGSLIFVVGIYLLYKFIKKQRKLNQKKKFFKRNGGLLLQQQLISTVGMVEKTIVFSSRELEKATENFSSNRILGQGGQGTVYKGMLVDGRIVAVKKSKVVDEDKLEEFINEVVILSQINHRNIVKLLGCCLETKVPVLVYEFIPNGNLFEHLHDEFDENIMATWNIRLRIAIDIAGALSYLHSSASSPIYHRDVKSTNIMLDEKYRAKVSDFGTSRTVTVDHTHLTTVVSGTVGYMDPEYFQSSQFTDKSDVYSFGVVLVELITGEKSISFLRSQENRTLATYFILAMKENKLFDIIDARIRDGCMLSQVTATAKVARKCLNLKGRKRPSMREVSMELDSIRMPCGDMQLQECVSENEEGEEQNKGLVEDIMRAESRSKEFVTAPASHYNNIAAASSSSWSDVEPLFPLQTR

SEQ ID NO: 90614 - protein, 747 aa, Arabidopsis thaliana
  peptide (1)..(747): Ceres Seq. ID no. 12724557
MGKGCYLEKWYEITCNTSTSGKLVPYLSVINKEVVGISLPTEGRGSRYNNPYQSVNIKNPIASKECSSNGEELGSLLNLTGTPFYVSQHNELVAVGCNNTASLTNVKPSIVQCTSSCSTKPHTHIKDYLAVLNCQNYNGYEKNCNEDSSMDESIMDETSCNGIGCCNAYMRGGSIQQIVGVTIENTITRGCKVAFLTNKAEYLSNKSDPQKLHARGYSTVELGWFIHTTNHSFIKSLGCYSVKEYNNERYTSTQRRINITSCICDDNAYLSYARCSCTRGFQGNPYRLGGCKDINECKEEEGMTYCGTNKCVNLQGHFKCVYNNHRPLAIGLGASFGSLIFVVGIYLLYKFIKKQRKLNQKKKFFKRNGGLLLQQQLISTVGMVEKTIVFSSRELEKATENFSSNRILGQGGQGTVYKGMLVDGRIVAVKKSKVVDEDKLEEFINEVVILSQINHRNIVKLLGCCLETKVPVLVYEFIPNGNLFEHLHDEFDENIMATWNIRLRIAIDIAGALSYLHSSASSPIYHRDVKSTNIMLDEKYRAKVSDFGTSRTVTVDHTHLTTVVSGTVGYMDPEYFQSSQFTDKSDVYSFGVVLVELITGEKSISFLRSQENRTLATYFILAMKENKLFDIIDARIRDGCMLSQVTATAKVARKCLNLKGRKRPSMREVSMELDSIRMPCGDMQLQECVSENEEGEEQNKGLVEDIMRAESRSKEFVTAPASHYNNIAAASSSSWSDVEPLFPLQTR

SEQ ID NO: 90615 - protein, 598 aa, Arabidopsis thaliana
  peptide (1)..(598): Ceres Seq. ID no. 12724558
MDESIMDETSCNGIGCCNAYMRGGSIQQIVGVTIENTITRGCKVAFLTNKAEYLSNKSDPQKLHARGYSTVELGWFIHTTNHSFIKSLGCYSVKEYNNERYTSTQRRINITSCICDDNAYLSYARCSCTRGFQGNPYRLGGCKDINECKEEEGMTYCGTNKCVNLQGHFKCVYNNHRPLAIGLGASFGSLIFVVGIYLLYKFIKKQRKLNQKKKFFKRNGGLLLQQQLISTVGMVEKTIVFSSRELEKATENFSSNRILGQGGQGTVYKGMLVDGRIVAVKKSKVVDEDKLEEFINEVVILSQINHRNIVKLLGCCLETKVPVLVYEFIPNGNLFEHLHDEFDENIMATWNIRLRIAIDIAGALSYLHSSASSPIYHRDVKSTNIMLDEKYRAKVSDFGTSRTVTVDHTHLTTVVSGTVGYMDPEYFQSSQFTDKSDVYSFGVVLVELITGEKSISFLRSQENRTLATYFILAMKENKLFDIIDARIRDGCMLSQVTATAKVARKCLNLKGRKRPSMREVSMELDSIRMPCGDMQLQECVSENEEGEEQNKGLVEDIMRAESRSKEFVTAPASHYNNIAAASSSSWSDVEPLFPLQTR

SEQ ID NO: 90616 - DNA, 1131 bp, Arabidopsis thaliana
  misc_feature (1)..(1131): Ceres Seq. ID no. 12724563
  misc_feature (1)..(1131): Ortholog of  Ceres SEQ ID NO 13654989 as cited in SEQ ID NO 63117
  misc_feature (1)..(1131): Ortholog of  Ceres SEQ ID NO 13584744 as cited in SEQ ID NO 69137
atgttggtctcaaatttgacaatagggtcatcaagaatttcccgcaaaccgaatcagtcatctcgactctcaagtctcaccataccttcttatagcaacaatagcttcactacttcatcatggtcaaatttgacacctagaagtgaaggagagctcttaccatctccaacactaaaggcctttacattcaacgagctaaaaaccgctactagaaacttcaagccgaatagtatgattggtgaaggcggttttggttgtgtctataagggttggatcggtgaacgctcgttgtcaccttcgaaaccagggtccggtatggttgttgcagtcaagaaacttaaatcagaagggtttcaaggacacaaagagtggttgactgaggttcattatcttgggagacttcatcatatgaatcttgtgaagctaattggatattgcttagagggagagaaaagacttttggtttacgagtacatgcctaaaggaagcctggagaaccatctatttcgaagaggcgcagagccaattccgtggaagactaggatgaaagtagcttttagcgcagcgagaggactatctttcctccacgaagctaaagtcatataccgagacttcaaggcctctaatattctacttgatgtggatttcaatgcaaagctatctgattttgggttggcaaaagctggaccaacaggagatagaacgcatgtgacaactcaagtgataggcacacaagggtacgcagctccggaatacatagcaaccggccggttaacctccaagagtgatgtctatagctttggagtggtgttgctcgaactactctcgggtcgtcccaccctagacaaatcgaaagtaggagtggaacgtaacctggtggattgggcaataccttatttggtggacagaagaaaagtgtttagaataatggacacaaagcttggaggacagtaccctcacaaaggggcttgtgcagctgccaacatcgcattgcggtgtctcaataccgaacctaagctcagaccggatatggctgatgtcttatccactttacaacagcttgagacttcttcaaaaaagatgggttctactcaaaatatagtcatgtctccttcatctcatatgtcgtag

SEQ ID NO: 90617 - protein, 376 aa, Arabidopsis thaliana
  peptide (1)..(376): Ceres Seq. ID no. 12724564
MLVSNLTIGSSRISRKPNQSSRLSSLTIPSYSNNSFTTSSWSNLTPRSEGELLPSPTLKAFTFNELKTATRNFKPNSMIGEGGFGCVYKGWIGERSLSPSKPGSGMVVAVKKLKSEGFQGHKEWLTEVHYLGRLHHMNLVKLIGYCLEGEKRLLVYEYMPKGSLENHLFRRGAEPIPWKTRMKVAFSAARGLSFLHEAKVIYRDFKASNILLDVDFNAKLSDFGLAKAGPTGDRTHVTTQVIGTQGYAAPEYIATGRLTSKSDVYSFGVVLLELLSGRPTLDKSKVGVERNLVDWAIPYLVDRRKVFRIMDTKLGGQYPHKGACAAANIALRCLNTEPKLRPDMADVLSTLQQLETSSKKMGSTQNIVMSPSSHMS

SEQ ID NO: 90618 - protein, 299 aa, Arabidopsis thaliana; identical to SEQ ID NO: 48262
  peptide (1)..(299): Ceres Seq. ID no. 12724565

SEQ ID NO: 90619 - protein, 271 aa, Arabidopsis thaliana; identical to SEQ ID NO: 48263
  peptide (1)..(271): Ceres Seq. ID no. 12724566

SEQ ID NO: 90620 - DNA, 1164 bp, Arabidopsis thaliana
  misc_feature (1)..(1164): Ceres Seq. ID no. 12724567
  misc_feature (1)..(1164): Ortholog of  Ceres SEQ ID NO 13585587 as cited in SEQ ID NO 65515
atgatcaaagaggagaccgtttcatacttccaaactttcgatggtgttatggcagaatctgacaaggaagaggagcttgatgcaacaaaagcaaaggtggagaaagttcgggaagaaaatgagaaattaaagctcttactctctacgattcttaataattacaactctcttcaaatgcaagtctctaaagttctcggacaacaacaaggagcttcgtctatggagctagaccacattgatcgtcaagatgaaaataacgactatgatgtggatatatcacttaggcttggaagatcagagcaaaagatctctaaaaaggaggaaaataaggtggacaagatttctactaagaacgtagaggagtcaaaagataaaagatctgcactgggttttggatttcagattcaaagctatgaagcctcgaaactagatgatctttgtaggcaggttaagcttgcaaacgctgaaaataaatgtgtatcttcgaggaaagatgtcaaatcagttagaaatgaaaaccatcaagatgttttggaggagcatgaacaaacaggtttgaagaaaactagggtttgtgttaaagcatcatgtgaagacccatcaataaacgacggttgccagtggaggaaatatggtcaaaagactgcgaaaaccaatcctctcccacgagcctattaccgttgctccatgtcgtcaaattgtcccgttagaaaacaggtgcaaagatgtggagaagaagaaacctccgcttttatgacaacgtacgaaggaaaccatgaccatcctctccccatggaagcaagccacatggcagctggaacttccgcggctgcctccttattacaatctggctcctcctcttcctcctcctccacctcagcgagtctaagctatttcttcccttttcaccacttctctatctccaccactaactcgcacccgactgtaacattggacctcacacgaccaaactatcccaatcagttaccagacgactaccctctatcgtcctcctctttcagtctcaacttttcctctccagatcctccacctccatcatcgcatgaccacaccttgaactttagtggcttgcgaacacaagctccgttgagtacagattcattattggcccgttatcgaacgagactttccggacagcaataa

SEQ ID NO: 90621 - protein, 387 aa, Arabidopsis thaliana
  peptide (1)..(387): Ceres Seq. ID no. 12724568
MIKEETVSYFQTFDGVMAESDKEEELDATKAKVEKVREENEKLKLLLSTILNNYNSLQMQVSKVLGQQQGASSMELDHIDRQDENNDYDVDISLRLGRSEQKISKKEENKVDKISTKNVEESKDKRSALGFGFQIQSYEASKLDDLCRQVKLANAENKCVSSRKDVKSVRNENHQDVLEEHEQTGLKKTRVCVKASCEDPSINDGCQWRKYGQKTAKTNPLPRAYYRCSMSSNCPVRKQVQRCGEEETSAFMTTYEGNHDHPLPMEASHMAAGTSAAASLLQSGSSSSSSSTSASLSYFFPFHHFSISTTNSHPTVTLDLTRPNYPNQLPDDYPLSSSSFSLNFSSPDPPPPSSHDHTLNFSGLRTQAPLSTDSLLARYRTRLSGQQ

SEQ ID NO: 90622 - protein, 371 aa, Arabidopsis thaliana
  peptide (1)..(371): Ceres Seq. ID no. 12724569
MAESDKEEELDATKAKVEKVREENEKLKLLLSTILNNYNSLQMQVSKVLGQQQGASSMELDHIDRQDENNDYDVDISLRLGRSEQKISKKEENKVDKISTKNVEESKDKRSALGFGFQIQSYEASKLDDLCRQVKLANAENKCVSSRKDVKSVRNENHQDVLEEHEQTGLKKTRVCVKASCEDPSINDGCQWRKYGQKTAKTNPLPRAYYRCSMSSNCPVRKQVQRCGEEETSAFMTTYEGNHDHPLPMEASHMAAGTSAAASLLQSGSSSSSSSTSASLSYFFPFHHFSISTTNSHPTVTLDLTRPNYPNQLPDDYPLSSSSFSLNFSSPDPPPPSSHDHTLNFSGLRTQAPLSTDSLLARYRTRLSGQQ

SEQ ID NO: 90623 - protein, 329 aa, Arabidopsis thaliana
  peptide (1)..(329): Ceres Seq. ID no. 12724570
MQVSKVLGQQQGASSMELDHIDRQDENNDYDVDISLRLGRSEQKISKKEENKVDKISTKNVEESKDKRSALGFGFQIQSYEASKLDDLCRQVKLANAENKCVSSRKDVKSVRNENHQDVLEEHEQTGLKKTRVCVKASCEDPSINDGCQWRKYGQKTAKTNPLPRAYYRCSMSSNCPVRKQVQRCGEEETSAFMTTYEGNHDHPLPMEASHMAAGTSAAASLLQSGSSSSSSSTSASLSYFFPFHHFSISTTNSHPTVTLDLTRPNYPNQLPDDYPLSSSSFSLNFSSPDPPPPSSHDHTLNFSGLRTQAPLSTDSLLARYRTRLSGQQ

SEQ ID NO: 90624 - DNA, 2939 bp, Arabidopsis thaliana
  misc_feature (1)..(2939): Ceres Seq. ID no. 12724571
  misc_feature (1)..(2939): Ortholog of  Ceres SEQ ID NO 15168965 as cited in SEQ ID NO 20607
  misc_feature (1)..(2939): Ortholog of  Ceres SEQ ID NO 13597454 as cited in SEQ ID NO 64121
  misc_feature (1)..(2939): Ortholog of  Ceres SEQ ID NO 13623385 as cited in SEQ ID NO 0
aaaatatcttcttcttctttcttctgctctctctctctctctcgccatgtccactgttcccattgagtctcttctccaccattcttatcttcgtcacaactcaaaagtcaatcgcggaaatagaagcttcatacctatctcgttgaatctccgttctcatttcacttctaacaaactactacactcaattggaaaaagtgtcggtgttagctcgatgaacaaaagtcccgtcgccattcgtgctacctcatcggatactgccgtcgtggaaaccgctcaatcggatgatgtcatcttcaaggaaattttccctgttcagcgaatcgaaaaggcagaaggaaagatttatgttcgattaaaggaagtgaaggagaagaattgggagctgagtgttggatgtagtatacctggaaaatggattttgcattggggagtttcatatgtgggtgatactggcagtgaatgggatcaacctccggaagatatgagacctcctggctcaattgccattaaggactatgccatagagacacctttgaagaagttatctgaaggagattctttttttgaagttgctattaatctaaatctggagagttctgtagcagctctcaattttgttttgaaggacgaagaaactggggcgtggtatcagcacaaagggagagactttaaggttcctcttgtagacgatgttcctgataatggaaatttgatcggagctaagaaaggatttggtgcccttgggcagctttcaaacatccctctcaaacaagataagtccagtgcagagactgattctattgaagaaagaaaaggtcttcaagagttttacgaggagatgccaataagtaaacgtgttgccgatgataactcagtcagtgtcactgcaaggaaatgccctgaaacatctaagaacattgtatcaattgaaaccgatttaccgggtgacgttactgtccactggggagtttgcaaaaacggcactaagaaatgggaaattccatctgaaccttaccctgaagagacatctttgtttaagaacaaggcattacgcactcgtttacagcgaaaagacgatggaaatggatcgtttggattattctctctggatggaaagcttgaagggttatgctttgttcttaagttaaatgaaaatacttggctaaattataggggggaagacttctatgtccctttccttacttcaagtagctcgcccgttgaaactgaagctgcccaagtgagtaaacccaaacgaaaaacagataaagaagtgtctgctagtggatttactaaagaaatcatcacggagataaggaacttggcaattgacatttcctctcataagaatcagaagacaaacgtcaaagaagtgcaggaaaacattctacaagaaattgagaaactggctgcggaggcatatagcatatttagaagcacaactccagctttttccgaggaaggtgttttagaagcagaagctgacaagcctgacattaaaatctcctcaggaaccggctcgggatttgagatattatgccaaggtttcaactgggagtccaataaatctgggagatggtacttggaacttcaagaaaaagccgatgagttagcttcacttggattcactgttctgtggttacctccaccgacagaatctgtgtcacctgaagggtacatgcctaaagacctgtataacttgaattccagatatggaacaattgatgagctaaaagatacagtgaagaaatttcacaaggtcgggatcaaagttttaggcgatgctgttctgaatcaccgctgtgcacacttcaaaaatcaaaatggtgtatggaatctatttggaggacgtctaaactgggacgatagggcagtagttgcagatgaccctcatttccagggtagaggaaacaagagcagtggagataatttccatgctgctccaaacatagatcactcgcaagactttgttaggaaggatatcaaggaatggctatgctggatgatggaagaagttgggtatgatggatggaggcttgactttgtaagagggttctggggaggttatgtgaaagactatatggatgctagcaaaccgtactttgcggttggtgaatattgggattcgttaagttacacgtacggagaaatggactacaatcaagacgcacatcgtcaaagaatagttgactggattaatgcaactagtggagctgctggtgcatttgatgtcactaccaaaggaattcttcatacggcgcttcaaaaatgtgaatattggagactctcagacccaaaagggaagcctccaggtgtagttggttggtggccttctcgtgctgtaacattcatcgagaatcatgacactggctctacacagggtcattggagatttccggaggggaaggaaatgcaaggatatgcttacatcctaactcatccaggaacaccagcggtcttcttcgaccatatcttctcggattatcattccgagattgctgcacttctctctctcaggaacagacagaaactccactgtcggagtgaggtgaatatagacaagagtgagagagatgtgtatgcggctataatagatgaaaaggttgcaatgaagatcggaccagggcattatgaaccaccaaacggatcgcaaaactggtctgtagccgttgaaggcagagactacaaggtgtgggaaacatcttaagaagaaggttcccaatttttatgtgtatctagtagtaaataaaattgttcctggaggatatattatttcagggaataagattacctggaaatgttatatttagagtggaattaaaaccagatctaagatttgtcccacttttttcaatgctgagagaatattcatattgttgtattggatgcttgtaaagtgtatgcatatatatatgaataataatatatctatttcc

SEQ ID NO: 90625 - protein, 902 aa, Arabidopsis thaliana
  peptide (1)..(902): Ceres Seq. ID no. 12724572
KYLLLLSSALSLSLAMSTVPIESLLHHSYLRHNSKVNRGNRSFIPISLNLRSHFTSNKLLHSIGKSVGVSSMNKSPVAIRATSSDTAVVETAQSDDVIFKEIFPVQRIEKAEGKIYVRLKEVKEKNWELSVGCSIPGKWILHWGVSYVGDTGSEWDQPPEDMRPPGSIAIKDYAIETPLKKLSEGDSFFEVAINLNLESSVAALNFVLKDEETGAWYQHKGRDFKVPLVDDVPDNGNLIGAKKGFGALGQLSNIPLKQDKSSAETDSIEERKGLQEFYEEMPISKRVADDNSVSVTARKCPETSKNIVSIETDLPGDVTVHWGVCKNGTKKWEIPSEPYPEETSLFKNKALRTRLQRKDDGNGSFGLFSLDGKLEGLCFVLKLNENTWLNYRGEDFYVPFLTSSSSPVETEAAQVSKPKRKTDKEVSASGFTKEIITEIRNLAIDISSHKNQKTNVKEVQENILQEIEKLAAEAYSIFRSTTPAFSEEGVLEAEADKPDIKISSGTGSGFEILCQGFNWESNKSGRWYLELQEKADELASLGFTVLWLPPPTESVSPEGYMPKDLYNLNSRYGTIDELKDTVKKFHKVGIKVLGDAVLNHRCAHFKNQNGVWNLFGGRLNWDDRAVVADDPHFQGRGNKSSGDNFHAAPNIDHSQDFVRKDIKEWLCWMMEEVGYDGWRLDFVRGFWGGYVKDYMDASKPYFAVGEYWDSLSYTYGEMDYNQDAHRQRIVDWINATSGAAGAFDVTTKGILHTALQKCEYWRLSDPKGKPPGVVGWWPSRAVTFIENHDTGSTQGHWRFPEGKEMQGYAYILTHPGTPAVFFDHIFSDYHSEIAALLSLRNRQKLHCRSEVNIDKSERDVYAAIIDEKVAMKIGPGHYEPPNGSQNWSVAVEGRDYKVWETS

SEQ ID NO: 90626 - protein, 887 aa, Arabidopsis thaliana
  peptide (1)..(887): Ceres Seq. ID no. 12724573
MSTVPIESLLHHSYLRHNSKVNRGNRSFIPISLNLRSHFTSNKLLHSIGKSVGVSSMNKSPVAIRATSSDTAVVETAQSDDVIFKEIFPVQRIEKAEGKIYVRLKEVKEKNWELSVGCSIPGKWILHWGVSYVGDTGSEWDQPPEDMRPPGSIAIKDYAIETPLKKLSEGDSFFEVAINLNLESSVAALNFVLKDEETGAWYQHKGRDFKVPLVDDVPDNGNLIGAKKGFGALGQLSNIPLKQDKSSAETDSIEERKGLQEFYEEMPISKRVADDNSVSVTARKCPETSKNIVSIETDLPGDVTVHWGVCKNGTKKWEIPSEPYPEETSLFKNKALRTRLQRKDDGNGSFGLFSLDGKLEGLCFVLKLNENTWLNYRGEDFYVPFLTSSSSPVETEAAQVSKPKRKTDKEVSASGFTKEIITEIRNLAIDISSHKNQKTNVKEVQENILQEIEKLAAEAYSIFRSTTPAFSEEGVLEAEADKPDIKISSGTGSGFEILCQGFNWESNKSGRWYLELQEKADELASLGFTVLWLPPPTESVSPEGYMPKDLYNLNSRYGTIDELKDTVKKFHKVGIKVLGDAVLNHRCAHFKNQNGVWNLFGGRLNWDDRAVVADDPHFQGRGNKSSGDNFHAAPNIDHSQDFVRKDIKEWLCWMMEEVGYDGWRLDFVRGFWGGYVKDYMDASKPYFAVGEYWDSLSYTYGEMDYNQDAHRQRIVDWINATSGAAGAFDVTTKGILHTALQKCEYWRLSDPKGKPPGVVGWWPSRAVTFIENHDTGSTQGHWRFPEGKEMQGYAYILTHPGTPAVFFDHIFSDYHSEIAALLSLRNRQKLHCRSEVNIDKSERDVYAAIIDEKVAMKIGPGHYEPPNGSQNWSVAVEGRDYKVWETS

SEQ ID NO: 90627 - protein, 831 aa, Arabidopsis thaliana
  peptide (1)..(831): Ceres Seq. ID no. 12724574
MNKSPVAIRATSSDTAVVETAQSDDVIFKEIFPVQRIEKAEGKIYVRLKEVKEKNWELSVGCSIPGKWILHWGVSYVGDTGSEWDQPPEDMRPPGSIAIKDYAIETPLKKLSEGDSFFEVAINLNLESSVAALNFVLKDEETGAWYQHKGRDFKVPLVDDVPDNGNLIGAKKGFGALGQLSNIPLKQDKSSAETDSIEERKGLQEFYEEMPISKRVADDNSVSVTARKCPETSKNIVSIETDLPGDVTVHWGVCKNGTKKWEIPSEPYPEETSLFKNKALRTRLQRKDDGNGSFGLFSLDGKLEGLCFVLKLNENTWLNYRGEDFYVPFLTSSSSPVETEAAQVSKPKRKTDKEVSASGFTKEIITEIRNLAIDISSHKNQKTNVKEVQENILQEIEKLAAEAYSIFRSTTPAFSEEGVLEAEADKPDIKISSGTGSGFEILCQGFNWESNKSGRWYLELQEKADELASLGFTVLWLPPPTESVSPEGYMPKDLYNLNSRYGTIDELKDTVKKFHKVGIKVLGDAVLNHRCAHFKNQNGVWNLFGGRLNWDDRAVVADDPHFQGRGNKSSGDNFHAAPNIDHSQDFVRKDIKEWLCWMMEEVGYDGWRLDFVRGFWGGYVKDYMDASKPYFAVGEYWDSLSYTYGEMDYNQDAHRQRIVDWINATSGAAGAFDVTTKGILHTALQKCEYWRLSDPKGKPPGVVGWWPSRAVTFIENHDTGSTQGHWRFPEGKEMQGYAYILTHPGTPAVFFDHIFSDYHSEIAALLSLRNRQKLHCRSEVNIDKSERDVYAAIIDEKVAMKIGPGHYEPPNGSQNWSVAVEGRDYKVWETS

SEQ ID NO: 90628 - DNA, 1995 bp, Arabidopsis thaliana
  misc_feature (1)..(1995): Ceres Seq. ID no. 12724575
  misc_feature (1)..(1995): Ortholog of  Ceres SEQ ID NO 15171212 as cited in SEQ ID NO 56899
  misc_feature (1)..(1995): Ortholog of  Ceres SEQ ID NO 12613725 as cited in SEQ ID NO 68196
acctcaaagtttgagagaaagaaagagagagaatggaagtggaagaagaggtctcaagatgggaaggctacgccgattggagaaacagagcagccgtgaaaggccgtcacggtggcatgctcgccgcctctttcgtcttagtggtggagatattagagaatctagcgtatttggcgaatgcgagtaatcttgtgctatacctaagagaatacatgcacatgtctccatcaaaatcggcaaatgacgtcaccaatttcatgggcacagcttttctcctagctctcctcggtggtttcctctccgacgctttcttctccacttttcaaatcttcctcatctcagcttccatcgagtttttgggattgatcatactcacaattcaagctcggacaccatccttaatgcctccatcgtgcgatagtcccacatgtgaagaagtgagtggttcgaaggcagcgatgctattcgtggggttgtaccttgtagctttgggtgtgggagggatcaaaggttcattagcatctcacggagcagaacagtttgatgagagtacacctaaaggtcggaaacaaaggtcaacgttctttaactacttcgtgttttgtcttgcttgtggagcactagttgctgtcacgtttgtagtttggttagaagacaacaaaggatgggaatggggattcggtgtttctaccattgctatcttcgtctctattctcatctttctctctggatcaagattttataggaacaagattccatgtggaagtcctctcaccacaatcttgaaggttcttcttgcggcttcggttaagtgctgctcgagtggaagttcaagcaatgcggttgcgagtatgtccgtgagtccctcaaatcattgcgtatcaaaggggaaaaaagaagttgaatcacaaggagaattggaaaagccacgtcaagaagaagctttgcctcctcgggcacaactaactaacagtttgaaagtattaaatggagctgcggatgaaaaacctgtccatagattgttagaatgcacagtccaacaagtggaagatgtgaagattgtcttgaaaatgcttccgatatttgcttgcactatcatgcttaactgttgcttagctcagctctctacattctccgtccaacaagctgcttccatgaacacaaagataggaagcctaaagatacctccagcttccttaccgatcttccccgtcgttttcataatgatcctcgcacctatctacgaccatctcattatcccattcgctagaaaagctaccaagaccgaaacaggagtcactcatctacaaagaatcggagtaggtttagttctttcgatattagcaatggcggttgcagctctagttgagattaaacgaaagggagtggctaaagactccggcttgcttgactcgaaagaaaccttacccgtgactttcctatggatcgcacttcagtatcttttcctagggtcagccgatctattcacactagctggactactagagtatttcttcacggaagcaccttcctcaatgagatctctcgcaacatcgctctcgtgggcttctttggctatggggtattacctaagctcagtgatcgtgtccatagtaaacagcatcacaggaagctcagggaacacaccttggctcagaggaaaaagcataaaccgttacaaactagactacttctattggctaatgtgtgttcttagtgcagctaacttcttgcactacctcttttgggcaatgcgttacaagtatagatcaactggttcaagaagctaaaattggatgggcaacttttgagttttttttttgtttttaattagagcagaaaatgtttttacttgagcggctgttatataagagatgataaatgggggtaagtagtaatgttgtgatcaggtatatattggggtttgaagtttttatcgttggacaagtaatgtacagcgaatgatattaacttgctttaagtctttcttttgtt

SEQ ID NO: 90629 - protein, 585 aa, Arabidopsis thaliana
  peptide (1)..(585): Ceres Seq. ID no. 12724576
MEVEEEVSRWEGYADWRNRAAVKGRHGGMLAASFVLVVEILENLAYLANASNLVLYLREYMHMSPSKSANDVTNFMGTAFLLALLGGFLSDAFFSTFQIFLISASIEFLGLIILTIQARTPSLMPPSCDSPTCEEVSGSKAAMLFVGLYLVALGVGGIKGSLASHGAEQFDESTPKGRKQRSTFFNYFVFCLACGALVAVTFVVWLEDNKGWEWGFGVSTIAIFVSILIFLSGSRFYRNKIPCGSPLTTILKVLLAASVKCCSSGSSSNAVASMSVSPSNHCVSKGKKEVESQGELEKPRQEEALPPRAQLTNSLKVLNGAADEKPVHRLLECTVQQVEDVKIVLKMLPIFACTIMLNCCLAQLSTFSVQQAASMNTKIGSLKIPPASLPIFPVVFIMILAPIYDHLIIPFARKATKTETGVTHLQRIGVGLVLSILAMAVAALVEIKRKGVAKDSGLLDSKETLPVTFLWIALQYLFLGSADLFTLAGLLEYFFTEAPSSMRSLATSLSWASLAMGYYLSSVIVSIVNSITGSSGNTPWLRGKSINRYKLDYFYWLMCVLSAANFLHYLFWAMRYKYRSTGSRS

SEQ ID NO: 90630 - protein, 557 aa, Arabidopsis thaliana; identical to SEQ ID NO: 88606
  peptide (1)..(557): Ceres Seq. ID no. 12724577

SEQ ID NO: 90631 - protein, 525 aa, Arabidopsis thaliana
  peptide (1)..(525): Ceres Seq. ID no. 12724578
MHMSPSKSANDVTNFMGTAFLLALLGGFLSDAFFSTFQIFLISASIEFLGLIILTIQARTPSLMPPSCDSPTCEEVSGSKAAMLFVGLYLVALGVGGIKGSLASHGAEQFDESTPKGRKQRSTFFNYFVFCLACGALVAVTFVVWLEDNKGWEWGFGVSTIAIFVSILIFLSGSRFYRNKIPCGSPLTTILKVLLAASVKCCSSGSSSNAVASMSVSPSNHCVSKGKKEVESQGELEKPRQEEALPPRAQLTNSLKVLNGAADEKPVHRLLECTVQQVEDVKIVLKMLPIFACTIMLNCCLAQLSTFSVQQAASMNTKIGSLKIPPASLPIFPVVFIMILAPIYDHLIIPFARKATKTETGVTHLQRIGVGLVLSILAMAVAALVEIKRKGVAKDSGLLDSKETLPVTFLWIALQYLFLGSADLFTLAGLLEYFFTEAPSSMRSLATSLSWASLAMGYYLSSVIVSIVNSITGSSGNTPWLRGKSINRYKLDYFYWLMCVLSAANFLHYLFWAMRYKYRSTGSRS

SEQ ID NO: 90632 - DNA, 1267 bp, Arabidopsis thaliana
  misc_feature (1)..(1267): Ceres Seq. ID no. 12724617
  misc_feature (1)..(1267): Ortholog of  Ceres SEQ ID NO 15176230 as cited in SEQ ID NO 58796
  misc_feature (1)..(1267): Ortholog of  Ceres SEQ ID NO 14308156 as cited in SEQ ID NO 59006
  misc_feature (1)..(1267): Ortholog of  Ceres SEQ ID NO 13596321 as cited in SEQ ID NO 67976
acagagagagagagacactaaaaccctaatctcttactcactgtctctcttcttcaatccatgtcttcaacacaagaagcgtctgttactgatttgcccgtgaagagacctagagaagcagaggaggacaataacggcggcgccatggaaacagagaacggtggaggagagataaaggagccttcttgtatgtcctctattattcctggatggttctctgagattagtcctatgtggccaggagaagcacattctctcaaggtagagaagattctattccaagggaaatcagattaccaggatgttattgttttccagtctgcaacatatggaaaggttttggttttggatggagtgattcaactcactgagagagatgaatgtgcgtatcaagaaatgatcactcatcttcctttgtgctctatctccaaccccaaaaaggtactggtgattggaggaggagatggaggagtcctgagggaagtggcacgtcatagttctgttgagcagattgacatttgtgaaatagataaaatggtggttgatgtggctaagcagtatttccctaatgtagcagttggatacgaggatcctcgtgtcaacctcatcattggcgatggtgttgctttcttgaagaacgctgctgaaggaacctatgatgcagttattgttgattcatctgatccaatcggtccagcaaaagagctatttgagaaacctttctttgagtcagtgaatagagctcttcgtcctggtggagttgtgtgcacacaagctgaaagcttgtggcttcacatggatatcattgaagacattgtttctaattgccgtgacatctttaaaggatctgttaactacgcttggaccagtgttccaacttacccgagtggagtcattggattcatgctttgttcatctgaaggaccacaagtcgatttcaagaagccagtgagtctaatcgatactgatgaaagctctatcaaatcacactgtcccttgaagtattacaacgctgagattcactcagctgctttctgcttgccctcttttgctaagaaggtgattgattcgaaagccaactagaaaagagaagagaaatcatttgctttagagaaacttcatgtggaagtgataatatgatgatacaatgatcctttggaaaaaaataaagaagttttaatttttagaatgtaatgttctttcacctgcaatgttatgtgactgcactgagctatcaatctctttttataagcattacacatatttc

SEQ ID NO: 90633 - protein, 340 aa, Arabidopsis thaliana
  peptide (1)..(340): Ceres Seq. ID no. 12724618
MSSTQEASVTDLPVKRPREAEEDNNGGAMETENGGGEIKEPSCMSSIIPGWFSEISPMWPGEAHSLKVEKILFQGKSDYQDVIVFQSATYGKVLVLDGVIQLTERDECAYQEMITHLPLCSISNPKKVLVIGGGDGGVLREVARHSSVEQIDICEIDKMVVDVAKQYFPNVAVGYEDPRVNLIIGDGVAFLKNAAEGTYDAVIVDSSDPIGPAKELFEKPFFESVNRALRPGGVVCTQAESLWLHMDIIEDIVSNCRDIFKGSVNYAWTSVPTYPSGVIGFMLCSSEGPQVDFKKPVSLIDTDESSIKSHCPLKYYNAEIHSAAFCLPSFAKKVIDSKAN

SEQ ID NO: 90634 - protein, 312 aa, Arabidopsis thaliana
  peptide (1)..(312): Ceres Seq. ID no. 12724619
METENGGGEIKEPSCMSSIIPGWFSEISPMWPGEAHSLKVEKILFQGKSDYQDVIVFQSATYGKVLVLDGVIQLTERDECAYQEMITHLPLCSISNPKKVLVIGGGDGGVLREVARHSSVEQIDICEIDKMVVDVAKQYFPNVAVGYEDPRVNLIIGDGVAFLKNAAEGTYDAVIVDSSDPIGPAKELFEKPFFESVNRALRPGGVVCTQAESLWLHMDIIEDIVSNCRDIFKGSVNYAWTSVPTYPSGVIGFMLCSSEGPQVDFKKPVSLIDTDESSIKSHCPLKYYNAEIHSAAFCLPSFAKKVIDSKAN

SEQ ID NO: 90635 - protein, 297 aa, Arabidopsis thaliana
  peptide (1)..(297): Ceres Seq. ID no. 12724620
MSSIIPGWFSEISPMWPGEAHSLKVEKILFQGKSDYQDVIVFQSATYGKVLVLDGVIQLTERDECAYQEMITHLPLCSISNPKKVLVIGGGDGGVLREVARHSSVEQIDICEIDKMVVDVAKQYFPNVAVGYEDPRVNLIIGDGVAFLKNAAEGTYDAVIVDSSDPIGPAKELFEKPFFESVNRALRPGGVVCTQAESLWLHMDIIEDIVSNCRDIFKGSVNYAWTSVPTYPSGVIGFMLCSSEGPQVDFKKPVSLIDTDESSIKSHCPLKYYNAEIHSAAFCLPSFAKKVIDSKAN

SEQ ID NO: 90636 - DNA, 918 bp, Arabidopsis thaliana
  misc_feature (1)..(918): Ceres Seq. ID no. 12724628
  misc_feature (1)..(918): Ortholog of  Ceres SEQ ID NO 15177059 as cited in SEQ ID NO 60196
  misc_feature (1)..(918): Ortholog of  Ceres SEQ ID NO 13502960 as cited in SEQ ID NO 67097
atggcggcacaagtcgagatcgaagatcaagaatccgtcacgaatttagacaacggcgaaatcatcaaccccatctccgacaacgcacctaacttctccggcgatgcaacgattcttctccgtgaagccaccttcgaacacaacctcatcaaaaactgtttcctctccggaatgggctcattcgccaccgaaacaacaatcgtcaccgtacgaaaaatcttaacgcagagattaatcacaacgaaagctaaattcgctgtgttcaagcttttcacagaagctatgaagaggaagaacaacggttacgcgaatattaggtacggttggtactctggttctaaagaagagatcgatcgtgttattacgtatgggtttagtaatagagagatcaagaaagtcgaaaacgacgtcggatctcacggtgttggaattcatcttgttcatcatcgttactctctcgctgcggctttagttggtgaaggtgatgaagaagggatcaagaatattctcttatgccgtgtgattcttggtaaaccggaacaaattgtgaccggttctaaacaatcttacccaagttcaaaccaatttgattctggtgttgataatcttgagaatccgagaaaatatgtgatttggagttgtaacatgaattcttacattcttccaacttatatcgtcagtttcaaatctcatcttctcagaggtctaattggaagagcaaggtcaccatgtgttagcttctctgttcttatgtcaattctttcaaagtcacttgacgctgcaagaatgaacttgattttgactagttatgatgattttaggaaacggaaactgaggagagagcagctagttaggaagattagggaagtggttggagacaatcttcttttcaagatactcaagaatcagaggcgttaa

SEQ ID NO: 90637 - protein, 305 aa, Arabidopsis thaliana
  peptide (1)..(305): Ceres Seq. ID no. 12724629
MAAQVEIEDQESVTNLDNGEIINPISDNAPNFSGDATILLREATFEHNLIKNCFLSGMGSFATETTIVTVRKILTQRLITTKAKFAVFKLFTEAMKRKNNGYANIRYGWYSGSKEEIDRVITYGFSNREIKKVENDVGSHGVGIHLVHHRYSLAAALVGEGDEEGIKNILLCRVILGKPEQIVTGSKQSYPSSNQFDSGVDNLENPRKYVIWSCNMNSYILPTYIVSFKSHLLRGLIGRARSPCVSFSVLMSILSKSLDAARMNLILTSYDDFRKRKLRREQLVRKIREVVGDNLLFKILKNQRR

SEQ ID NO: 90638 - protein, 248 aa, Arabidopsis thaliana
  peptide (1)..(248): Ceres Seq. ID no. 12724630
MGSFATETTIVTVRKILTQRLITTKAKFAVFKLFTEAMKRKNNGYANIRYGWYSGSKEEIDRVITYGFSNREIKKVENDVGSHGVGIHLVHHRYSLAAALVGEGDEEGIKNILLCRVILGKPEQIVTGSKQSYPSSNQFDSGVDNLENPRKYVIWSCNMNSYILPTYIVSFKSHLLRGLIGRARSPCVSFSVLMSILSKSLDAARMNLILTSYDDFRKRKLRREQLVRKIREVVGDNLLFKILKNQRR

SEQ ID NO: 90639 - protein, 211 aa, Arabidopsis thaliana
  peptide (1)..(211): Ceres Seq. ID no. 12724631
MKRKNNGYANIRYGWYSGSKEEIDRVITYGFSNREIKKVENDVGSHGVGIHLVHHRYSLAAALVGEGDEEGIKNILLCRVILGKPEQIVTGSKQSYPSSNQFDSGVDNLENPRKYVIWSCNMNSYILPTYIVSFKSHLLRGLIGRARSPCVSFSVLMSILSKSLDAARMNLILTSYDDFRKRKLRREQLVRKIREVVGDNLLFKILKNQRR

SEQ ID NO: 90640 - DNA, 1185 bp, Arabidopsis thaliana
  misc_feature (1)..(1185): Ceres Seq. ID no. 12724632
  misc_feature (1)..(1185): Ortholog of  Ceres SEQ ID NO 13654989 as cited in SEQ ID NO 63117
  misc_feature (1)..(1185): Ortholog of  Ceres SEQ ID NO 13584744 as cited in SEQ ID NO 69137
atgtggagattaaagaatcagaagaagaaagaaacggcagattcgccgagttcttctccaacagcaccgtcagtcgattcagcggtgatgggaagtggtcagactcattttacctatgaagagctagaggacataacagaagggttttctaagcaaaacatacttggagaaggaggttttggttgtgtctacaaaggtaaactaaaagatggaaaacttgttgctgttaagcagcttaaggttggtagcggacaaggagaccgtgagtttaaggcggaggttgagattattagccgtgttcatcatcgccatttggtatcgcttgttggatactgcattgcggattcagagagattgcttatctatgagtatgttcctaaccaaacattggagcatcatttgcatgggaagggtaggccagtgcttgaatgggctaggagagtcagaatcgctatagttctgccaaaggtttggcgtatttgcacgaagactgtaagtcacccaaaaatcattcacagggacataaagtccgctaacatcttgctggacgatgagtttgaagttcaggttgctgactttggacttgccaaagtcaatgatacaacacaaactcatgtctcaactcgcgttatgggaaccttcgggtacttggcaccagaatatgcacaaagtggacaacttactgatagatcagatgttttctcgtttggagttgttctcttagagcttataactggacgcaaacctgttgaccggaaccagcctttgggagaagagagtttggttggatgggctcgtccactacttaaaaaagccattgagaccggtgatttcagtgaactagttgatagacggctcgaaaagcattacgtgaagaatgaagttttcagaatgattgaaacggctgctgcttgtgttaggtattcaggtccaaaacgtccacgcatggttcaggttttgagagcactagatagtgaaggagacatgggagatatctgcaatggaatcaaagtgggacaaagcagtacttgtgacgactctggtcagaatcatagtgtgataaaggacgtcgggtctataggaagaggaggaatggtggtatcaggggtgagggtggtcacacgtttgatggttgatgcttatcataatcggcacgagggaaagaaagcagagagaagaatctga

SEQ ID NO: 90641 - protein, 394 aa, Arabidopsis thaliana
  peptide (1)..(394): Ceres Seq. ID no. 12724633
MWRLKNQKKKETADSPSSSPTAPSVDSAVMGSGQTHFTYEELEDITEGFSKQNILGEGGFGCVYKGKLKDGKLVAVKQLKVGSGQGDREFKAEVEIISRVHHRHLVSLVGYCIADSERLLIYEYVPNQTLEHHLHGKGRPVLEWARRVRIAIVLPKVWRICTKTVSHPKIIHRDIKSANILLDDEFEVQVADFGLAKVNDTTQTHVSTRVMGTFGYLAPEYAQSGQLTDRSDVFSFGVVLLELITGRKPVDRNQPLGEESLVGWARPLLKKAIETGDFSELVDRRLEKHYVKNEVFRMIETAAACVRYSGPKRPRMVQVLRALDSEGDMGDICNGIKVGQSSTCDDSGQNHSVIKDVGSIGRGGMVVSGVRVVTRLMVDAYHNRHEGKKAERRI

SEQ ID NO: 90642 - protein, 365 aa, Arabidopsis thaliana
  peptide (1)..(365): Ceres Seq. ID no. 12724634
MGSGQTHFTYEELEDITEGFSKQNILGEGGFGCVYKGKLKDGKLVAVKQLKVGSGQGDREFKAEVEIISRVHHRHLVSLVGYCIADSERLLIYEYVPNQTLEHHLHGKGRPVLEWARRVRIAIVLPKVWRICTKTVSHPKIIHRDIKSANILLDDEFEVQVADFGLAKVNDTTQTHVSTRVMGTFGYLAPEYAQSGQLTDRSDVFSFGVVLLELITGRKPVDRNQPLGEESLVGWARPLLKKAIETGDFSELVDRRLEKHYVKNEVFRMIETAAACVRYSGPKRPRMVQVLRALDSEGDMGDICNGIKVGQSSTCDDSGQNHSVIKDVGSIGRGGMVVSGVRVVTRLMVDAYHNRHEGKKAERRI

SEQ ID NO: 90643 - DNA, 2133 bp, Arabidopsis thaliana
  misc_feature (1)..(2133): Ceres Seq. ID no. 12724635
  misc_feature (1)..(2133): Ortholog of  Ceres SEQ ID NO 14307164 as cited in SEQ ID NO 54775
  misc_feature (1)..(2133): Ortholog of  Ceres SEQ ID NO 13654989 as cited in SEQ ID NO 63117
  misc_feature (1)..(2133): Ortholog of  Ceres SEQ ID NO 13655640 as cited in SEQ ID NO 63844
  misc_feature (1)..(2133): Ortholog of  Ceres SEQ ID NO 13584744 as cited in SEQ ID NO 69137
atgtcggactcgccaacttcttctccaccagcaccatccgctgattccgctccgccgccggatacctcatccgacggatctgctgctcctccacctacggattcagcaccacctcctagtccaccggctgattcatctccgcctccagctcttccatctcttccgccagctgtcttttctcctccgccaactgtctcatcccctcctcctccgccgcttgattcatctcctcctccgccgcctgatttaaccccgccgccaagttctccccctcccccagatgctccgccgccgattcccatcgtgttccctccaccgatagactcaccgccgcccgagtccaccaactcccctccacctccagaggtgtttgaaccaccaccgcctccggccgatgaagacgaaagccctcctgctcctccacctccggaacaattacctcctccagcgtcttcaccgcaaggaggacccaaaaaaccaaaaaaacaccatccaggaccagccacatctcctcctgctccttcagcaccagccacatctcctcctgctcctccaaacgcgccgccacgtaacagttcccacgcactaccacctaagtctaccgctgcaggtggacctctcacctcgccatctcgcggagtccccagcagcggaaactctgtcccgccacctgcaaatagcggtggcggctatcaagggaagactatggccggttttgcaatagccggtttcgcagtcatcgccttgatggccgttgtgttcttagtcagaagaaagaagaagagaaacattgatgcctacagtgactcacaatacttgcctccttcaaacttctccatcaaatcagatggattcttatacggtcaaaatcctacaaagggatactctggtcctggtggttacaattcacaacaacaatcaaattccggaaacagcttcggcagccaacgaggaggaggaggttatacacggtcagggagcgcacctgattcagcagtgatgggaagtggtcaaacacatttcacatatgaagagctaacggacataacagaaggattttctaagcataacatacttggagaaggaggttttggttgtgtgtataaaggtaaattaaatgatggaaaacttgttgctgttaagcagcttaaggttggtagcggacaaggtgaccgtgagtttaaggcggaggttgagattattagccgtgttcatcatcgccatttggtttctcttgttggatactgcattgcggattcagagagattgcttatctatgaatatgttcctaaccaaacattggaacatcatttgcatgggaagggaaggccagtacttgaatgggctaggagagtcagaattgctataggttctgccaaaggtttggcgtatttacacgaagactgtcacccaaaaatcattcacagggacataaagtccgctaacatcttgctggacgatgagtttgaagctcaggttgctgactttggacttgccaaactcaatgattcaacacaaactcatgtatcaactcgcgttatgggaaccttcgggtacttggcaccagaatatgcacaaagtggaaagctgactgatagatcagatgttttctcgtttggggttgttctcttagagcttataacaggacgcaaacctgttgaccaataccagcctttgggagaagagagtttggttgaatgggctcgtcctctgcttcacaaagccattgagaccggtgatttcagtgaactagttgatagacggctcgaaaagcattatgtggagaatgaagttttcagaatgattgaaacagctgctgcttgtgttaggcattcaggtccaaaacgtccacgtatggttcaggttgtgagagcattggatagtgaaggggacatgggagatatcagcaatggtaacaaagtgggacaaagcagtgcttatgactctggtcagtataataatgacaccatgaagttcaggaaaatggcatttggttttgacgatagctcggattccgggatgtacagtggagactactctgtccaagactcccggaaaggatccaacggagcttcctctgagttcacaaggaatgaaaccgagaaccgaaacttcaataaccggcgctactga

SEQ ID NO: 90644 - protein, 710 aa, Arabidopsis thaliana
  peptide (1)..(710): Ceres Seq. ID no. 12724636
MSDSPTSSPPAPSADSAPPPDTSSDGSAAPPPTDSAPPPSPPADSSPPPALPSLPPAVFSPPPTVSSPPPPPLDSSPPPPPDLTPPPSSPPPPDAPPPIPIVFPPPIDSPPPESTNSPPPPEVFEPPPPPADEDESPPAPPPPEQLPPPASSPQGGPKKPKKHHPGPATSPPAPSAPATSPPAPPNAPPRNSSHALPPKSTAAGGPLTSPSRGVPSSGNSVPPPANSGGGYQGKTMAGFAIAGFAVIALMAVVFLVRRKKKRNIDAYSDSQYLPPSNFSIKSDGFLYGQNPTKGYSGPGGYNSQQQSNSGNSFGSQRGGGGYTRSGSAPDSAVMGSGQTHFTYEELTDITEGFSKHNILGEGGFGCVYKGKLNDGKLVAVKQLKVGSGQGDREFKAEVEIISRVHHRHLVSLVGYCIADSERLLIYEYVPNQTLEHHLHGKGRPVLEWARRVRIAIGSAKGLAYLHEDCHPKIIHRDIKSANILLDDEFEAQVADFGLAKLNDSTQTHVSTRVMGTFGYLAPEYAQSGKLTDRSDVFSFGVVLLELITGRKPVDQYQPLGEESLVEWARPLLHKAIETGDFSELVDRRLEKHYVENEVFRMIETAAACVRHSGPKRPRMVQVVRALDSEGDMGDISNGNKVGQSSAYDSGQYNNDTMKFRKMAFGFDDSSDSGMYSGDYSVQDSRKGSNGASSEFTRNETENRNFNNRRY

SEQ ID NO: 90645 - protein, 475 aa, Arabidopsis thaliana
  peptide (1)..(475): Ceres Seq. ID no. 12724637
MAGFAIAGFAVIALMAVVFLVRRKKKRNIDAYSDSQYLPPSNFSIKSDGFLYGQNPTKGYSGPGGYNSQQQSNSGNSFGSQRGGGGYTRSGSAPDSAVMGSGQTHFTYEELTDITEGFSKHNILGEGGFGCVYKGKLNDGKLVAVKQLKVGSGQGDREFKAEVEIISRVHHRHLVSLVGYCIADSERLLIYEYVPNQTLEHHLHGKGRPVLEWARRVRIAIGSAKGLAYLHEDCHPKIIHRDIKSANILLDDEFEAQVADFGLAKLNDSTQTHVSTRVMGTFGYLAPEYAQSGKLTDRSDVFSFGVVLLELITGRKPVDQYQPLGEESLVEWARPLLHKAIETGDFSELVDRRLEKHYVENEVFRMIETAAACVRHSGPKRPRMVQVVRALDSEGDMGDISNGNKVGQSSAYDSGQYNNDTMKFRKMAFGFDDSSDSGMYSGDYSVQDSRKGSNGASSEFTRNETENRNFNNRRY

SEQ ID NO: 90646 - protein, 461 aa, Arabidopsis thaliana
  peptide (1)..(461): Ceres Seq. ID no. 12724638
MAVVFLVRRKKKRNIDAYSDSQYLPPSNFSIKSDGFLYGQNPTKGYSGPGGYNSQQQSNSGNSFGSQRGGGGYTRSGSAPDSAVMGSGQTHFTYEELTDITEGFSKHNILGEGGFGCVYKGKLNDGKLVAVKQLKVGSGQGDREFKAEVEIISRVHHRHLVSLVGYCIADSERLLIYEYVPNQTLEHHLHGKGRPVLEWARRVRIAIGSAKGLAYLHEDCHPKIIHRDIKSANILLDDEFEAQVADFGLAKLNDSTQTHVSTRVMGTFGYLAPEYAQSGKLTDRSDVFSFGVVLLELITGRKPVDQYQPLGEESLVEWARPLLHKAIETGDFSELVDRRLEKHYVENEVFRMIETAAACVRHSGPKRPRMVQVVRALDSEGDMGDISNGNKVGQSSAYDSGQYNNDTMKFRKMAFGFDDSSDSGMYSGDYSVQDSRKGSNGASSEFTRNETENRNFNNRRY

SEQ ID NO: 90647 - DNA, 933 bp, Arabidopsis thaliana
  misc_feature (1)..(933): Ceres Seq. ID no. 12724646
  misc_feature (1)..(933): Ortholog of  Ceres SEQ ID NO 15180793 as cited in SEQ ID NO 0
atgttatctctacgagttcctactcccacttccttcgatttccggcgatatcaagccggagatttagagcggcgatggcggttaagtagagatagctttctctctttctcgccaaaattcgaggaaaacagaggattccgattcggagtcaaatcttccaaatcggatgtttcgtttacggcggcggaggaagaagaaactctgccggaagagctacatgcagagctgatgccgaaacatgtggcgattataatggacggaaacggaagatgggcgaagaatcgtggtcttcaaccttgggatggtcacagagctggcgttgaagctttgaaagagatcgttgagctttgtggtaaatggggaattcaagtccttacagttttcgctttctctactgataattggattagaccaagaattgagattgatttcttgtttagtttatttgagagatcactcaaaacagaatttcagaacttagccaagaacaatgttcggatatcgatcattggagattcctcgaaacttccgaaatctcttttaagagtgattaacgaagttgaggaagttacaaagaacaacacgaggcttcagctaatcgtagcggttggttacagtgggaaatacgatgttttacaagcgtgtagaggtatcgcgaggagagtgaaagatggcgaaatcgaagttgaggagatagacgagagactgattgaggaagaattggagacgaattgtactgagtttccttacccggatttacttataagaacgagtggtgagcttagagtgagtaacttcttgttgtggcaattggcttatacagagcttttctttgctcaagaactttggcctgattttgggagaagcggttttatcgaagctttgatgtcgtttcagcagagacaacgacgctttggtggtcgtaaatcttga

SEQ ID NO: 90648 - protein, 310 aa, Arabidopsis thaliana
  peptide (1)..(310): Ceres Seq. ID no. 12724647
MLSLRVPTPTSFDFRRYQAGDLERRWRLSRDSFLSFSPKFEENRGFRFGVKSSKSDVSFTAAEEEETLPEELHAELMPKHVAIIMDGNGRWAKNRGLQPWDGHRAGVEALKEIVELCGKWGIQVLTVFAFSTDNWIRPRIEIDFLFSLFERSLKTEFQNLAKNNVRISIIGDSSKLPKSLLRVINEVEEVTKNNTRLQLIVAVGYSGKYDVLQACRGIARRVKDGEIEVEEIDERLIEEELETNCTEFPYPDLLIRTSGELRVSNFLLWQLAYTELFFAQELWPDFGRSGFIEALMSFQQRQRRFGGRKS

SEQ ID NO: 90649 - protein, 234 aa, Arabidopsis thaliana
  peptide (1)..(234): Ceres Seq. ID no. 12724648
MPKHVAIIMDGNGRWAKNRGLQPWDGHRAGVEALKEIVELCGKWGIQVLTVFAFSTDNWIRPRIEIDFLFSLFERSLKTEFQNLAKNNVRISIIGDSSKLPKSLLRVINEVEEVTKNNTRLQLIVAVGYSGKYDVLQACRGIARRVKDGEIEVEEIDERLIEEELETNCTEFPYPDLLIRTSGELRVSNFLLWQLAYTELFFAQELWPDFGRSGFIEALMSFQQRQRRFGGRKS

SEQ ID NO: 90650 - protein, 226 aa, Arabidopsis thaliana
  peptide (1)..(226): Ceres Seq. ID no. 12724649
MDGNGRWAKNRGLQPWDGHRAGVEALKEIVELCGKWGIQVLTVFAFSTDNWIRPRIEIDFLFSLFERSLKTEFQNLAKNNVRISIIGDSSKLPKSLLRVINEVEEVTKNNTRLQLIVAVGYSGKYDVLQACRGIARRVKDGEIEVEEIDERLIEEELETNCTEFPYPDLLIRTSGELRVSNFLLWQLAYTELFFAQELWPDFGRSGFIEALMSFQQRQRRFGGRKS

SEQ ID NO: 90651 - DNA, 735 bp, Arabidopsis thaliana
  misc_feature (1)..(735): Ceres Seq. ID no. 12724654
  misc_feature (1)..(735): Ortholog of  Ceres SEQ ID NO 15180793 as cited in SEQ ID NO 0
atgggagagaaacagaaacgagggagaaatataatgccaaagcatgtggcggttatattggacggaaacagacgttgggctgaaaaacgaggactcgggacatcggaaggccacgaggccggagcgagaaggctcatggagaatgctaaggattgtttcgctatggggacaaacactatctcactctttgctttctccaccgaaaattgggaaagaccagaggatgaagttaagtgcttgatggccttgtttgagaaatacttagcgtctgatatgccttacctccgaagtgataagatcaagatctcggttatcgggaaccgtacaaaactccccgagtcgcttctaggtttgatagaagaggtagaggaagctacaaagagttacgaagggaagaatctcattatagcaatagactatagtggaagatatgatatcttacaagcatgcaaaagtcttgcaaataaagtgaaagacgggctgattcaagtggaggacattaacgagaaggcgatggagaaagagttgttgacaaagtgtagcgaattcccaaaccctgacctgttgatcagaacaagcggagagcaaaggatcagtaacttctttttatggcaatctgcttacactgagctttactttccaactgttttgtggcctgattttggcgaagctgagtatcttgaggccttgacttggtatcagcaaaggcagaggcgattcggtcgacgagtttaa

SEQ ID NO: 90652 - protein, 244 aa, Arabidopsis thaliana; identical to SEQ ID NO: 69923
  peptide (1)..(244): Ceres Seq. ID no. 12724655

SEQ ID NO: 90653 - protein, 233 aa, Arabidopsis thaliana; identical to SEQ ID NO: 69924
  peptide (1)..(233): Ceres Seq. ID no. 12724656

SEQ ID NO: 90654 - protein, 199 aa, Arabidopsis thaliana
  peptide (1)..(199): Ceres Seq. ID no. 12724657
MENAKDCFAMGTNTISLFAFSTENWERPEDEVKCLMALFEKYLASDMPYLRSDKIKISVIGNRTKLPESLLGLIEEVEEATKSYEGKNLIIAIDYSGRYDILQACKSLANKVKDGLIQVEDINEKAMEKELLTKCSEFPNPDLLIRTSGEQRISNFFLWQSAYTELYFPTVLWPDFGEAEYLEALTWYQQRQRRFGRRV

SEQ ID NO: 90655 - DNA, 561 bp, Arabidopsis thaliana
  misc_feature (1)..(561): Ceres Seq. ID no. 12724705
  misc_feature (1)..(561): Ortholog of  Ceres SEQ ID NO 14314792 as cited in SEQ ID NO 56837
atggtgttatcaacgagcgatacgagtagctcttacaactatgttatcgatgacgttatcaacaagtctcgatgcgatcttgtctacaatggagaacttgatgagagtgttcttagccaaattcaatcgatgtggaaaacgaagatgatacaagcaggagccatgagcggaacaatcgaaacatcttctgcttcgattcccaccacacctgtgatagtgcagacgactcttcagactccggatgcaattcctttacctgagaagaagatgtctccaaagaaagagagtgatggattttattatattcctcagcaagatggagcgagagatgaagctattgtcgatgtagatgagaatgaagagcctttgaacgaggatgatgatgatgaggaagatgatatcgatgatgatgatatgaacattcaacatttggtcatgtgtcaatttgataaggtgaagcgttccaagaacaagtgggagtgcaaattcaatgcgggtgttatgcaaataaacggcaaaaatgttcttttctcacaggcaacaggagatttcaacttctag

SEQ ID NO: 90656 - protein, 186 aa, Arabidopsis thaliana
  peptide (1)..(186): Ceres Seq. ID no. 12724706
MVLSTSDTSSSYNYVIDDVINKSRCDLVYNGELDESVLSQIQSMWKTKMIQAGAMSGTIETSSASIPTTPVIVQTTLQTPDAIPLPEKKMSPKKESDGFYYIPQQDGARDEAIVDVDENEEPLNEDDDDEEDDIDDDDMNIQHLVMCQFDKVKRSKNKWECKFNAGVMQINGKNVLFSQATGDFNF

SEQ ID NO: 90657 - protein, 143 aa, Arabidopsis thaliana
  peptide (1)..(143): Ceres Seq. ID no. 12724707
MWKTKMIQAGAMSGTIETSSASIPTTPVIVQTTLQTPDAIPLPEKKMSPKKESDGFYYIPQQDGARDEAIVDVDENEEPLNEDDDDEEDDIDDDDMNIQHLVMCQFDKVKRSKNKWECKFNAGVMQINGKNVLFSQATGDFNF

SEQ ID NO: 90658 - protein, 138 aa, Arabidopsis thaliana
  peptide (1)..(138): Ceres Seq. ID no. 12724708
MIQAGAMSGTIETSSASIPTTPVIVQTTLQTPDAIPLPEKKMSPKKESDGFYYIPQQDGARDEAIVDVDENEEPLNEDDDDEEDDIDDDDMNIQHLVMCQFDKVKRSKNKWECKFNAGVMQINGKNVLFSQATGDFNF

SEQ ID NO: 90659 - DNA, 2025 bp, Arabidopsis thaliana
  misc_feature (1)..(2025): Ceres Seq. ID no. 12724712
  misc_feature (1)..(2025): Ortholog of  Ceres SEQ ID NO 13655640 as cited in SEQ ID NO 63844
atggctggagttctaggatcagtggttttctggttgataattggtatccatgtaacctttttggtgttcgctcaagagggagatcattttgtgtattatgactttaggaatgcagatctggaactcgatggaatggcaaatacaaaccatggtccattgcatctaacaaataatacaaacacgggcaccggtcacgctttctacaacattcccatcaagttcacagcgtcttcactcagttcattttccttctcaacagaatttgtctttgcaatcttcccgctgcaaaaatctacctacggtcacggaatggcatttgtggtatctccaaccaaagatctcaggtctaacggcagtgcaaattcaaatttaggtattttcaatagagcaaatgataacaagactgcaacccatatctttgctgtagaacttgacactaatcaaaactcggagtcatttgacaaaggtggtaacgatgtgggtattgatattaacagtatagtttcagttgaatctgcggacgctagttactttaatgctagaaaaggaaagaatataagtctgccgcttgctagtggtaaaagtattctggtctggatagattatgatggaatagagaaagtactcaacgtaacgttagctccagtacaaactccaaagcccgattcgccttacttttcaagcttcattaaaccaaaagtgccactcttgtcaagatccatcaacctttcagaaattttcactgagacgatgtatgtaggtttttctggttctacaggctcaatcaaaagtaaccagtatatccttggatggagtttcaagcaaggcggaaaagcggaaagccttgacatttcaagactttcgaatccaccaccatcgcctaaaaggtttccattaaaagaggttctaggcgctaccatatcaacaattgcttttctaactctgggaggaattgtgtatctttacaagaaaaagaagtatgcagaggtgcttgaacaatgggaaaaggaatatagccctcaaaggtactcctttaggatcctttacaaagcaaccaaaggtttcagggagaatcagttacttggagcaggaggttttggaaaagtctataaaggaatacttccttctggtacacaaatcgcggttaagagagtctaccatgatgcagagcaaggaatgaaacagtatgtggcagagattgctagtatgggaaggctaaggcacaagaacttagttcatctccttggttactgcagaaggaaaggtgaattgcttttggtctatgattacatgccaaatggaagccttgatgactatttgttccataaaaacaagctaaaagacctcacttggtctcagagagtcaatataatcaagggagttgcctctgcccttctgtatcttcatgaagaatgggaacaagttgtactacatcgagatataaaagctagcaacattcttttagatgcggatctaaatggaaagttgggagactttgggttagccaggttccatgatcgtggtgtgaatctcgaagccacacgggtagtaggtaccattggctacatggcaccagagcttactgcaatgggagtcaccactacttgtaccgatgtctatgcttttggagcttttatccttgaagtggtatgtggaaggagaccagtagacccagatgcaccacgtgagcaggtgattttggttaagtgggttgcgagctgcgggaaaagagatgctttaactgatactgttgacagcaaactaatagactttaaagttgaggaggccaagcttcttttgaagctaggaatgctctgttcacagatcaacccagaaaacagacccagtatgagacagatattacaatatctggaaggaaatgtaagtgttccagctatatcgtttggtactgttgcacttggtatacccaatataagccatgaaacagtaacacaaatgacaacaacctcttcatcagctaatttctcatttgaggatgttacagtcctatttggtggtcgctag

SEQ ID NO: 90660 - protein, 674 aa, Arabidopsis thaliana
  peptide (1)..(674): Ceres Seq. ID no. 12724713
MAGVLGSVVFWLIIGIHVTFLVFAQEGDHFVYYDFRNADLELDGMANTNHGPLHLTNNTNTGTGHAFYNIPIKFTASSLSSFSFSTEFVFAIFPLQKSTYGHGMAFVVSPTKDLRSNGSANSNLGIFNRANDNKTATHIFAVELDTNQNSESFDKGGNDVGIDINSIVSVESADASYFNARKGKNISLPLASGKSILVWIDYDGIEKVLNVTLAPVQTPKPDSPYFSSFIKPKVPLLSRSINLSEIFTETMYVGFSGSTGSIKSNQYILGWSFKQGGKAESLDISRLSNPPPSPKRFPLKEVLGATISTIAFLTLGGIVYLYKKKKYAEVLEQWEKEYSPQRYSFRILYKATKGFRENQLLGAGGFGKVYKGILPSGTQIAVKRVYHDAEQGMKQYVAEIASMGRLRHKNLVHLLGYCRRKGELLLVYDYMPNGSLDDYLFHKNKLKDLTWSQRVNIIKGVASALLYLHEEWEQVVLHRDIKASNILLDADLNGKLGDFGLARFHDRGVNLEATRVVGTIGYMAPELTAMGVTTTCTDVYAFGAFILEVVCGRRPVDPDAPREQVILVKWVASCGKRDALTDTVDSKLIDFKVEEAKLLLKLGMLCSQINPENRPSMRQILQYLEGNVSVPAISFGTVALGIPNISHETVTQMTTTSSSANFSFEDVTVLFGGR

SEQ ID NO: 90661 - protein, 630 aa, Arabidopsis thaliana
  peptide (1)..(630): Ceres Seq. ID no. 12724714
MANTNHGPLHLTNNTNTGTGHAFYNIPIKFTASSLSSFSFSTEFVFAIFPLQKSTYGHGMAFVVSPTKDLRSNGSANSNLGIFNRANDNKTATHIFAVELDTNQNSESFDKGGNDVGIDINSIVSVESADASYFNARKGKNISLPLASGKSILVWIDYDGIEKVLNVTLAPVQTPKPDSPYFSSFIKPKVPLLSRSINLSEIFTETMYVGFSGSTGSIKSNQYILGWSFKQGGKAESLDISRLSNPPPSPKRFPLKEVLGATISTIAFLTLGGIVYLYKKKKYAEVLEQWEKEYSPQRYSFRILYKATKGFRENQLLGAGGFGKVYKGILPSGTQIAVKRVYHDAEQGMKQYVAEIASMGRLRHKNLVHLLGYCRRKGELLLVYDYMPNGSLDDYLFHKNKLKDLTWSQRVNIIKGVASALLYLHEEWEQVVLHRDIKASNILLDADLNGKLGDFGLARFHDRGVNLEATRVVGTIGYMAPELTAMGVTTTCTDVYAFGAFILEVVCGRRPVDPDAPREQVILVKWVASCGKRDALTDTVDSKLIDFKVEEAKLLLKLGMLCSQINPENRPSMRQILQYLEGNVSVPAISFGTVALGIPNISHETVTQMTTTSSSANFSFEDVTVLFGGR

SEQ ID NO: 90662 - protein, 571 aa, Arabidopsis thaliana
  peptide (1)..(571): Ceres Seq. ID no. 12724715
MAFVVSPTKDLRSNGSANSNLGIFNRANDNKTATHIFAVELDTNQNSESFDKGGNDVGIDINSIVSVESADASYFNARKGKNISLPLASGKSILVWIDYDGIEKVLNVTLAPVQTPKPDSPYFSSFIKPKVPLLSRSINLSEIFTETMYVGFSGSTGSIKSNQYILGWSFKQGGKAESLDISRLSNPPPSPKRFPLKEVLGATISTIAFLTLGGIVYLYKKKKYAEVLEQWEKEYSPQRYSFRILYKATKGFRENQLLGAGGFGKVYKGILPSGTQIAVKRVYHDAEQGMKQYVAEIASMGRLRHKNLVHLLGYCRRKGELLLVYDYMPNGSLDDYLFHKNKLKDLTWSQRVNIIKGVASALLYLHEEWEQVVLHRDIKASNILLDADLNGKLGDFGLARFHDRGVNLEATRVVGTIGYMAPELTAMGVTTTCTDVYAFGAFILEVVCGRRPVDPDAPREQVILVKWVASCGKRDALTDTVDSKLIDFKVEEAKLLLKLGMLCSQINPENRPSMRQILQYLEGNVSVPAISFGTVALGIPNISHETVTQMTTTSSSANFSFEDVTVLFGGR

SEQ ID NO: 90663 - DNA, 801 bp, Arabidopsis thaliana
  misc_feature (1)..(801): Ceres Seq. ID no. 12724740
  misc_feature (1)..(801): Ortholog of  Ceres SEQ ID NO 14316161 as cited in SEQ ID NO 52384
  misc_feature (1)..(801): Ortholog of  Ceres SEQ ID NO 14315249 as cited in SEQ ID NO 52512
  misc_feature (1)..(801): Ortholog of  Ceres SEQ ID NO 15174595 as cited in SEQ ID NO 53460
  misc_feature (1)..(801): Ortholog of  Ceres SEQ ID NO 13503553 as cited in SEQ ID NO 64822
  misc_feature (1)..(801): Ortholog of  Ceres SEQ ID NO 13660155 as cited in SEQ ID NO 67635
atggaatttgtgaacagctctccaccaagatatgaatgtctcctctttgatttggatgatactctttatcctttaagctctggcttatcagatgcatgctccaacaacattatagaatatatggttgaaaagcttggaatagatgaagatggagtcgttgaactaaaccaaattctttataagaaatatggaacttcaatggccggtcttaaggcggtaggttatgaattcgataatgacgagtaccaccggtatgttcatggtagattaccttatgaaaaccttaaaccggacccggttctaaggagtctcctccttggtctacctttgcgaaaattggtattctcgaatggagatgaggttcatgtgatgaaggctctcacaagacttggcatcgaagattgttttgagagaatcataagtttcgagaccttaaaccctgatatcaacgaagctgagctttcttgcgtcacaggtcatcttcccgagaatccggttatttgtaaaccaactgagattgctttcgagaaagccttcgacattgcacagctcaatcctcacaaaaccttgttctttgacgacagtacccggaacatccaaaccgggaaagccgttggtctccatacagtcttggttggtaaatcagagaaaatagatggaagcgattacgcgttagaaagcattcacaacatgaaagaggcattccccgagttatggtcggaatccattatcaacaacaaagaaactgaaagaattgattacgcttcacagatctcgattgaaacttctgttcaagcttaa

SEQ ID NO: 90664 - protein, 266 aa, Arabidopsis thaliana
  peptide (1)..(266): Ceres Seq. ID no. 12724741
MEFVNSSPPRYECLLFDLDDTLYPLSSGLSDACSNNIIEYMVEKLGIDEDGVVELNQILYKKYGTSMAGLKAVGYEFDNDEYHRYVHGRLPYENLKPDPVLRSLLLGLPLRKLVFSNGDEVHVMKALTRLGIEDCFERIISFETLNPDINEAELSCVTGHLPENPVICKPTEIAFEKAFDIAQLNPHKTLFFDDSTRNIQTGKAVGLHTVLVGKSEKIDGSDYALESIHNMKEAFPELWSESIINNKETERIDYASQISIETSVQA

SEQ ID NO: 90665 - protein, 226 aa, Arabidopsis thaliana
  peptide (1)..(226): Ceres Seq. ID no. 12724742
MVEKLGIDEDGVVELNQILYKKYGTSMAGLKAVGYEFDNDEYHRYVHGRLPYENLKPDPVLRSLLLGLPLRKLVFSNGDEVHVMKALTRLGIEDCFERIISFETLNPDINEAELSCVTGHLPENPVICKPTEIAFEKAFDIAQLNPHKTLFFDDSTRNIQTGKAVGLHTVLVGKSEKIDGSDYALESIHNMKEAFPELWSESIINNKETERIDYASQISIETSVQA

SEQ ID NO: 90666 - protein, 200 aa, Arabidopsis thaliana
  peptide (1)..(200): Ceres Seq. ID no. 12724743
MAGLKAVGYEFDNDEYHRYVHGRLPYENLKPDPVLRSLLLGLPLRKLVFSNGDEVHVMKALTRLGIEDCFERIISFETLNPDINEAELSCVTGHLPENPVICKPTEIAFEKAFDIAQLNPHKTLFFDDSTRNIQTGKAVGLHTVLVGKSEKIDGSDYALESIHNMKEAFPELWSESIINNKETERIDYASQISIETSVQA

SEQ ID NO: 90667 - DNA, 1095 bp, Arabidopsis thaliana
  misc_feature (1)..(1095): Ceres Seq. ID no. 12724748
  misc_feature (1)..(1095): Ortholog of  Ceres SEQ ID NO 12636774 as cited in SEQ ID NO 372
  misc_feature (1)..(1095): Ortholog of  Ceres SEQ ID NO 12578315 as cited in SEQ ID NO 62451
  misc_feature (1)..(1095): Ortholog of  Ceres SEQ ID NO 12615466 as cited in SEQ ID NO 62761
  misc_feature (1)..(1095): Ortholog of  Ceres SEQ ID NO 13597295 as cited in SEQ ID NO 63743
  misc_feature (1)..(1095): Ortholog of  Ceres SEQ ID NO 12617090 as cited in SEQ ID NO 64005
  misc_feature (1)..(1095): Ortholog of  Ceres SEQ ID NO 13597233 as cited in SEQ ID NO 64370
  misc_feature (1)..(1095): Ortholog of  Ceres SEQ ID NO 13584577 as cited in SEQ ID NO 65298
  misc_feature (1)..(1095): Ortholog of  Ceres SEQ ID NO 13598327 as cited in SEQ ID NO 68040
atggccaaaaactctgtcgaattcgatcgttacatcgagcgcaaagctttcgacaatacaaaagaaggtgttaaagggctcatcgatgctaaaatcaccgagatccctcgaattttccacgtccctcaagataccttaccagacaagaaacgctctgtttcagacctagagatccctaccatcgactttgcaagcgtcaacgtggacacaccctcacgtgaagccatcgtggagaaagtcaaatatgcggtggagaattggggattcttccaggtgattaatcatggtgttcctttaaacgttcttgaagagattaaagatggggttcgtaggtttcacgaggaagaagatcctgaggtcaagaaatcatactactcgcttgatttcaccaagaacaaatttgcatacagtagtaatttcgatctatatagttcttcgccgtctcttacttggagagattctatctcttgttacatggctcctgatcctccaactcctgaggagctccctgagacttgcagggatgctatgattgaatactcaaagcatgtactgagcttaggtgatttgctctttgagcttctctcagaagcactaggtttgaaatctgagatccttaagagcatggattgcttgaagagtttgcttatgatctgccattattatccaccttgtccacaacctgacctaactttaggaataagtaaacactcagacaactctttcctcacagttcttcttcaagacaacattggtggtcttcaaattcttcatcaagactcttgggtcgatgtctctcctcttcctggagctctggtagtcaacgtcggagatttcttgcagctgataaccaacgataagtttataagtgtagagcatagggtactagcgaatacacgaggcccacggatttctgtagcgagctttttcagctcaagtatacgtgagaattcaacagtttatggaccgatgaaagagcttgtgtctgaagaaaaccctccaaaatacagagacacaaccttgagagaatactcagaaggatactttaagaaaggtcttgatggaacatcgcatctgtcaaatttcagaatatga

SEQ ID NO: 90668 - protein, 364 aa, Arabidopsis thaliana
  peptide (1)..(364): Ceres Seq. ID no. 12724749
MAKNSVEFDRYIERKAFDNTKEGVKGLIDAKITEIPRIFHVPQDTLPDKKRSVSDLEIPTIDFASVNVDTPSREAIVEKVKYAVENWGFFQVINHGVPLNVLEEIKDGVRRFHEEEDPEVKKSYYSLDFTKNKFAYSSNFDLYSSSPSLTWRDSISCYMAPDPPTPEELPETCRDAMIEYSKHVLSLGDLLFELLSEALGLKSEILKSMDCLKSLLMICHYYPPCPQPDLTLGISKHSDNSFLTVLLQDNIGGLQILHQDSWVDVSPLPGALVVNVGDFLQLITNDKFISVEHRVLANTRGPRISVASFFSSSIRENSTVYGPMKELVSEENPPKYRDTTLREYSEGYFKKGLDGTSHLSNFRI

SEQ ID NO: 90669 - protein, 206 aa, Arabidopsis thaliana
  peptide (1)..(206): Ceres Seq. ID no. 12724750
MAPDPPTPEELPETCRDAMIEYSKHVLSLGDLLFELLSEALGLKSEILKSMDCLKSLLMICHYYPPCPQPDLTLGISKHSDNSFLTVLLQDNIGGLQILHQDSWVDVSPLPGALVVNVGDFLQLITNDKFISVEHRVLANTRGPRISVASFFSSSIRENSTVYGPMKELVSEENPPKYRDTTLREYSEGYFKKGLDGTSHLSNFRI

SEQ ID NO: 90670 - protein, 188 aa, Arabidopsis thaliana
  peptide (1)..(188): Ceres Seq. ID no. 12724751
MIEYSKHVLSLGDLLFELLSEALGLKSEILKSMDCLKSLLMICHYYPPCPQPDLTLGISKHSDNSFLTVLLQDNIGGLQILHQDSWVDVSPLPGALVVNVGDFLQLITNDKFISVEHRVLANTRGPRISVASFFSSSIRENSTVYGPMKELVSEENPPKYRDTTLREYSEGYFKKGLDGTSHLSNFRI

SEQ ID NO: 90671 - DNA, 1224 bp, Arabidopsis thaliana
  misc_feature (1)..(1224): Ceres Seq. ID no. 12724752
  misc_feature (1)..(1224): Ortholog of  Ceres SEQ ID NO 14303866 as cited in SEQ ID NO 53689
  misc_feature (1)..(1224): Ortholog of  Ceres SEQ ID NO 14315958 as cited in SEQ ID NO 59979
  misc_feature (1)..(1224): Ortholog of  Ceres SEQ ID NO 14303664 as cited in SEQ ID NO 65892
  misc_feature (1)..(1224): Ortholog of  Ceres SEQ ID NO 13597037 as cited in SEQ ID NO 69005
atgccgtcaacgccgacgacgccgactacaacaacgccgatcacggcttcgtattggtgttacagctgtacgcgtttcgtcagcgtttgggctgatcaaggcacaacaaccgtcggtagcgtcgcttgccctcactgcgacggcggttttatcgaacagattaacgattcttcctccgccgctaccgaattaacgattccggcttctactgaagtaagatcgatcaataacaaccgtagatccgtgattagacgccggagatccggtcgtcgtccgtcctttaatccggtcatcgtacttcaaggaggcgccggcgagagagaagagggagaagaaggagatgcggctagagatcgacgcgcttttgagttttattacgatgacggatccggatcgggtcttagaccgcttccggattctgtatctgagatcttgatgggatctggattcgagcggttacttgaacagctaagccaaatcgaagcgtcggctactggaattggtagatctggaaaccctccggcgtctaaatcggcgattgagtctttacctagagtcgaaatctcggattgccacataggctcggaggctaattgcgctgtttgcacggagattttcgagacggagacggaggcgcgtgagatgccgtgtaaacaccttttccacgacgattgcatcgtaccgtggctatcgattcgaaactcttgtcccgtgtgcagattcgagctaccttcagagcctaatcgacggagcaacaacaacgaggaggataacgccgtggggatgacgatttggagacttcccggtggtggattcgccgtagggaggtttaacgcagcaatgagagacggagagagagttttgccagtggtgttaacagaaatggatggtggtgggattggtaatagccaggatggtcctagacggatctcatgggttaggtcacacggtacactcgaatcggatagtaacggtactggctcaggttccggctccggtggaagattgaggaggatggttcgtggaatggtgtcgttaatgaggagagtgagaccaaaccgtagctcttcttcttcatcagctgcgatatcaacttcttctgataatctggatttgaacattgaagtagaatctagggttttggataggtcaaattcagtgatgagaagatacttcagaagaaacagaagtaacagggattcttcgtcttcagttcttcattga

SEQ ID NO: 90672 - protein, 407 aa, Arabidopsis thaliana; identical to SEQ ID NO: 35169
  peptide (1)..(407): Ceres Seq. ID no. 12724753

SEQ ID NO: 90673 - protein, 262 aa, Arabidopsis thaliana; identical to SEQ ID NO: 35170
  peptide (1)..(262): Ceres Seq. ID no. 12724754

SEQ ID NO: 90674 - DNA, 2823 bp, Arabidopsis thaliana
  misc_feature (1)..(2823): Ceres Seq. ID no. 12724764
  misc_feature (1)..(2823): Ortholog of  Ceres SEQ ID NO 13654989 as cited in SEQ ID NO 63117
gccacccgttggtttcttgatttttccttgggagttaagaaaagatggagagttcttttgggcttttgttggcactgttaactttgaccatcattcatattgttcaagctcaagacccacaagggttcatcagtttggattgcgggctacccgcaaatgagacgtctccttatacagagactcaaactggtctgttgttctcttcggacgcaacattcatccagagcggaaaaactggtagagtccaagcaaatcaagagagtaaattcttgaagccatacagaacgctgagatatttcccagagggagtacggaattgctacaatctgagtgtgttcaaggagcgtaaatatttgatcgctgctagttttttatatggaaattacgatggtcataacatagcccctgtgtttgatctttatcttggaccaaatttatgggcgaaaatagatttacaagatgtgaatggtacaggggaagagatcttacacatcccaacatcgaactcgttgcagatatgtcttgttcagactggggaaactacaccgctgatatcctctttggaattacggccaatgagaactggaagctataccactgtgtctggttccctgaaaacatacaggcgtttatattttaaaaagtctggatctaggctacggtacagtaaagatgtttatgatcgctcatggtttccgcgcttcatggacgaatggacccagatttccactgctctcggggtgattaataccaacatctaccaaccaccggaagatgcgctgaaaaatgctgccacgcctactgatgctagtgcgccactgacatttaaatggaattcagaaaaattggatgtccaatattacttttacgcacactatgctgagatccaagacttgcaggcaaatgataccagagaattcaacatcttattgaatggacaaaatttatctgtgactggccctgaagtcccagataagctaagtataaagaccttccaaagctcgtcaccgataagttgcaatggatgggcatgtaattttcagctgataagaaccaaaagatcaactcttccacctctacttaatgctttggaagtctacacagttattcagtttccacggtccgaaacagatgaaagcgacgtggttgctatgaaaaacatctcagccagctatggattgagtagaatcaactggcaaggcgatccatgcttccctcagcagcttaggtgggacgctttagactgcaccaacagaaatatctcccaaccaccaagaatcacttctttaaacttgtcttcaagtcgtttaaatggaaccatagcagctgccattcaaagtattacacaacttgaaacactggacttgtcgtataataacttaactggagaggtgccagagtttcttggcaaaatgaaatcgttgtcggtcataaacttaagcgggaacaatcttaatggttcaattccgcaagctcttcgaaagaaaagactaaaactataccttgaaggaaacccaaggcttataaaaccacctaagaaggaatttcctgtggcaattgttacattagttgtttttgtcacagtcattgtggttctttttcttgttttcagaaagaaaatgtccacgattgtaaaaggtctacgcctgccaccaaggacatcaatggtggatgttacattttctaataaaaaaagcaaaaggttcacatattcagaggtcgtccaagtgacaaagaacttccaaagagttttaggtaaaggagggttcggcatggtctatcacggtactgtaaagggttctgaacaggtggccgttaaggttctctctcaatcgtcaactcaaggctctaaggagttcaaagcagaggttgatctccttctgagagtgcaccatacaaatttggtgagcctggttgggtattgctgtgaaggagattacttggccctcgtctatgagtttcttcccaatggagacttaaaacaacatttgtcaggaaaaggaggtaattccatcatcaactggagtattcgactgcgaatagctttggaagcagcactaggtttggagtacttgcatattggatgcacaccaccgatggttcatagagatgtcaaaactgccaacatattgctcgacgagaattttaaggccaaactcgctgattttggtctttcaagatctttccaaggtgaaggcgaatctcaggaatcgacaacaattgctggtactcttggataccttgatcccgaatgttaccattcaggtcgattgggtgagaagagtgatgtctacagtttcgggatcgtgttattggagatgatcacaaaccaaccagtgatcaatcaaacctcgggagattctcacataacacaatgggttggctttcagatgaaccgaggtgatattcttgagattatggatccaaaccttcgcaaggattataacattaattctgcctggagagctttggaactggcaatgtcatgcgcgtatccttcttcctcaaaacgaccatccatgtctcaggttatacacgagctgaaagagtgtattgcgtgtgaaaacacagggataagtaagaatcgaagcttggaatatcaagaaatgaacgttagcttggacactacggcggttcccatggcaagatagttctgaatgttttctactaataaggaatcaatactcaactagttacacatttagcaagatttgtaaacttgttaaagtaatgattgaagtgtgtaattgtgtatacgtcttgtagataaactcgaagtcgacaaatttccttctgcgttcattgattattaatatattcaga

SEQ ID NO: 90675 - protein, 868 aa, Arabidopsis thaliana
  peptide (1)..(868): Ceres Seq. ID no. 12724765
MESSFGLLLALLTLTIIHIVQAQDPQGFISLDCGLPANETSPYTETQTGLLFSSDATFIQSGKTGRVQANQESKFLKPYRTLRYFPEGVRNCYNLSVFKERKYLIAASFLYGNYDGHNIAPVFDLYLGPNLWAKIDLQDVNGTGEEILHIPTSNSLQICLVQTGETTPLISSLELRPMRTGSYTTVSGSLKTYRRLYFKKSGSRLRYSKDVYDRSWFPRFMDEWTQISTALGVINTNIYQPPEDALKNAATPTDASAPLTFKWNSEKLDVQYYFYAHYAEIQDLQANDTREFNILLNGQNLSVTGPEVPDKLSIKTFQSSSPISCNGWACNFQLIRTKRSTLPPLLNALEVYTVIQFPRSETDESDVVAMKNISASYGLSRINWQGDPCFPQQLRWDALDCTNRNISQPPRITSLNLSSSRLNGTIAAAIQSITQLETLDLSYNNLTGEVPEFLGKMKSLSVINLSGNNLNGSIPQALRKKRLKLYLEGNPRLIKPPKKEFPVAIVTLVVFVTVIVVLFLVFRKKMSTIVKGLRLPPRTSMVDVTFSNKKSKRFTYSEVVQVTKNFQRVLGKGGFGMVYHGTVKGSEQVAVKVLSQSSTQGSKEFKAEVDLLLRVHHTNLVSLVGYCCEGDYLALVYEFLPNGDLKQHLSGKGGNSIINWSIRLRIALEAALGLEYLHIGCTPPMVHRDVKTANILLDENFKAKLADFGLSRSFQGEGESQESTTIAGTLGYLDPECYHSGRLGEKSDVYSFGIVLLEMITNQPVINQTSGDSHITQWVGFQMNRGDILEIMDPNLRKDYNINSAWRALELAMSCAYPSSSKRPSMSQVIHELKECIACENTGISKNRSLEYQEMNVSLDTTAVPMAR

SEQ ID NO: 90676 - protein, 691 aa, Arabidopsis thaliana
  peptide (1)..(691): Ceres Seq. ID no. 12724766
MRTGSYTTVSGSLKTYRRLYFKKSGSRLRYSKDVYDRSWFPRFMDEWTQISTALGVINTNIYQPPEDALKNAATPTDASAPLTFKWNSEKLDVQYYFYAHYAEIQDLQANDTREFNILLNGQNLSVTGPEVPDKLSIKTFQSSSPISCNGWACNFQLIRTKRSTLPPLLNALEVYTVIQFPRSETDESDVVAMKNISASYGLSRINWQGDPCFPQQLRWDALDCTNRNISQPPRITSLNLSSSRLNGTIAAAIQSITQLETLDLSYNNLTGEVPEFLGKMKSLSVINLSGNNLNGSIPQALRKKRLKLYLEGNPRLIKPPKKEFPVAIVTLVVFVTVIVVLFLVFRKKMSTIVKGLRLPPRTSMVDVTFSNKKSKRFTYSEVVQVTKNFQRVLGKGGFGMVYHGTVKGSEQVAVKVLSQSSTQGSKEFKAEVDLLLRVHHTNLVSLVGYCCEGDYLALVYEFLPNGDLKQHLSGKGGNSIINWSIRLRIALEAALGLEYLHIGCTPPMVHRDVKTANILLDENFKAKLADFGLSRSFQGEGESQESTTIAGTLGYLDPECYHSGRLGEKSDVYSFGIVLLEMITNQPVINQTSGDSHITQWVGFQMNRGDILEIMDPNLRKDYNINSAWRALELAMSCAYPSSSKRPSMSQVIHELKECIACENTGISKNRSLEYQEMNVSLDTTAVPMAR

SEQ ID NO: 90677 - protein, 648 aa, Arabidopsis thaliana
  peptide (1)..(648): Ceres Seq. ID no. 12724767
MDEWTQISTALGVINTNIYQPPEDALKNAATPTDASAPLTFKWNSEKLDVQYYFYAHYAEIQDLQANDTREFNILLNGQNLSVTGPEVPDKLSIKTFQSSSPISCNGWACNFQLIRTKRSTLPPLLNALEVYTVIQFPRSETDESDVVAMKNISASYGLSRINWQGDPCFPQQLRWDALDCTNRNISQPPRITSLNLSSSRLNGTIAAAIQSITQLETLDLSYNNLTGEVPEFLGKMKSLSVINLSGNNLNGSIPQALRKKRLKLYLEGNPRLIKPPKKEFPVAIVTLVVFVTVIVVLFLVFRKKMSTIVKGLRLPPRTSMVDVTFSNKKSKRFTYSEVVQVTKNFQRVLGKGGFGMVYHGTVKGSEQVAVKVLSQSSTQGSKEFKAEVDLLLRVHHTNLVSLVGYCCEGDYLALVYEFLPNGDLKQHLSGKGGNSIINWSIRLRIALEAALGLEYLHIGCTPPMVHRDVKTANILLDENFKAKLADFGLSRSFQGEGESQESTTIAGTLGYLDPECYHSGRLGEKSDVYSFGIVLLEMITNQPVINQTSGDSHITQWVGFQMNRGDILEIMDPNLRKDYNINSAWRALELAMSCAYPSSSKRPSMSQVIHELKECIACENTGISKNRSLEYQEMNVSLDTTAVPMAR

SEQ ID NO: 90678 - DNA, 1323 bp, Arabidopsis thaliana
  misc_feature (1)..(1323): Ceres Seq. ID no. 12724802
  misc_feature (1)..(1323): Ortholog of  Ceres SEQ ID NO 15170911 as cited in SEQ ID NO 55290
cccaaagcaaaaacaaattacatcattcaattcaattctcaatgcctcttcttctccctacctcttccttcaaaacgacggccaccgtcgtaatcgccggcgtttcatctattgccacggcgatgattctcacggtcccttccgtttcccatttcgtagtctcttgctttccgattatttacgataacaccgtcttcctcttaaaaccaccgtatctttacttagtcatcaactctatcatcgtctgcatcatcgctacttctaaactcactcataaatcgtcctccgtcgatgactctgagatctcggaagtagtgactccaataccgataccggtaccggttcatttaccttctgatatcgattccggttatttaaacgtggttcatgtggtttctgattataccggatttgttgagaaaatcgatgacgtgtcgattaatccaacggtggaggctatccggaagtttccagaagttcaggaggcggagaagtcgaaagagagtagcgattcgccggaaccggagacggagaagccaaaattgaagaatgattcgccggagatttcgattctgaagcacagtacgagaaaaccgccgcgatttaatcagcaaaaatctcttaaatctaattcagaaggtggaaataaaaagacggcgttgggagtgacgaagccaccgaggagacaagacacgctggagacgacgtggaagaagataacggaaggacgttcaacgccgttaactaagcacttgactaaatccgacacgtggcaagaaagagctcacgtgcaaagctcaccagaaaataaggagaagatgaccaagtccgagaatttaaaggacataaatacccccacggaggagaagacggtgttgaaacgcgagccgtcgccgggacaggaggagttgaatcggcgcgttgaagcgtttataaagaagtttaacgaagagatgagattgcaaagattagaatctttggctaaatacaatgaaatggtaaatggagggactcgtttgtaaattttcgtggtttttgcttaggcgtcggtgaaggagaaaaatgacggcacagtcgcaaaagttgacttgactcttttttacaaccacttaaaagagtttttttttccttcttccggggaacaaaatttcaaaataatgcaaaaattgtgtttatgattgttatgtttcttttggggtcgagacgttaatcgtgtggttacaagtgaaggattatatgttaacagtagtgagtagtgactagtgttcgaatctgttttcttttgtaattttacattataaacaatattatttatttactatt

SEQ ID NO: 90679 - protein, 339 aa, Arabidopsis thaliana
  peptide (1)..(339): Ceres Seq. ID no. 12724803
QSKNKLHHSIQFSMPLLLPTSSFKTTATVVIAGVSSIATAMILTVPSVSHFVVSCFPIIYDNTVFLLKPPYLYLVINSIIVCIIATSKLTHKSSSVDDSEISEVVTPIPIPVPVHLPSDIDSGYLNVVHVVSDYTGFVEKIDDVSINPTVEAIRKFPEVQEAEKSKESSDSPEPETEKPKLKNDSPEISILKHSTRKPPRFNQQKSLKSNSEGGNKKTALGVTKPPRRQDTLETTWKKITEGRSTPLTKHLTKSDTWQERAHVQSSPENKEKMTKSENLKDINTPTEEKTVLKREPSPGQEELNRRVEAFIKKFNEEMRLQRLESLAKYNEMVNGGTRL

SEQ ID NO: 90680 - protein, 326 aa, Arabidopsis thaliana
  peptide (1)..(326): Ceres Seq. ID no. 12724804
MPLLLPTSSFKTTATVVIAGVSSIATAMILTVPSVSHFVVSCFPIIYDNTVFLLKPPYLYLVINSIIVCIIATSKLTHKSSSVDDSEISEVVTPIPIPVPVHLPSDIDSGYLNVVHVVSDYTGFVEKIDDVSINPTVEAIRKFPEVQEAEKSKESSDSPEPETEKPKLKNDSPEISILKHSTRKPPRFNQQKSLKSNSEGGNKKTALGVTKPPRRQDTLETTWKKITEGRSTPLTKHLTKSDTWQERAHVQSSPENKEKMTKSENLKDINTPTEEKTVLKREPSPGQEELNRRVEAFIKKFNEEMRLQRLESLAKYNEMVNGGTRL

SEQ ID NO: 90681 - protein, 299 aa, Arabidopsis thaliana
  peptide (1)..(299): Ceres Seq. ID no. 12724805
MILTVPSVSHFVVSCFPIIYDNTVFLLKPPYLYLVINSIIVCIIATSKLTHKSSSVDDSEISEVVTPIPIPVPVHLPSDIDSGYLNVVHVVSDYTGFVEKIDDVSINPTVEAIRKFPEVQEAEKSKESSDSPEPETEKPKLKNDSPEISILKHSTRKPPRFNQQKSLKSNSEGGNKKTALGVTKPPRRQDTLETTWKKITEGRSTPLTKHLTKSDTWQERAHVQSSPENKEKMTKSENLKDINTPTEEKTVLKREPSPGQEELNRRVEAFIKKFNEEMRLQRLESLAKYNEMVNGGTRL

SEQ ID NO: 90682 - DNA, 879 bp, Arabidopsis thaliana
  misc_feature (1)..(879): Ceres Seq. ID no. 12724820
  misc_feature (1)..(879): Ortholog of  Ceres SEQ ID NO 15179955 as cited in SEQ ID NO 0
atggggaagacaacgaatggaacaagagactgggctcagatctacgcaatctacgggatcgagcaaaaacacacactcatcttcctgatactcaacgcgattgctttctctatactctccaccgtctttgtcatctactttaacccgatctgcgtcttctttcaatcgtttctcttctctaacgccgcggcagctagattctcggctggattctttggagctgttacggcgctttccgccgtgtgtttgtttttcgcggcggcgaattttttttactctgctgtgccgcttaggtatgagatggcgcagaggatggttggatctgttggagattggtcgagtgtgaagaccgctcttgacttaggttgtggtcgtgggattttgcttaatgccgttgcgacgcagctcaagaaaactggtagctcgggtcgggtcgttgggttggatcggtccatgactactactctctctactctacgtacagctcacatcgaaggagtacaagagtacgtgacatgccgtgaaggagacgtaagaaggcttccgtttagtgataactactttgacgtggtggtttctgcagtgtttctccataccattgggaaagaatacggtcagaagacggtggaggcggcggcagagaggatgagagtacttggagaagcggtgagagtgttgaaaccaggaggagttggagtggtttgggacttagtgcacgtgccggagtatgtgcggcggttacaggagctgaggatggaggagattagagtttcgaaacgagtcactgcgtttatggttaagagccatatggtctcgtttaagaaacctagtcagcattttgtgggatctggtgaagtacgtttagattggagatgttaa

SEQ ID NO: 90683 - protein, 292 aa, Arabidopsis thaliana
  peptide (1)..(292): Ceres Seq. ID no. 12724821
MGKTTNGTRDWAQIYAIYGIEQKHTLIFLILNAIAFSILSTVFVIYFNPICVFFQSFLFSNAAAARFSAGFFGAVTALSAVCLFFAAANFFYSAVPLRYEMAQRMVGSVGDWSSVKTALDLGCGRGILLNAVATQLKKTGSSGRVVGLDRSMTTTLSTLRTAHIEGVQEYVTCREGDVRRLPFSDNYFDVVVSAVFLHTIGKEYGQKTVEAAAERMRVLGEAVRVLKPGGVGVVWDLVHVPEYVRRLQELRMEEIRVSKRVTAFMVKSHMVSFKKPSQHFVGSGEVRLDWRC

SEQ ID NO: 90684 - protein, 192 aa, Arabidopsis thaliana
  peptide (1)..(192): Ceres Seq. ID no. 12724822
MAQRMVGSVGDWSSVKTALDLGCGRGILLNAVATQLKKTGSSGRVVGLDRSMTTTLSTLRTAHIEGVQEYVTCREGDVRRLPFSDNYFDVVVSAVFLHTIGKEYGQKTVEAAAERMRVLGEAVRVLKPGGVGVVWDLVHVPEYVRRLQELRMEEIRVSKRVTAFMVKSHMVSFKKPSQHFVGSGEVRLDWRC

SEQ ID NO: 90685 - protein, 188 aa, Arabidopsis thaliana
  peptide (1)..(188): Ceres Seq. ID no. 12724823
MVGSVGDWSSVKTALDLGCGRGILLNAVATQLKKTGSSGRVVGLDRSMTTTLSTLRTAHIEGVQEYVTCREGDVRRLPFSDNYFDVVVSAVFLHTIGKEYGQKTVEAAAERMRVLGEAVRVLKPGGVGVVWDLVHVPEYVRRLQELRMEEIRVSKRVTAFMVKSHMVSFKKPSQHFVGSGEVRLDWRC

SEQ ID NO: 90686 - DNA, 1572 bp, Arabidopsis thaliana
  misc_feature (1)..(1572): Ceres Seq. ID no. 12724855
  misc_feature (1)..(1572): Ortholog of  Ceres SEQ ID NO 13648040 as cited in SEQ ID NO 189
  misc_feature (1)..(1572): Ortholog of  Ceres SEQ ID NO 13600220 as cited in SEQ ID NO 0
atggaatctttaatgagactcgtcttagttctgtttccgttcttcgtcgtcttcttcgtacctcttgatcacgtttcttcagaatctatcagcagagcaaattttccagatggatttgtattcggaacagcttcttcagcttaccagttcgaaggagctgtgaaagaaggaaacaaaggagaaagcatatgggacactttcacgaaggagaaaccaggaaagatactggatttcagcaatgcggatactacggttgatcaatatcataggtttcacaatgacatagacctgatgaaagatctgagaatggatgcttacagattctctatatcttggtcaagaatattccctaatggaacaggggaagtaaacccagatggagttaagtactataacagcctaatagatgctcttttagccaaaggaatcaaaccttatgtgacattgtatcactgggatctcccacaagccttagaagacagatatgaaggatggctaagcagagaagtggtggatgattttgagcattatgcattcacctgtttcaaagcatttggagatagagtgaagtactggatcactttcaatgagcctcatggggtatcgatccaaggctatgacacagggatacaagctccaggaaggtgctcacttctgggacattggttctgtaagaaggggaagtcatcggtcgaaccgtatattgtagctcataacattctgttgtctcatgctgctgcttaccatacctaccaaagaaactttaaggagaaacaacgtggtcaaatcgggatatcattagatgcaaaatggtatgagccaatgtctgattgtgatgaggacaaagatgcagctcgtagagcaatggattttgggcttggatggtttatggatcctctaatcaatggagactatccagcttcaatgaagagtctagtggaagagagactacctaagataacaccagagatgtataaaaccataaaaggggcatttgattacgtgggaatcaaccactacaccacattatacgcgaggaatgacagaactaggataaggaaactgattctacaagatgcttcttctgattcagccgtgattacaagctggtcaagctggctacacattgtcccatggggaatcaggaaactggcagtgtatgttaaagacatatatggaaacccacctgtattcatcacagaaaacggcatggatgagaaaaacagtccattcatagacatggaaaaagcattaaaagatgacaagaggattggcttccacagagattacctctcaaacttatcagctgccataaggaatgatgaatgcgacgtaagaggatattttgtgtggtcattgctagacaattgggaatggaactcaggatacacggtccggtttgggatctactatgttgactacaagaacaatctcacaaggatacctaaagcttctgctcgatggtttcaaacaatacttagcggctcttcttcaacatcagattccagcaagcttattctactggaagaggcaacagaacaacaacaagagtacaaattccaagagaaatga

SEQ ID NO: 90687 - protein, 523 aa, Arabidopsis thaliana
  peptide (1)..(523): Ceres Seq. ID no. 12724856
MESLMRLVLVLFPFFVVFFVPLDHVSSESISRANFPDGFVFGTASSAYQFEGAVKEGNKGESIWDTFTKEKPGKILDFSNADTTVDQYHRFHNDIDLMKDLRMDAYRFSISWSRIFPNGTGEVNPDGVKYYNSLIDALLAKGIKPYVTLYHWDLPQALEDRYEGWLSREVVDDFEHYAFTCFKAFGDRVKYWITFNEPHGVSIQGYDTGIQAPGRCSLLGHWFCKKGKSSVEPYIVAHNILLSHAAAYHTYQRNFKEKQRGQIGISLDAKWYEPMSDCDEDKDAARRAMDFGLGWFMDPLINGDYPASMKSLVEERLPKITPEMYKTIKGAFDYVGINHYTTLYARNDRTRIRKLILQDASSDSAVITSWSSWLHIVPWGIRKLAVYVKDIYGNPPVFITENGMDEKNSPFIDMEKALKDDKRIGFHRDYLSNLSAAIRNDECDVRGYFVWSLLDNWEWNSGYTVRFGIYYVDYKNNLTRIPKASARWFQTILSGSSSTSDSSKLILLEEATEQQQEYKFQEK

SEQ ID NO: 90688 - protein, 519 aa, Arabidopsis thaliana
  peptide (1)..(519): Ceres Seq. ID no. 12724857
MRLVLVLFPFFVVFFVPLDHVSSESISRANFPDGFVFGTASSAYQFEGAVKEGNKGESIWDTFTKEKPGKILDFSNADTTVDQYHRFHNDIDLMKDLRMDAYRFSISWSRIFPNGTGEVNPDGVKYYNSLIDALLAKGIKPYVTLYHWDLPQALEDRYEGWLSREVVDDFEHYAFTCFKAFGDRVKYWITFNEPHGVSIQGYDTGIQAPGRCSLLGHWFCKKGKSSVEPYIVAHNILLSHAAAYHTYQRNFKEKQRGQIGISLDAKWYEPMSDCDEDKDAARRAMDFGLGWFMDPLINGDYPASMKSLVEERLPKITPEMYKTIKGAFDYVGINHYTTLYARNDRTRIRKLILQDASSDSAVITSWSSWLHIVPWGIRKLAVYVKDIYGNPPVFITENGMDEKNSPFIDMEKALKDDKRIGFHRDYLSNLSAAIRNDECDVRGYFVWSLLDNWEWNSGYTVRFGIYYVDYKNNLTRIPKASARWFQTILSGSSSTSDSSKLILLEEATEQQQEYKFQEK

SEQ ID NO: 90689 - protein, 426 aa, Arabidopsis thaliana
  peptide (1)..(426): Ceres Seq. ID no. 12724858
MKDLRMDAYRFSISWSRIFPNGTGEVNPDGVKYYNSLIDALLAKGIKPYVTLYHWDLPQALEDRYEGWLSREVVDDFEHYAFTCFKAFGDRVKYWITFNEPHGVSIQGYDTGIQAPGRCSLLGHWFCKKGKSSVEPYIVAHNILLSHAAAYHTYQRNFKEKQRGQIGISLDAKWYEPMSDCDEDKDAARRAMDFGLGWFMDPLINGDYPASMKSLVEERLPKITPEMYKTIKGAFDYVGINHYTTLYARNDRTRIRKLILQDASSDSAVITSWSSWLHIVPWGIRKLAVYVKDIYGNPPVFITENGMDEKNSPFIDMEKALKDDKRIGFHRDYLSNLSAAIRNDECDVRGYFVWSLLDNWEWNSGYTVRFGIYYVDYKNNLTRIPKASARWFQTILSGSSSTSDSSKLILLEEATEQQQEYKFQEK

SEQ ID NO: 90690 - DNA, 1721 bp, Arabidopsis thaliana
  misc_feature (1)..(1721): Ceres Seq. ID no. 12724862
  misc_feature (1)..(1721): Ortholog of  Ceres SEQ ID NO 13654989 as cited in SEQ ID NO 63117
  misc_feature (1)..(1721): Ortholog of  Ceres SEQ ID NO 13655640 as cited in SEQ ID NO 63844
  misc_feature (1)..(1721): Ortholog of  Ceres SEQ ID NO 13584744 as cited in SEQ ID NO 69137
actattctttggattcttttctctgtaatcaaagcaaagctctgcaaaaatatttctctccttttctcttcaaaactttccttttttatgattcatctgctaaaatgcaccaattttctataatccttcacatttctccagagacgtctaaagaagcttgaaaccattattagagtatttgacaatggaaggagaatccaaaggattaatcgttgggatctcactaggtttggtgattggtgttgtcttagctatctcagctttgttctgctttaggtatcatagaaaaaagtctcagattgtgaatagtggatcacgaagaagtgcaaccattcccatcagagagaatggagctgattcgtgtaatataatgtcggattcgaccattggtccggattcacctgtgaaatcttctaagaatgggaggtctgtttggcttgaagggtttagtaagaggagtaatgtcatctctgcttctggcattttggaatattcttacagggatttgcagaaagcgacgtgtaatttcacgactttgataggccaaggagcatttggacctgtctacaaagctcaaatgtctactggtgagatcgtggctgtgaaagttctagccactgattctaaacagggcgaaaaagagtttcagacagaggttatgttattgggaaggttgcatcaccgtaacctagtgaacttgattggatactgtgcagagaaaggccaacacatgcttatatatgtttacatgagtaaaggaagcttagcttctcatttatacagcgaaaaacatgaaccgctgagctgggatttgagagtatatattgctttagacgtggcacgtggtctagagtatcttcatgatggggtaagctgcttgctaaaaccattcaccattttaatgcatctcttaaacaacaacttcaaaactcatgttctaatcaattgttccaggctgttcctcctgtaatccacagagatatcaaatcttccaacatcttgctggatcaatctatgagagctcgggttgctgactttggcctctccagagaagaaatggtagacaaacatgcagctaacatcagaggaacatttggctacctcgatcccgaatacatttcaacaagaacattcaccaagaaaagcgatgtctatggcttcggagttttgcttttcgagcttatagcaggaagaaatcctcaacaaggtctaatggaattggttgagctggcggctatgaatgcagaggaaaaagtcggatgggaagagatagtagattcaagattagatgggagatatgatttacaagaagtgaatgaagtagcagcttttgcttacaaatgcatctctcgtgcacctagaaaacgtcctaacatgagggacattgttcaggttttgactcgtgttattaaagtgagacattgcagaaagcggcagaagaattctccgtcgccgtctccacggcttcctcctcctcctccgatagtggaggagtcagaaggtgagttaactgcaaacggatcattacgatcagaaattcatcggagggataattccttggacagtagtatagctgaagacgtgattttgtaaacaaaatgaaaaaaaagtctcaatttttttaattattattaacttttaaaatgtgattttgtttttcaattcttttgggtttttagacgctagattgtctatatttgtgaatgaaaatttgttctttg

SEQ ID NO: 90691 - protein, 261 aa, Arabidopsis thaliana
  peptide (1)..(261): Ceres Seq. ID no. 12724863
MEGESKGLIVGISLGLVIGVVLAISALFCFRYHRKKSQIVNSGSRRSATIPIRENGADSCNIMSDSTIGPDSPVKSSKNGRSVWLEGFSKRSNVISASGILEYSYRDLQKATCNFTTLIGQGAFGPVYKAQMSTGEIVAVKVLATDSKQGEKEFQTEVMLLGRLHHRNLVNLIGYCAEKGQHMLIYVYMSKGSLASHLYSEKHEPLSWDLRVYIALDVARGLEYLHDGVSCLLKPFTILMHLLNNNFKTHVLINCSRLFLL

SEQ ID NO: 90692 - protein, 199 aa, Arabidopsis thaliana
  peptide (1)..(199): Ceres Seq. ID no. 12724864
MSDSTIGPDSPVKSSKNGRSVWLEGFSKRSNVISASGILEYSYRDLQKATCNFTTLIGQGAFGPVYKAQMSTGEIVAVKVLATDSKQGEKEFQTEVMLLGRLHHRNLVNLIGYCAEKGQHMLIYVYMSKGSLASHLYSEKHEPLSWDLRVYIALDVARGLEYLHDGVSCLLKPFTILMHLLNNNFKTHVLINCSRLFLL

SEQ ID NO: 90693 - protein, 192 aa, Arabidopsis thaliana
  peptide (1)..(192): Ceres Seq. ID no. 12724865
MRARVADFGLSREEMVDKHAANIRGTFGYLDPEYISTRTFTKKSDVYGFGVLLFELIAGRNPQQGLMELVELAAMNAEEKVGWEEIVDSRLDGRYDLQEVNEVAAFAYKCISRAPRKRPNMRDIVQVLTRVIKVRHCRKRQKNSPSPSPRLPPPPPIVEESEGELTANGSLRSEIHRRDNSLDSSIAEDVIL

SEQ ID NO: 90694 - DNA, 2794 bp, Arabidopsis thaliana
  misc_feature (1)..(2794): Ceres Seq. ID no. 12724878
  misc_feature (1)..(2794): Ortholog of  Ceres SEQ ID NO 13600310 as cited in SEQ ID NO 5086
gaaacgtgcctccatttctaaaacccaaatccttcttcgtacaaacgacacaatctctcttaaatgccaaaggtcctctttttcgtcttcttccactctctctatacttctctcacaaatctgggcatgttttgaaatccacattcttcattcactgagtttcctttacctcttaaagtttcaatctttagattgagagagaaatttgaagtaatttaaggtaacaagaagagaacaattttgttctgttatggtgggggcgatggcaaacaatggaagaatccggtcagcttttccggtgactaatgggtcaaaagatctgacgccgaacagtgctccggcgagtacaaccggatctgaatatggtcctgttgagttcacaagagaagacgttgaaactcttcttaatgaacgaatcaagtacaagagcaaattcaactacaaggagagatgcgagaatatgatggattatataaaaagacttagactttgcattagatggtttcaagaacttgagttggattatgcttttgagcaagagaagttgaagaacgcattggaattgaatgagaagcattgtgttgacatggaggttagtttgaaaaacaaagaagaggagctgaatatgataattgaagagctgaggaaaaactttgaatctgttcaagttcaacttgccagggaacaaacggagaagttggcggcgaatgattctcttggaaaagagaaagaagcaagactttctgttgaaaaggcacaagctggtctcacagaagagctaggaaaagcacaaggagatcttcaaacggctaaccagaggatacaatccgtgaatgacatgtacaaactgttgcaagagtataactcaagcttgcagctgtataacagcaagctacaaggtgatcttgatgaagctcacgagactataaaacgcggtgagaaagaacggactgccattattgaaaatattggcaacttgaagggtcagttttcagcattacaggaacaacttgctgcttctaaggcttctcaagaagatatcatgaagcagaaaggtgaattggtaaatgaaattgcgagtctcaaggtagagcttcagcaagtcaaagatgaccgtgatcgccatttagtggaagttaaaaccttacaaaccgaggcaaccaagtacaatgacttcaaagacgccataaccgagcttgagactacatgttcgtcccagagtacccagatacgacagttgcaggatcgactagtaaactctgagaggagactgcaggtgtctgatctatctacctttgagaaaatgaatgagtatgaagaccagaagcaaagcattatcgatctgaaaagtcgcgtagaagaagcagaacttaaactcgttgaaggagaaaaactacggaagaagttgcacaataccattcttgaactgaaaggtaacatacgtgtgttctgtagagttagacctctattgccgggtgagaacaatggagatgagggaaaaactatttcttacccgacatccctagaagcacttggccgtggtattgacttgatgcaaaatgcgcaaaagcatgctttcacatttgataaggtttttgcgccgactgcatcacaagaagatgtcttcactgagatttctcaacttgttcaaagtgctctcgatggttacaaggtgtgcatttttgcatatggacaaactggatcgggaaaaacttacaccatgatgggtaggccaggaaacgtcgaggaaaaaggtctgatcccgcgatgtttggagcaaatatttgagacgaggcagtctcttcgatctcagggttggaaatacgaactgcaggtatccatgttagaaatatacaatgaaacgatccgagatctcctgtcaacaaacaaagaagcagtaagaacagacagtggtgtttctccacagaaacatgctattaaacatgatgctagtggaaacacgcatgtcgctgagcttactattttggatgttaaaagctctcgggaggtttcattcctcttagatcatgctgctcgtaacaggtctgtagggaagactcagatgaacgagcaatcttccagaagccattttgttttcacgctaagaatctctggtgttaacgagagcactgagcaacaagtacaaggtgtcttgaacctgattgatcttgcggggagtgagcgtttatcgaagagtggatcaaccggagatagacttaaagaaactcaagcaatcaacaaaagtttgtcgtcgctaggcgatgtcatattcgccttagcaaagaaagaagatcatgtaccattccgaaactcaaagctcacatatcttctccagccttgcttaggcggtgacgcaaagacgctaatgtttgtgaacattgcaccggaatcttcttcaaccggtgagtctctctgctctcttagattcgcagcgagagtgaatgcttgcgagattggaacaccacgtaggcagactaacatcaaaccattggaaaatcggttgagccttggatgagggaaagaaaagagagatggatttgaagtttgaagctaaaagcttcatttcaaagttaattatatgaatgtacttaatatggtcacaacttgatgaagaaggatgggatgattctaacaagaaaacatgaagaccttttgttgtaatttgtatagtttggtttagcattttattatctgttgtttatgtaattctttttcttttggatcataagtaggattttgcttgttgatgttcggattcatattcatcttctgggattcaaaatatttacttctc

SEQ ID NO: 90695 - protein, 754 aa, Arabidopsis thaliana
  peptide (1)..(754): Ceres Seq. ID no. 12724879
MVGAMANNGRIRSAFPVTNGSKDLTPNSAPASTTGSEYGPVEFTREDVETLLNERIKYKSKFNYKERCENMMDYIKRLRLCIRWFQELELDYAFEQEKLKNALELNEKHCVDMEVSLKNKEEELNMIIEELRKNFESVQVQLAREQTEKLAANDSLGKEKEARLSVEKAQAGLTEELGKAQGDLQTANQRIQSVNDMYKLLQEYNSSLQLYNSKLQGDLDEAHETIKRGEKERTAIIENIGNLKGQFSALQEQLAASKASQEDIMKQKGELVNEIASLKVELQQVKDDRDRHLVEVKTLQTEATKYNDFKDAITELETTCSSQSTQIRQLQDRLVNSERRLQVSDLSTFEKMNEYEDQKQSIIDLKSRVEEAELKLVEGEKLRKKLHNTILELKGNIRVFCRVRPLLPGENNGDEGKTISYPTSLEALGRGIDLMQNAQKHAFTFDKVFAPTASQEDVFTEISQLVQSALDGYKVCIFAYGQTGSGKTYTMMGRPGNVEEKGLIPRCLEQIFETRQSLRSQGWKYELQVSMLEIYNETIRDLLSTNKEAVRTDSGVSPQKHAIKHDASGNTHVAELTILDVKSSREVSFLLDHAARNRSVGKTQMNEQSSRSHFVFTLRISGVNESTEQQVQGVLNLIDLAGSERLSKSGSTGDRLKETQAINKSLSSLGDVIFALAKKEDHVPFRNSKLTYLLQPCLGGDAKTLMFVNIAPESSSTGESLCSLRFAARVNACEIGTPRRQTNIKPLENRLSLG

SEQ ID NO: 90696 - protein, 750 aa, Arabidopsis thaliana
  peptide (1)..(750): Ceres Seq. ID no. 12724880
MANNGRIRSAFPVTNGSKDLTPNSAPASTTGSEYGPVEFTREDVETLLNERIKYKSKFNYKERCENMMDYIKRLRLCIRWFQELELDYAFEQEKLKNALELNEKHCVDMEVSLKNKEEELNMIIEELRKNFESVQVQLAREQTEKLAANDSLGKEKEARLSVEKAQAGLTEELGKAQGDLQTANQRIQSVNDMYKLLQEYNSSLQLYNSKLQGDLDEAHETIKRGEKERTAIIENIGNLKGQFSALQEQLAASKASQEDIMKQKGELVNEIASLKVELQQVKDDRDRHLVEVKTLQTEATKYNDFKDAITELETTCSSQSTQIRQLQDRLVNSERRLQVSDLSTFEKMNEYEDQKQSIIDLKSRVEEAELKLVEGEKLRKKLHNTILELKGNIRVFCRVRPLLPGENNGDEGKTISYPTSLEALGRGIDLMQNAQKHAFTFDKVFAPTASQEDVFTEISQLVQSALDGYKVCIFAYGQTGSGKTYTMMGRPGNVEEKGLIPRCLEQIFETRQSLRSQGWKYELQVSMLEIYNETIRDLLSTNKEAVRTDSGVSPQKHAIKHDASGNTHVAELTILDVKSSREVSFLLDHAARNRSVGKTQMNEQSSRSHFVFTLRISGVNESTEQQVQGVLNLIDLAGSERLSKSGSTGDRLKETQAINKSLSSLGDVIFALAKKEDHVPFRNSKLTYLLQPCLGGDAKTLMFVNIAPESSSTGESLCSLRFAARVNACEIGTPRRQTNIKPLENRLSLG

SEQ ID NO: 90697 - protein, 684 aa, Arabidopsis thaliana
  peptide (1)..(684): Ceres Seq. ID no. 12724881
MMDYIKRLRLCIRWFQELELDYAFEQEKLKNALELNEKHCVDMEVSLKNKEEELNMIIEELRKNFESVQVQLAREQTEKLAANDSLGKEKEARLSVEKAQAGLTEELGKAQGDLQTANQRIQSVNDMYKLLQEYNSSLQLYNSKLQGDLDEAHETIKRGEKERTAIIENIGNLKGQFSALQEQLAASKASQEDIMKQKGELVNEIASLKVELQQVKDDRDRHLVEVKTLQTEATKYNDFKDAITELETTCSSQSTQIRQLQDRLVNSERRLQVSDLSTFEKMNEYEDQKQSIIDLKSRVEEAELKLVEGEKLRKKLHNTILELKGNIRVFCRVRPLLPGENNGDEGKTISYPTSLEALGRGIDLMQNAQKHAFTFDKVFAPTASQEDVFTEISQLVQSALDGYKVCIFAYGQTGSGKTYTMMGRPGNVEEKGLIPRCLEQIFETRQSLRSQGWKYELQVSMLEIYNETIRDLLSTNKEAVRTDSGVSPQKHAIKHDASGNTHVAELTILDVKSSREVSFLLDHAARNRSVGKTQMNEQSSRSHFVFTLRISGVNESTEQQVQGVLNLIDLAGSERLSKSGSTGDRLKETQAINKSLSSLGDVIFALAKKEDHVPFRNSKLTYLLQPCLGGDAKTLMFVNIAPESSSTGESLCSLRFAARVNACEIGTPRRQTNIKPLENRLSLG

SEQ ID NO: 90698 - DNA, 1721 bp, Arabidopsis thaliana
  misc_feature (1)..(1721): Ceres Seq. ID no. 12724914
  misc_feature (1)..(1721): Ortholog of  Ceres SEQ ID NO 15225715 as cited in SEQ ID NO 54684
aagattcttctgatgaaccggagaagataagaaacgtgttttgtctaatttcttgcgattaaggatgatacattggttgaagcagctgcgatcggcgtttggcgtcgcgtttctgtggctcgtttgtctcatttacttcactcagggatttagatcgtttgtgtggacagctgtttcgtaccagctcaaagacaggctacagttatcaccatcagcttctcagtttgtcttttcggttgccttttttccatggagcataaaaccattatatggaatcatttcagattgtataccaattggagggaaaaagaggacgccgtatttggtgatatcgactgtgctctctcttgtgccatggctcgtgcttggtctagattcaacctcgagaagttcaagtctctatctgatgattttcttgactgtacaaaatctaggatcagctatggctgatgttgtgattgatgctatgatagctgaggcagtaagacttgaaaaggcttcgtttgctggagatcttcagtctgtatcatggtttgcaatggctgtgggtggagtatgcggtagtttattaggaggctatgcgttatctaacttgaagatagaaacaatattcctccttttcacggtactaccagcgttacaattactatcatgtgctctcgtcgaagaaagtcctgctaacaatgaaccattgcctgagttgttggattcaaacgagtttgaagagaaaagcttgacgagcaatgataactatccagatacgagtaagtccaatacaagaagaaggaaggggcagaagaaaggtaaaaaaggagattccaacggaaagtctgagacacagaagaagcaatcgaagtctttagcttcacagtggttccagtcactaaaagcagccacttttggtttgggccgtgcgtttaagcaaccgatcattttgagacctatggcatggtttttcattgcacatatcactgtgccaaatctctctaccgtcatgttctattaccaaaccgaggtcttgcaattagacgctgctttcctaggaactgcccgtgttgttggttggttaggtctcatgtttggaacctttatctacaatcgctatctgcaagatatgactctacgcaagtctctcctgtttgctcacatcgggctgtctgtaacgatactcctagatatggttctagtatcaagagctaatgtgggctacggagtttcagacaagacaatggtgctcttcggatcagctctaggtgatgccatcaatcaactcaaattcatgccgttcctgatcttgtctggtcgtctatgtccacctgggattgaaggaacactgtttgcgctgtttatgtcgataaacaacctaggaaacacagttggatcgttcatgggagcaggattggcttcacttctgggaatatcgtcagggtcgtttgacaatatgtttatgggcttagccattcaagtgttttgcacttatatacccgttttgtttcttttcttgattcccaaagaagctacaggagtatcagcatcatagggcagagagcaaagagcaaaggtagtttctcatagaacagttttagatcagaatttttggataacttttttggcatcagtttttgactttctttaaacgcttggaattgactacacatcagacagacactcggtggagatttgttatatatactaaatatatactgcctcatttttctctt

SEQ ID NO: 90699 - protein, 491 aa, Arabidopsis thaliana
  peptide (1)..(491): Ceres Seq. ID no. 12724915
MIHWLKQLRSAFGVAFLWLVCLIYFTQGFRSFVWTAVSYQLKDRLQLSPSASQFVFSVAFFPWSIKPLYGIISDCIPIGGKKRTPYLVISTVLSLVPWLVLGLDSTSRSSSLYLMIFLTVQNLGSAMADVVIDAMIAEAVRLEKASFAGDLQSVSWFAMAVGGVCGSLLGGYALSNLKIETIFLLFTVLPALQLLSCALVEESPANNEPLPELLDSNEFEEKSLTSNDNYPDTSKSNTRRRKGQKKGKKGDSNGKSETQKKQSKSLASQWFQSLKAATFGLGRAFKQPIILRPMAWFFIAHITVPNLSTVMFYYQTEVLQLDAAFLGTARVVGWLGLMFGTFIYNRYLQDMTLRKSLLFAHIGLSVTILLDMVLVSRANVGYGVSDKTMVLFGSALGDAINQLKFMPFLILSGRLCPPGIEGTLFALFMSINNLGNTVGSFMGAGLASLLGISSGSFDNMFMGLAIQVFCTYIPVLFLFLIPKEATGVSAS

SEQ ID NO: 90700 - protein, 377 aa, Arabidopsis thaliana
  peptide (1)..(377): Ceres Seq. ID no. 12724916
MIFLTVQNLGSAMADVVIDAMIAEAVRLEKASFAGDLQSVSWFAMAVGGVCGSLLGGYALSNLKIETIFLLFTVLPALQLLSCALVEESPANNEPLPELLDSNEFEEKSLTSNDNYPDTSKSNTRRRKGQKKGKKGDSNGKSETQKKQSKSLASQWFQSLKAATFGLGRAFKQPIILRPMAWFFIAHITVPNLSTVMFYYQTEVLQLDAAFLGTARVVGWLGLMFGTFIYNRYLQDMTLRKSLLFAHIGLSVTILLDMVLVSRANVGYGVSDKTMVLFGSALGDAINQLKFMPFLILSGRLCPPGIEGTLFALFMSINNLGNTVGSFMGAGLASLLGISSGSFDNMFMGLAIQVFCTYIPVLFLFLIPKEATGVSAS

SEQ ID NO: 90701 - protein, 365 aa, Arabidopsis thaliana
  peptide (1)..(365): Ceres Seq. ID no. 12724917
MADVVIDAMIAEAVRLEKASFAGDLQSVSWFAMAVGGVCGSLLGGYALSNLKIETIFLLFTVLPALQLLSCALVEESPANNEPLPELLDSNEFEEKSLTSNDNYPDTSKSNTRRRKGQKKGKKGDSNGKSETQKKQSKSLASQWFQSLKAATFGLGRAFKQPIILRPMAWFFIAHITVPNLSTVMFYYQTEVLQLDAAFLGTARVVGWLGLMFGTFIYNRYLQDMTLRKSLLFAHIGLSVTILLDMVLVSRANVGYGVSDKTMVLFGSALGDAINQLKFMPFLILSGRLCPPGIEGTLFALFMSINNLGNTVGSFMGAGLASLLGISSGSFDNMFMGLAIQVFCTYIPVLFLFLIPKEATGVSAS

SEQ ID NO: 90702 - DNA, 1305 bp, Arabidopsis thaliana
  misc_feature (1)..(1305): Ceres Seq. ID no. 12724930
  misc_feature (1)..(1305): Ortholog of  Ceres SEQ ID NO 12364737 as cited in SEQ ID NO 51089
  misc_feature (1)..(1305): Ortholog of  Ceres SEQ ID NO 14306553 as cited in SEQ ID NO 53121
  misc_feature (1)..(1305): Ortholog of  Ceres SEQ ID NO 13582301 as cited in SEQ ID NO 56509
  misc_feature (1)..(1305): Ortholog of  Ceres SEQ ID NO 13595567 as cited in SEQ ID NO 56760
  misc_feature (1)..(1305): Ortholog of  Ceres SEQ ID NO 13655302 as cited in SEQ ID NO 63307
  misc_feature (1)..(1305): Ortholog of  Ceres SEQ ID NO 13597380 as cited in SEQ ID NO 64054
  misc_feature (1)..(1305): Ortholog of  Ceres SEQ ID NO 12625474 as cited in SEQ ID NO 64169
  misc_feature (1)..(1305): Ortholog of  Ceres SEQ ID NO 13597502 as cited in SEQ ID NO 64681
aagagcctcggagcattcgaaaagttcgccggaaaaacaaaaacatgccgacgaacaacactccgttcctcactatttttctcctctttcttggtttactccggttcgattcatttcccggtttagaagctgcaaccgggaaattagcttcgattccaggattatacgtgttcggagattcgttagttgatgccggcaacaataattacttaccaatttcaatatctaaagctaattatccacataacggcgtcgattttccgaacaagaaacctaccggaagattctgtaacggcaagaacgccgccgatgctatcgctgagaaatttggtttaccgttaccacctccctatctctcacttagaggcttactaaaaagggagaagagaaaatctgccgccgtgactggtgtgaattttgcttccggtggagccggaatcttcaacagttccgaccaaaaacttggacaagctattcctttatccaagcaagtcaacaattggctctctattcatgaagaagtcatgaaacttgaaccatccgcagcacagcttcacctatccaaatctctattcactgttgtcataggaagtaacgatcttttcgattactttggatcgttcaaactccgacgccagagcaatcctcaacaatatacacaattaatggctgataaactcaaagagcaattgaagagaattcacgatagtggagcgcgtagattccttatcatcggggtagcacaaattggttgcacaccgggaaaaagagcgaagaactcgacactccatgaatgtgacgaaggggcaaacatgtggtgctctttgtacaacgaagctctagtaaagatgctgcaacaactcaaacaagaattacaaggctcaataacttacacttactttgataactacaagtccttacatgacattatttccaaccctgcccgttacggttttgctgacgttacatctgcgtgttgtggaaatggggaattgaacgcagaccttccttgtctgcctttggcgaagttatgttcagacagaaccaaacatcttttttgggatcgctatggccatcccactgaagctgctgctcggaccatcgtcgatcttatgttgactgatgatacacattactcatctcctataactcttactcagttggtctctacatgatcaataatacacacggcttcgtttttttgggaagagtacataatcaagtagacaaatgggatttggaaacttgatttgtaatcaagtatacgttactaaatttgttaccaatgaaatatataagtttctt

SEQ ID NO: 90703 - protein, 390 aa, Arabidopsis thaliana
  peptide (1)..(390): Ceres Seq. ID no. 12724931
EPRSIRKVRRKNKNMPTNNTPFLTIFLLFLGLLRFDSFPGLEAATGKLASIPGLYVFGDSLVDAGNNNYLPISISKANYPHNGVDFPNKKPTGRFCNGKNAADAIAEKFGLPLPPPYLSLRGLLKREKRKSAAVTGVNFASGGAGIFNSSDQKLGQAIPLSKQVNNWLSIHEEVMKLEPSAAQLHLSKSLFTVVIGSNDLFDYFGSFKLRRQSNPQQYTQLMADKLKEQLKRIHDSGARRFLIIGVAQIGCTPGKRAKNSTLHECDEGANMWCSLYNEALVKMLQQLKQELQGSITYTYFDNYKSLHDIISNPARYGFADVTSACCGNGELNADLPCLPLAKLCSDRTKHLFWDRYGHPTEAAARTIVDLMLTDDTHYSSPITLTQLVST

SEQ ID NO: 90704 - protein, 376 aa, Arabidopsis thaliana
  peptide (1)..(376): Ceres Seq. ID no. 12724932
MPTNNTPFLTIFLLFLGLLRFDSFPGLEAATGKLASIPGLYVFGDSLVDAGNNNYLPISISKANYPHNGVDFPNKKPTGRFCNGKNAADAIAEKFGLPLPPPYLSLRGLLKREKRKSAAVTGVNFASGGAGIFNSSDQKLGQAIPLSKQVNNWLSIHEEVMKLEPSAAQLHLSKSLFTVVIGSNDLFDYFGSFKLRRQSNPQQYTQLMADKLKEQLKRIHDSGARRFLIIGVAQIGCTPGKRAKNSTLHECDEGANMWCSLYNEALVKMLQQLKQELQGSITYTYFDNYKSLHDIISNPARYGFADVTSACCGNGELNADLPCLPLAKLCSDRTKHLFWDRYGHPTEAAARTIVDLMLTDDTHYSSPITLTQLVST

SEQ ID NO: 90705 - protein, 216 aa, Arabidopsis thaliana
  peptide (1)..(216): Ceres Seq. ID no. 12724933
MKLEPSAAQLHLSKSLFTVVIGSNDLFDYFGSFKLRRQSNPQQYTQLMADKLKEQLKRIHDSGARRFLIIGVAQIGCTPGKRAKNSTLHECDEGANMWCSLYNEALVKMLQQLKQELQGSITYTYFDNYKSLHDIISNPARYGFADVTSACCGNGELNADLPCLPLAKLCSDRTKHLFWDRYGHPTEAAARTIVDLMLTDDTHYSSPITLTQLVST

SEQ ID NO: 90706 - DNA, 1347 bp, Arabidopsis thaliana
  misc_feature (1)..(1347): Ceres Seq. ID no. 12724934
  misc_feature (1)..(1347): Ortholog of  Ceres SEQ ID NO 13596198 as cited in SEQ ID NO 68488
atggaggaacaaaactggataagaggaccaatcataggtcgaggctcaacagctactgtctcacttggaatcacaaattccggtgacttcttcgccgtcaaatccgccgagttttcttcatcggcgtttttgcagagagaacaatcgattttgtcgaagttgagctctccttacatagtcaagtacattggttctaatgtaacgaaggagaacgacaagttgatgtataatctcttaatggagtatgtttccggtgggagtcttcacgatttgatcaagaattccggcgggaagttaccggagccgttgattagatcctacacacgtcagatattgaaaggtttgatgtatcttcatgatcaaggaatcgttcattgcgatgtgaagagccagaatgtgatgatcggaggagagattgcgaagatcgtcgatttgggttgtgctaaaacggtggaagagaatgagaacttggaattttccggtacaccggcgtttatgtcaccggaggtagcacgtggtgaagaacagagttttccagctgatgtttgggctttggggtgtacggtgatagagatggctacagggtcaagtccttggccggagctaaacgacgtcgttgctgctatttataagattggtttcaccggcgagtcgccggtgattccggtttggttatcggagaaaggtcaagactttttgaggaagtgtttgagaaaagatccgaaacagagatggactgttgaagaattgcttcaacatccgtttctcgacgaagaagacaacgacagtgaccaaactggtaactgtctgaattcttcatctcctagtactgtgttggatcaacggttttgggatttatgtgaaacttcgagaagtagattcattaaagaggatcacgaagacccatttgcaaattctacaaatttcttatgggatgacgattctttaccgggtgatcggatcaagaaactcgccggagacgagagttccggtgaaccagactgggaaacgaacggttggattgaagtaaggggagagatagagaaacgtaacgaggaagaagatgagaattgcgttgaagcaacgtcattggaggaggacgaagaagaagtgggaggatttgagaattggatctgggatcaacaagacagcttgttcttggaatattcccctgaggacaacatttattatttttactcttattataacatctttgatgaagatataattctatattatgatcatcttgaagattgttttgtactaaaatttgatgataataataagaagatttttttctttagccacattacaaattcttgttttgagattactaattacaattga

SEQ ID NO: 90707 - protein, 448 aa, Arabidopsis thaliana
  peptide (1)..(448): Ceres Seq. ID no. 12724935
MEEQNWIRGPIIGRGSTATVSLGITNSGDFFAVKSAEFSSSAFLQREQSILSKLSSPYIVKYIGSNVTKENDKLMYNLLMEYVSGGSLHDLIKNSGGKLPEPLIRSYTRQILKGLMYLHDQGIVHCDVKSQNVMIGGEIAKIVDLGCAKTVEENENLEFSGTPAFMSPEVARGEEQSFPADVWALGCTVIEMATGSSPWPELNDVVAAIYKIGFTGESPVIPVWLSEKGQDFLRKCLRKDPKQRWTVEELLQHPFLDEEDNDSDQTGNCLNSSSPSTVLDQRFWDLCETSRSRFIKEDHEDPFANSTNFLWDDDSLPGDRIKKLAGDESSGEPDWETNGWIEVRGEIEKRNEEEDENCVEATSLEEDEEEVGGFENWIWDQQDSLFLEYSPEDNIYYFYSYYNIFDEDIILYYDHLEDCFVLKFDDNNKKIFFFSHITNSCFEITNYN

SEQ ID NO: 90708 - protein, 374 aa, Arabidopsis thaliana
  peptide (1)..(374): Ceres Seq. ID no. 12724936
MYNLLMEYVSGGSLHDLIKNSGGKLPEPLIRSYTRQILKGLMYLHDQGIVHCDVKSQNVMIGGEIAKIVDLGCAKTVEENENLEFSGTPAFMSPEVARGEEQSFPADVWALGCTVIEMATGSSPWPELNDVVAAIYKIGFTGESPVIPVWLSEKGQDFLRKCLRKDPKQRWTVEELLQHPFLDEEDNDSDQTGNCLNSSSPSTVLDQRFWDLCETSRSRFIKEDHEDPFANSTNFLWDDDSLPGDRIKKLAGDESSGEPDWETNGWIEVRGEIEKRNEEEDENCVEATSLEEDEEEVGGFENWIWDQQDSLFLEYSPEDNIYYFYSYYNIFDEDIILYYDHLEDCFVLKFDDNNKKIFFFSHITNSCFEITNYN

SEQ ID NO: 90709 - protein, 369 aa, Arabidopsis thaliana
  peptide (1)..(369): Ceres Seq. ID no. 12724937
MEYVSGGSLHDLIKNSGGKLPEPLIRSYTRQILKGLMYLHDQGIVHCDVKSQNVMIGGEIAKIVDLGCAKTVEENENLEFSGTPAFMSPEVARGEEQSFPADVWALGCTVIEMATGSSPWPELNDVVAAIYKIGFTGESPVIPVWLSEKGQDFLRKCLRKDPKQRWTVEELLQHPFLDEEDNDSDQTGNCLNSSSPSTVLDQRFWDLCETSRSRFIKEDHEDPFANSTNFLWDDDSLPGDRIKKLAGDESSGEPDWETNGWIEVRGEIEKRNEEEDENCVEATSLEEDEEEVGGFENWIWDQQDSLFLEYSPEDNIYYFYSYYNIFDEDIILYYDHLEDCFVLKFDDNNKKIFFFSHITNSCFEITNYN

SEQ ID NO: 90710 - DNA, 1331 bp, Arabidopsis thaliana
  misc_feature (1)..(1331): Ceres Seq. ID no. 12724950
  misc_feature (1)..(1331): Ortholog of  Ceres SEQ ID NO 13596392 as cited in SEQ ID NO 62136
  misc_feature (1)..(1331): Ortholog of  Ceres SEQ ID NO 14313244 as cited in SEQ ID NO 66802
  misc_feature (1)..(1331): Ortholog of  Ceres SEQ ID NO 13654360 as cited in SEQ ID NO 67980
  misc_feature (1)..(1331): Ortholog of  Ceres SEQ ID NO 13596394 as cited in SEQ ID NO 68561
gagaaaacaccccttcggagaggagcaaagcctctcctggggaagaagaagaagaacacgactttttgcttcttctttttaatgcagattttctaaaggtcttcgtaaattttgcgtctgattatcaaattaggttttttttgttgtttccattagttgtctcattgtctgtgaagagaaaggaacagaggaaaatgtcagacctagacaagcaaatagagcagcttaaacgctgcgaggctttgaaggaatcagaagtgaaggctctttgtcttaaagctatggagattctagttgaagagagcaatgttcaaagagtcgatgctcctgtcactatatgtggcgacattcatggacagttctatgacatgaaagagcttttcaaagttgggggtgattgccctaagaccaattatttgtttcttggagattttgttgaccgaggtttttattcggttgagacatttctacttcttctagctctcaaggttagatatccagaccgtataactctcattagagggaaccacgagagccggcagattacgcaggtatatggattttatgatgagtgtctgcgtaaatatggctctgtaaatgtttggagatactgcacagatatctttgactacttgagtctttcagctcttgtcgagaacaagatattttgtgttcatggaggtctctctccagctattatgactctagaccagatcagggctattgatcgaaagcaagaagtaccacatgatggtgctatgtgtgatcttttatggtctgatccagaagatattgtcgatggttggggattgagtccccgtggtgccggattccttttcggcggcagtgttgttacgtcttttaaccactcaaacaacattgattacatatgtcgagctcatcagctagtgatggaaggttacaaatggatgttcaatagccagatagtcactgtttggtctgccccaaattactgttatagatgcggtaatgtagctgcaattctagagctcgatgagaatctaaacaaagagtttcgtgtcttcgatgcagccccacaagaatcgagaggagctctagccaagaaacctgcacctgattatttcctgtgagacgcaagtgaatacagaaactggttccttcttctcattgcagagcaagaaagctacccaaaatcatcggtgtataggttgtaaaaatgcaaaagaatctacaatccatgtgttgccaaagagatctctactcaagggtccgtttgagtagaatctttgtgtcttaaaaaaagcttttttttttttttttccttctcttttgtttgtaatgctactttt

SEQ ID NO: 90711 - protein, 369 aa, Arabidopsis thaliana
  peptide (1)..(369): Ceres Seq. ID no. 12724951
ENTPSERSKASPGEEEEEHDFLLLLFNADFLKVFVNFASDYQIRFFLLFPLVVSLSVKRKEQRKMSDLDKQIEQLKRCEALKESEVKALCLKAMEILVEESNVQRVDAPVTICGDIHGQFYDMKELFKVGGDCPKTNYLFLGDFVDRGFYSVETFLLLLALKVRYPDRITLIRGNHESRQITQVYGFYDECLRKYGSVNVWRYCTDIFDYLSLSALVENKIFCVHGGLSPAIMTLDQIRAIDRKQEVPHDGAMCDLLWSDPEDIVDGWGLSPRGAGFLFGGSVVTSFNHSNNIDYICRAHQLVMEGYKWMFNSQIVTVWSAPNYCYRCGNVAAILELDENLNKEFRVFDAAPQESRGALAKKPAPDYFL

SEQ ID NO: 90712 - protein, 305 aa, Arabidopsis thaliana
  peptide (1)..(305): Ceres Seq. ID no. 12724952
MSDLDKQIEQLKRCEALKESEVKALCLKAMEILVEESNVQRVDAPVTICGDIHGQFYDMKELFKVGGDCPKTNYLFLGDFVDRGFYSVETFLLLLALKVRYPDRITLIRGNHESRQITQVYGFYDECLRKYGSVNVWRYCTDIFDYLSLSALVENKIFCVHGGLSPAIMTLDQIRAIDRKQEVPHDGAMCDLLWSDPEDIVDGWGLSPRGAGFLFGGSVVTSFNHSNNIDYICRAHQLVMEGYKWMFNSQIVTVWSAPNYCYRCGNVAAILELDENLNKEFRVFDAAPQESRGALAKKPAPDYFL

SEQ ID NO: 90713 - protein, 276 aa, Arabidopsis thaliana
  peptide (1)..(276): Ceres Seq. ID no. 12724953
MEILVEESNVQRVDAPVTICGDIHGQFYDMKELFKVGGDCPKTNYLFLGDFVDRGFYSVETFLLLLALKVRYPDRITLIRGNHESRQITQVYGFYDECLRKYGSVNVWRYCTDIFDYLSLSALVENKIFCVHGGLSPAIMTLDQIRAIDRKQEVPHDGAMCDLLWSDPEDIVDGWGLSPRGAGFLFGGSVVTSFNHSNNIDYICRAHQLVMEGYKWMFNSQIVTVWSAPNYCYRCGNVAAILELDENLNKEFRVFDAAPQESRGALAKKPAPDYFL

SEQ ID NO: 90714 - DNA, 1231 bp, Arabidopsis thaliana
  misc_feature (1)..(1231): Ceres Seq. ID no. 12724977
  misc_feature (1)..(1231): Ortholog of  Ceres SEQ ID NO 14316440 as cited in SEQ ID NO 58263
  misc_feature (1)..(1231): Ortholog of  Ceres SEQ ID NO 14302462 as cited in SEQ ID NO 65678
agaattagcaaacgacagatctgagaaatggaagaaaagtttagaaacttaatcgaggtatggatctctgctttaatctctctatcttactgttattacatatcgtctaaactctccaaaggtgttcttcgtctcctctctattcttccagtctgcattctgtttcttgttcttcctctgttcctctcttgtgtgcacttttgcgccatttcagttctttttctttcatggcttgcaaactttaagcttcttctatttgcctttgatgagggacctttgttcccacttcctccaaaactctcccgtttcatctgcttcgcttgtttacccatcaaaatcagacaagacccttctccaaatgcgataccaaatcttcatcctaaacctatgcctaaatgggttttggctgttaaaattttggtcttgggcgtcttgttacatgtttatgaatacagggatggtttgcctcggtttgttgtcttggctctctattgtctccatatttaccttgaggtagaacttgtcttggtctttgttggagccgtggtatctactcttcttgggtgtaacatcgagccggtgttcaatgagccctacctagctacctccctacaagacttctggagccgcagatggaacctcatggtttcagccgtcctacgctcaaccgttcacattccggttcagcgttttttcaaacgcatactcagtccagacggggctatgtttgctggggtcatggcatcgttctttgtctcaggcttgatgcatgagctgctctacttttacatgatccgtaagcctccaacttgggaagtcacttgtttctttgtgttgcatggtgctgccactgccactgagatagcggtgaagagaacacaatggttgaggccaccgcaccgggctgtctctggtcttgtagttctgacgtttgtgagtgtgacgggcgtttggctattcctcgctcaagtgctgagaaacaatgtccatgagaaagcgattggagaatgtttattggttcttgacctagccaagttattcacttcttcatgattctttattaaaggcaaagagcggtagcagagcaaccaaactttgtttctcttcattgtttgaaaacgtatatagaagtgtgagacacgtcgtctagtgtgaaacattcttgacatgctattaaattgaatcaagctcaacaaattcaataaatatggcgtaaatgttttctaagttc

SEQ ID NO: 90715 - protein, 341 aa, Arabidopsis thaliana
  peptide (1)..(341): Ceres Seq. ID no. 12724978
MEEKFRNLIEVWISALISLSYCYYISSKLSKGVLRLLSILPVCILFLVLPLFLSCVHFCAISVLFLSWLANFKLLLFAFDEGPLFPLPPKLSRFICFACLPIKIRQDPSPNAIPNLHPKPMPKWVLAVKILVLGVLLHVYEYRDGLPRFVVLALYCLHIYLEVELVLVFVGAVVSTLLGCNIEPVFNEPYLATSLQDFWSRRWNLMVSAVLRSTVHIPVQRFFKRILSPDGAMFAGVMASFFVSGLMHELLYFYMIRKPPTWEVTCFFVLHGAATATEIAVKRTQWLRPPHRAVSGLVVLTFVSVTGVWLFLAQVLRNNVHEKAIGECLLVLDLAKLFTSS

SEQ ID NO: 90716 - protein, 221 aa, Arabidopsis thaliana
  peptide (1)..(221): Ceres Seq. ID no. 12724979
MPKWVLAVKILVLGVLLHVYEYRDGLPRFVVLALYCLHIYLEVELVLVFVGAVVSTLLGCNIEPVFNEPYLATSLQDFWSRRWNLMVSAVLRSTVHIPVQRFFKRILSPDGAMFAGVMASFFVSGLMHELLYFYMIRKPPTWEVTCFFVLHGAATATEIAVKRTQWLRPPHRAVSGLVVLTFVSVTGVWLFLAQVLRNNVHEKAIGECLLVLDLAKLFTSS

SEQ ID NO: 90717 - DNA, 1804 bp, Arabidopsis thaliana
  misc_feature (1)..(1804): Ceres Seq. ID no. 12724996
  misc_feature (1)..(1804): Ortholog of  Ceres SEQ ID NO 13598582 as cited in SEQ ID NO 65294
  misc_feature (1)..(1804): Ortholog of  Ceres SEQ ID NO 15176114 as cited in SEQ ID NO 67627
  misc_feature (1)..(1804): Ortholog of  Ceres SEQ ID NO 15176145 as cited in SEQ ID NO 0
ataggatgaacaaaaacatcctctgtttctctcttttcatatttttctccacatttcctcatctgggtcatctccaaaaatggtgcttttttttaataattcttcacgtttctgggtttttggttttgtgatttgatgatgctttttttttgtttttttcagatttgatgataacccaaattcgcaatttgattaggacaacaacaacaactttatttatctgattccgtctttgattttcagacaagaaaagtatgttgtttctaagtcttttgatttttttcaatttcatctccttactcgatttttttttttttgggtttctctgaattggagcagaaaaaaaaaagatggaatcggatctggggaagctcttcattggtgggatttcgtgggatacagacgaagaaaggttaagagactactttagcaactatggtgatgttgttgaagctgtgatcatgagagatcgtgccacaggtcgtgcacgtggcttcggcttcattgtctttgcagacccctgtgtctcagagagagtgatcatggataaacacatcatcgatggccgcacggttgaggcgaagaaggctgtgcctcgagatgatcagcaggtgctaaagcgacacgctagtcctatccaccttatgtcacctgtccatggtggtggtggaaggacaaagaagatcttcgttggaggtttaccgtctagcattaccgaggaggagttcaagaactactttgatcagtttggtactattgctgatgttgttgtaatgtatgatcataacacgcagaggccaagaggttttggcttcatcacatttgattcagatgatgctgttgatagagttcttcacaagaccttccatgagctcaatgggaaactagttgaggtcaaaagagctgtacctaaggagatttcccctgtttctaatatccgaagcccgcttgctagcggtgttaactatggaggcgggtctaataggatgcctgctaatagctactttaacaactttgctcctggtcctggtttttataacagtctaggtcctgttggtcgtcggtttagtcctgttattggtagtggtagaaatgcggtttctgcttttggcctcggtttgaatcatgacttgagtttgaatttgaatccaagctgcgatgggacaagttctacgtttggttataaccgtattccaagcaacccttacttcaacggtgcttccccgaaccgttacacctctccaatcgggcacaatagaactgagtctccttacaattcgaacaatagagacttatggggaaacagaaccgacactgcaggtcccggttggaacttgaatgtctcgaatggaaacaacagaggaaattggggacttccttcttcttctgctgttagtaatgataacaatggctttggaaggaactatgggacaagttctggactttcctcgtccccatttaatggttttgaaggttctataggggaactgtacagaggcggctcagtctacagcgactcaacgtggcagcaacagcagctaccatctcagtcttctcacgagctagacaatttgtctcgcgcttacggttatgatattgacaatgtaggttcagacccatctgcaaatgacccagaaacttacaatggaagctacaatgttggaaatagacaaactaatagaggtaacaaaaaaattcatctcaataaaacttgtaacttggatacattttgatcgcaatcgaaatgttctgatctgtgttttatttacttgttgaggtattgctgcataggttatcaaaaacc

SEQ ID NO: 90718 - protein, 460 aa, Arabidopsis thaliana
  peptide (1)..(460): Ceres Seq. ID no. 12724997
MESDLGKLFIGGISWDTDEERLRDYFSNYGDVVEAVIMRDRATGRARGFGFIVFADPCVSERVIMDKHIIDGRTVEAKKAVPRDDQQVLKRHASPIHLMSPVHGGGGRTKKIFVGGLPSSITEEEFKNYFDQFGTIADVVVMYDHNTQRPRGFGFITFDSDDAVDRVLHKTFHELNGKLVEVKRAVPKEISPVSNIRSPLASGVNYGGGSNRMPANSYFNNFAPGPGFYNSLGPVGRRFSPVIGSGRNAVSAFGLGLNHDLSLNLNPSCDGTSSTFGYNRIPSNPYFNGASPNRYTSPIGHNRTESPYNSNNRDLWGNRTDTAGPGWNLNVSNGNNRGNWGLPSSSAVSNDNNGFGRNYGTSSGLSSSPFNGFEGSIGELYRGGSVYSDSTWQQQQLPSQSSHELDNLSRAYGYDIDNVGSDPSANDPETYNGSYNVGNRQTNRGNKKIHLNKTCNLDTF

SEQ ID NO: 90719 - protein, 423 aa, Arabidopsis thaliana
  peptide (1)..(423): Ceres Seq. ID no. 12724998
MRDRATGRARGFGFIVFADPCVSERVIMDKHIIDGRTVEAKKAVPRDDQQVLKRHASPIHLMSPVHGGGGRTKKIFVGGLPSSITEEEFKNYFDQFGTIADVVVMYDHNTQRPRGFGFITFDSDDAVDRVLHKTFHELNGKLVEVKRAVPKEISPVSNIRSPLASGVNYGGGSNRMPANSYFNNFAPGPGFYNSLGPVGRRFSPVIGSGRNAVSAFGLGLNHDLSLNLNPSCDGTSSTFGYNRIPSNPYFNGASPNRYTSPIGHNRTESPYNSNNRDLWGNRTDTAGPGWNLNVSNGNNRGNWGLPSSSAVSNDNNGFGRNYGTSSGLSSSPFNGFEGSIGELYRGGSVYSDSTWQQQQLPSQSSHELDNLSRAYGYDIDNVGSDPSANDPETYNGSYNVGNRQTNRGNKKIHLNKTCNLDTF

SEQ ID NO: 90720 - protein, 396 aa, Arabidopsis thaliana
  peptide (1)..(396): Ceres Seq. ID no. 12724999
MDKHIIDGRTVEAKKAVPRDDQQVLKRHASPIHLMSPVHGGGGRTKKIFVGGLPSSITEEEFKNYFDQFGTIADVVVMYDHNTQRPRGFGFITFDSDDAVDRVLHKTFHELNGKLVEVKRAVPKEISPVSNIRSPLASGVNYGGGSNRMPANSYFNNFAPGPGFYNSLGPVGRRFSPVIGSGRNAVSAFGLGLNHDLSLNLNPSCDGTSSTFGYNRIPSNPYFNGASPNRYTSPIGHNRTESPYNSNNRDLWGNRTDTAGPGWNLNVSNGNNRGNWGLPSSSAVSNDNNGFGRNYGTSSGLSSSPFNGFEGSIGELYRGGSVYSDSTWQQQQLPSQSSHELDNLSRAYGYDIDNVGSDPSANDPETYNGSYNVGNRQTNRGNKKIHLNKTCNLDTF

SEQ ID NO: 90721 - DNA, 1251 bp, Arabidopsis thaliana
  misc_feature (1)..(1251): Ceres Seq. ID no. 12725038
  misc_feature (1)..(1251): Ortholog of  Ceres SEQ ID NO 14308080 as cited in SEQ ID NO 55218
atctttgaaatggatgacgatgggtttcgtaattggggttactatgaaccagctgctgctacctttaaaggtaatctcggtttgcagctaatgtctaccattgatcggaacactaaaccgtttttacctgggcgggatccgaatctaatgatggggcctaacgggtcatatcaccaccaagagcctcctatccacatgagctacaattggattaaccaacagaaggataagttcttcaatatgttgcctgttacaacagccactcctaactacggtaatgtccttcccgaaacttcgtctgctccgtcgatgcagatgaatctccatcatcatcttcaaaccgaggagaatccggttaagttggaagaagagattgttgttcagactaagaagagaaagaccaatgcaaaagctggctcgactccaaaggctaagaagccaaggaaaccaaaggatgagaacagtaacaacaacaacaacaacaacacgaatgttactcgagttaaacccgctaagaaaagtgttgacttggtgatcaatggagtgagtatggacatttcgggtcttcctgttcctatctgcacttgcactggagctcctcagcaatgctaccgttggggatgtggcggttggcagtctgcttgttgtaccacaaacatctcaatgcatccattaccaatgagtactaaacgccgtggagcgaggatctcgggaaggaagatgagtcaaggcgcgtttaagaaggttcttgagaaacttgcttctgatgggtttaactttgggaatccgattgatcttaagagccattgggcaagacatggaactaacaagttcgtcacaatcagatgattagttgcttgattagtaaaacagaacaagtgagtgtttctcttccgggatggaatctctcaatgatggtgtatgtatatacaacaaatctgaaatctgtgaccttttcaaaaattctgtctgcaatctgagttcgattctgttttcaggtaaaccatcttcgttgtagggtttggaagcagagttctctgttttctttaccacttttttttatcacacttttgctttgttttttgtttgtttgtctatctgtgtgtctgaggaagaagaaggtgtctgagaaaaaatctgcagggaaatttatttttttgtactttttttttttcttccttttgttatctttttataaacattttactgacttgtaacagatattcttttaattaaatgtttttatttttc

SEQ ID NO: 90722 - protein, 282 aa, Arabidopsis thaliana
  peptide (1)..(282): Ceres Seq. ID no. 12725039
IFEMDDDGFRNWGYYEPAAATFKGNLGLQLMSTIDRNTKPFLPGRDPNLMMGPNGSYHHQEPPIHMSYNWINQQKDKFFNMLPVTTATPNYGNVLPETSSAPSMQMNLHHHLQTEENPVKLEEEIVVQTKKRKTNAKAGSTPKAKKPRKPKDENSNNNNNNNTNVTRVKPAKKSVDLVINGVSMDISGLPVPICTCTGAPQQCYRWGCGGWQSACCTTNISMHPLPMSTKRRGARISGRKMSQGAFKKVLEKLASDGFNFGNPIDLKSHWARHGTNKFVTIR

SEQ ID NO: 90723 - protein, 279 aa, Arabidopsis thaliana; identical to SEQ ID NO: 44176
  peptide (1)..(279): Ceres Seq. ID no. 12725040

SEQ ID NO: 90724 - protein, 252 aa, Arabidopsis thaliana; identical to SEQ ID NO: 44177
  peptide (1)..(252): Ceres Seq. ID no. 12725041

SEQ ID NO: 90725 - DNA, 1706 bp, Arabidopsis thaliana
  misc_feature (1)..(1706): Ceres Seq. ID no. 12725045
  misc_feature (1)..(1706): Ortholog of  Ceres SEQ ID NO 14304220 as cited in SEQ ID NO 53418
acacacacctctctttcctcaaaaaccctagatctctccctctctctctctctctctctccatctcttgtctttgccttttacgaagcttcccttcccttagtttatacattactctcagctctctttatttcactcagcttcacgttgaagacgagtttctctatttgccagatctgttatctttcacatttctggtgattgcttctctaatttcgttctgggttttactgtttccatctgaaatttacctcatttcttcgtgggttttatctgaattccgttaattcccaagttctagtgtatgatctcgttgaaatcgagttaaaaatctgatctttactcttgattctgcagatctgtttgaagaaagctatgacttgtgtttgataaagagagaagcaaaaaaaggaacagtttttatataaagatatttgctttatttgtttgttcttaattgttgccacgaaaatggcaatgccaccacctggaaatgttactactccgtctgagaaattgcagtttcctcctccggcaaattggatcccagacgagcgagatgggtttatctcctggcttcgtgcggagttcgctgcggctaacgcgatcatcgattcgctttgtcagcatctacaagcggttggggatcacaacgagtacgaatccgtgatcggaagcattcatcatcgtcgcttagcctggtctcaagtgcttactatgcagcagtttttcccagttgcagatgtttcttacaatcttcagcagattgcttggaaaaggcaacagcaaatgccacctcaaaggcattacaattctgatcaagttgggaaatttggagcaaggagatcagggcctgggtttaacaagcatcatggtggtggtgggggttacagaggagctgattcgatggcgagaaatgggcataatttcaatggcgttaacagtgatcgtgttgagcatcgggaggaagctaagttggcaagtgatgttaaggcattgtctgttgcagaagagaagagagatggtagcgagaaaccgaggagtgatagtaaagttgagaaaaaattggaagaatctgaaactcaagaggagatagtgaagaaccataagtgtaactcgggttctaaagataacagtctcatttctgagcaaaagcaggaggagaacgataaagagtgtcctgcaagcatggcaaagacttttgtggttcaagagatgtatgatgcaaaaatggttaatgttgtcgaaggattgaagctatacgacaaaatgcttgacgcaaacgaagtttctcaactcgtttctcttgtaaccaatctgagacttgctggaagaagaggtcaacttcaaagtgaggcatatgtgggttataaacggccaaatagaggacatggacgtgagatgatccaactcggtcttcctatagctgatacgccgcctgatgatgatagtatcaaagatcgaagaatagagccaatcccatcagctctttcagacatcattgaacgtttggtctcaaagcaaatcatacctgtgaaaccagacgcatgcatcattgatttcttcagcgagggagatcactcgcagcctcatatgtttgttccctggtttggacgacccatcagtgtcttgtccttgtctgaatgtgattatacatttggaagagtcattgtctctgaaaatcccggcgactacaaaggctctctc

SEQ ID NO: 90726 - protein, 412 aa, Arabidopsis thaliana
  peptide (1)..(412): Ceres Seq. ID no. 12725046
MAMPPPGNVTTPSEKLQFPPPANWIPDERDGFISWLRAEFAAANAIIDSLCQHLQAVGDHNEYESVIGSIHHRRLAWSQVLTMQQFFPVADVSYNLQQIAWKRQQQMPPQRHYNSDQVGKFGARRSGPGFNKHHGGGGGYRGADSMARNGHNFNGVNSDRVEHREEAKLASDVKALSVAEEKRDGSEKPRSDSKVEKKLEESETQEEIVKNHKCNSGSKDNSLISEQKQEENDKECPASMAKTFVVQEMYDAKMVNVVEGLKLYDKMLDANEVSQLVSLVTNLRLAGRRGQLQSEAYVGYKRPNRGHGREMIQLGLPIADTPPDDDSIKDRRIEPIPSALSDIIERLVSKQIIPVKPDACIIDFFSEGDHSQPHMFVPWFGRPISVLSLSECDYTFGRVIVSENPGDYKGSL

SEQ ID NO: 90727 - protein, 410 aa, Arabidopsis thaliana
  peptide (1)..(410): Ceres Seq. ID no. 12725047
MPPPGNVTTPSEKLQFPPPANWIPDERDGFISWLRAEFAAANAIIDSLCQHLQAVGDHNEYESVIGSIHHRRLAWSQVLTMQQFFPVADVSYNLQQIAWKRQQQMPPQRHYNSDQVGKFGARRSGPGFNKHHGGGGGYRGADSMARNGHNFNGVNSDRVEHREEAKLASDVKALSVAEEKRDGSEKPRSDSKVEKKLEESETQEEIVKNHKCNSGSKDNSLISEQKQEENDKECPASMAKTFVVQEMYDAKMVNVVEGLKLYDKMLDANEVSQLVSLVTNLRLAGRRGQLQSEAYVGYKRPNRGHGREMIQLGLPIADTPPDDDSIKDRRIEPIPSALSDIIERLVSKQIIPVKPDACIIDFFSEGDHSQPHMFVPWFGRPISVLSLSECDYTFGRVIVSENPGDYKGSL

SEQ ID NO: 90728 - protein, 330 aa, Arabidopsis thaliana
  peptide (1)..(330): Ceres Seq. ID no. 12725048
MQQFFPVADVSYNLQQIAWKRQQQMPPQRHYNSDQVGKFGARRSGPGFNKHHGGGGGYRGADSMARNGHNFNGVNSDRVEHREEAKLASDVKALSVAEEKRDGSEKPRSDSKVEKKLEESETQEEIVKNHKCNSGSKDNSLISEQKQEENDKECPASMAKTFVVQEMYDAKMVNVVEGLKLYDKMLDANEVSQLVSLVTNLRLAGRRGQLQSEAYVGYKRPNRGHGREMIQLGLPIADTPPDDDSIKDRRIEPIPSALSDIIERLVSKQIIPVKPDACIIDFFSEGDHSQPHMFVPWFGRPISVLSLSECDYTFGRVIVSENPGDYKGSL

SEQ ID NO: 90729 - DNA, 811 bp, Arabidopsis thaliana
  misc_feature (1)..(811): Ceres Seq. ID no. 12725049
  misc_feature (1)..(811): Ortholog of  Ceres SEQ ID NO 12474478 as cited in SEQ ID NO 96
  misc_feature (1)..(811): Ortholog of  Ceres SEQ ID NO 13647991 as cited in SEQ ID NO 187
aaagaagaaataaacagagtaaaaaacttaaagcttaaaatggggaggcagctttatacgacgacggttctctacttagtcaccctactcttcatttgccggacaatctcagccgtccgtttccctccggaacaaccaacaaccgatgatctagatttcatccgtacgagctgcaacacaacgctgtatccagacgtatgttacacgtctctagctggatacgcctccgccgtccaagataatccggcaaggctagctaaactcgcaatcggcgtttctctctcccgcgcaaaatacacggcggcttacctctccaaactctcacgtcgcgctgcctcagctgctgtccacgactgcgtttcgaacgtgggagatgccgtggatcagatgcgtggctccctaaggcagctccgagagatgaaccaccgtcgtcccggagatccggcgtttaggtttcagatgagtaacgtgcagacgtggatgagcgcggcgttgacggacgaggagacgtgtacggatggggtcacggaggagatggaagacggagagacgaagacggctatttgcgatagagtcgccgacgtcaagaggttcacgagtaatgcgctcgctctcgttaatacctacgccaacaatggagcctaactaactaagctaggtcttgaaattcctaaagttataaaaacacttgtatatatatatgtgttaagttgtgtgcttagtttataatgtgtattcgaggctttgaaaccgagttagaactctgagtttgggtgttcaaattatacattaatctatgtttgattgtatt

SEQ ID NO: 90730 - protein, 214 aa, Arabidopsis thaliana; identical to SEQ ID NO: 22357
  peptide (1)..(214): Ceres Seq. ID no. 12725050

SEQ ID NO: 90731 - protein, 201 aa, Arabidopsis thaliana; identical to SEQ ID NO: 22358
  peptide (1)..(201): Ceres Seq. ID no. 12725051

SEQ ID NO: 90732 - DNA, 1189 bp, Arabidopsis thaliana
  misc_feature (1)..(1189): Ceres Seq. ID no. 12725056
  misc_feature (1)..(1189): Ortholog of  Ceres SEQ ID NO 13594298 as cited in SEQ ID NO 57803
  misc_feature (1)..(1189): Ortholog of  Ceres SEQ ID NO 13503476 as cited in SEQ ID NO 61978
  misc_feature (1)..(1189): Ortholog of  Ceres SEQ ID NO 12578438 as cited in SEQ ID NO 62201
  misc_feature (1)..(1189): Ortholog of  Ceres SEQ ID NO 12617675 as cited in SEQ ID NO 64656
gtttttcattcataacaaaaaatgggttttataactcgatttttagttttcatgtcactcttcaccagtttggtttctggatttgctctacaaaagcttcctcttatacagttcgacgaaggttacacacagctctttggtgaccagaatcttattgttcacagagatggaaaatctgtccggttaacgcttgatgaaagaaccggttctggatttgtctcaaatgatatttacttgcatggcttcttcagttcctctatcaaattgccagcagattactctgcaggagttgttatcgccttttatttatcaaatggggacttatatgagaagaatcatgacgagattgattttgagtttttggggaatattagaggcagagaatggaggattcagaccaatatatacggtaatggaagcacacacttgggcagagaagaaagatacaatctttggtttgatccaacagaggatttccatcaatacagtatcctttggtctctatctcacatcatattttatgtagacaatgttccgatcagagaagtcaaacgtacggcgtcgatgggcggtgacttcccggcgaagccaatgtctttatattcaaccatatgggatggttccaaatgggcgactgatggaggcaagtacggtgtaaattacaaatatgccccttacgtctctcaattcactgatctgatcctccacggctgcgccgttgaccccaccgagaagtttccgagctgcaaagatgaagcggttcagaatctccggctagcatcggagataacggagtctcagaggaacaagatggagattttccgacagaaacacatgacttattcgtattgttacgatcatatgaggtacaaggtggttttgtcggagtgtgttgtgaatccggctgaggctaagcgtctcagggtctatgatccggtcacgttcggtgggattcctcacggccaccgtcgtgggaagcatcggagcaggagccgattagctcgaactgagtcgatatgaatcggtgtatattgttcggctagagggcatttttggcattttctgtcttgtataggaatactatgaattatggactgaataatggaatgacaccgctatattttgatttcctccattttatgaacattatcgttttaacataataataaaatttcatttttctataagt

SEQ ID NO: 90733 - protein, 332 aa, Arabidopsis thaliana; identical to SEQ ID NO: 30747
  peptide (1)..(332): Ceres Seq. ID no. 12725057

SEQ ID NO: 90734 - protein, 322 aa, Arabidopsis thaliana; identical to SEQ ID NO: 30748
  peptide (1)..(322): Ceres Seq. ID no. 12725058

SEQ ID NO: 90735 - DNA, 657 bp, Arabidopsis thaliana
  misc_feature (1)..(657): Ceres Seq. ID no. 12725063
  misc_feature (1)..(657): Ortholog of  Ceres SEQ ID NO 13655108 as cited in SEQ ID NO 62996
acaaaaccttacattgctttccatttaaaactctcttcttcttttttgttctctctctctcttcatggaagctcaacaccttcatgccaagcctcatgctgaaggagaatggtccacaggcttctgtgattgcttttctgactgcaaaaattgttgtatcacattctggtgtccatgtatcacctttggccaagtcgccgagattgtagatcgaggatccacatcgtgtggtactgctggagctctatacgcgttgatagccgtagtaactggttgtgcatgtatatactcatgtttctatcgtggaaagatgagagctcaatataatattaaaggagatgattgtactgattgccttaaacatttctgctgtgagctttgttctttgacccaacaataccgtgaactcaagcaccgcggttacgatatgagtcttggatgggcggggaacgtggagagacaacagaatcaaggaggtgtggccatgggtgctccggtcttccaaggcggcatgacccgctaagaattatttctttatgtaattcatttgtcttttatatgtagtaataaaacgaggtttaatcctctgtttgtgttgttaatatgcttgttgtgatttgaacaaaaaaaaatgcttgttgtgaaagtttagacata

SEQ ID NO: 90736 - protein, 152 aa, Arabidopsis thaliana; identical to SEQ ID NO: 27254
  peptide (1)..(152): Ceres Seq. ID no. 12725064

SEQ ID NO: 90737 - DNA, 2754 bp, Arabidopsis thaliana
  misc_feature (1)..(2754): Ceres Seq. ID no. 12725068
  misc_feature (1)..(2754): Ortholog of  Ceres SEQ ID NO 15168506 as cited in SEQ ID NO 57671
  misc_feature (1)..(2754): Ortholog of  Ceres SEQ ID NO 15180420 as cited in SEQ ID NO 0
gaagaaaattagaaaaatcggaagagcgatcgaagaggattttgaaccgccatggcttcttcttcgctctctaatctgatgctcgccattcatgagaagaagacgagctccgttgatctctaccgtcctctccgcaactacgttactttcacctactctgagcgcgaggctcagcttatagacgacgatctcgagaccttgaagcagctccgatccgatatagaacgcgtttccgatccttctccagctgctcggcgagaccttctcatctcctattacaaagttctttgtcttgtggagacgcgatttccaatttcccctgacaaggatcatgtcaacgccgtctctttcgtatggtacgatgctttcaagcaaaagcataaagctactcagcagaacattcatttggagaaagcagctgttctattcaatcttggtgctagctacagccagattggactcggtcatgaccgcaccaccgtcgatgggcgtcgtcaggcttcacatgcgttcatggctgcagcaggggcgttcgctcacttgagggataacgagtccattaaggcgacgatcgggccgagcactaccgtggatgtgtcggttgagtgtgttggaatgttggaacggttgatggtggcgcaggcgcaggaatgtgtctttgaaaataccattgctaaaggaagtactcctggtgtctctgctaaaattgctaggcaggttggcatattttatgaggaggctttatctgcgctaatcatttcgccattgaaggatcatttcgacaaaggctggatttctcatgtgcagctgaaagcagcactcttctatggtgaagcttgctttagatatggaaaagagttgcacgagaaagaggaaattgcagaagaaattgcacggctgaggagtggagccagccgtttggcagaagcaaagaagtcttcaaggggagctcctgctcagcttatagaagcgatgaacacactagagtctagcattaatggcaatttggatagggctgtcaaggaaaacgacagagtgtacctcatgagagttccttctccttcttctttgtctccacttcccgccttctcaatggttaagccaatgaacatgactgatattttggatgcaagcaaggaaaaaatgttttcaatccttgttccagacagcagtgcaaaggctctctctagatacactgagatggtcgatgatgtaattagaactcaggcggagagattacagcaagctagcgaactaactcgagttaggctcaaagagatggatcttccagattctattctcgctgtggatggtaattcagctcttcctgttgatcttaaagaagatgtagaagctgttcagatcagtggtggtccagctggcttggaagctgaactgcagcaacttagagatttgaagagggttaatcaggaactgttggtgcacactgaagagcttttgcagaaagaagcaactgaagattctcagttcagaagtcaatttgggactcggtggactaggcctcaatctagcacactgacaaagaacttgcaggataggctaaatcggtttgcagccaatttgaaacaagctggcgaaagtgatgttaagattgagcgatcagtgagagataactccgccctcatgtctattcttgatcgacggccgatagagtctgctgtcccaactcttgctaggccaataatgtctctggacgcaacagaggatgctattgtgggaactttgaagcagagtctgaggcaactggaaaatcttggtgctcagcgggcaggtcttgaagacatgctcaaagagatgaagagaaaggatgacatactgccaaagctgatgaccataacaggctcctatgaagatatgttcaggaaagagatatcaaagtatgaccacatttgtgaagatatttcccaaaacattgaagttcaagaacaattattgatgcaaattcaggctcaaaatgaagagttttcaactattttcaatcttgaagattataaagcatccaaggagaagtgctacaagcagattcaagctgcaataatgaagtatcgagagatcaaggagaacatcaatgagggcctgaagttctatgtcactctccaagatgcaatcacgaatgtgaagcagcagtgcagtgattttgtgatgacaaggagtatccagtgccgagatatgattgaagatgtgcaacgacagatgtctggtttgagttttcaggatcatagaagctccggcccatacccatctgtgcatcaaccaacggcttcaagtccgcctcctccaccagaaactcagaatccatctcatcctcacccacatgcaccatactatagaccgcctgagcagatgtcaaggcctggctactctatcccaccctacggtccacctcccccataccatactcctcatggccaggcgccacaaccataccctcctcaggcacagcaacagcctcatccatcatggcaacaaggctcttactatgatccgcagggacagcagcctcggcctccttatcccggccagagcccataccaacctcctcaccaaggtggaggatactacaggcaatgagttactttgggagcaataaaattctggtgttatatatctattgttgtgtttcctgtgagtacttgatgtgtgtctatctctttgacatgtttctgtcatgaaattgaatatctggtttgatagtgactcaaattctttattcaaagtagagccgatgtgatg

SEQ ID NO: 90738 - protein, 846 aa, Arabidopsis thaliana; identical to SEQ ID NO: 44833
  peptide (1)..(846): Ceres Seq. ID no. 12725069

SEQ ID NO: 90739 - protein, 837 aa, Arabidopsis thaliana; identical to SEQ ID NO: 44834
  peptide (1)..(837): Ceres Seq. ID no. 12725070

SEQ ID NO: 90740 - protein, 692 aa, Arabidopsis thaliana; identical to SEQ ID NO: 44835
  peptide (1)..(692): Ceres Seq. ID no. 12725071

SEQ ID NO: 90741 - DNA, 911 bp, Arabidopsis thaliana
  misc_feature (1)..(911): Ceres Seq. ID no. 12725072
  misc_feature (1)..(911): Ortholog of  Ceres SEQ ID NO 13595495 as cited in SEQ ID NO 56624
  misc_feature (1)..(911): Ortholog of  Ceres SEQ ID NO 12608406 as cited in SEQ ID NO 58017
  misc_feature (1)..(911): Ortholog of  Ceres SEQ ID NO 13599397 as cited in SEQ ID NO 0
agataagttccgtggttatcccattaaccttctttctacacaacacaaaactatatataaagatcatacatgtaataacgtcctgcaactattacaatcattctcgcttgaattaacgtggacgtcattgtttttggattgttaatcaaaggcggcgttacttttttttaatataattgtttctttaggatctttgtctctggaaaatgaaggaagacgcaggaaaccctttgcatctcacgtcactgaaccatgtctctgtcttgtgccgatccgtcgacgaatctatgaatttttaccaaaaggtgttagggttcatcccgatacgaagacctgaatccttaaattttgaaggcgcttggttgtttggtcacgggattggaatacacctcctgtgtgccccagaaccagagaaacttcccaagaaaactgcgattaatcccaaggataatcacatctctttccagtgtgagagtatgggagtagtggagaagaagctggaggaaatggggatagattatgtaagggcattagtagaagaaggagggatccaagtggaccagctcttcttccatgaccctgatggcttcatgatcgagatttgcaactgcgatagcctccccgtagtccccctcgtaggagaaatggctcggtcctgctcaagagtcaaactccaccagatggtgcagccacaaccgcagactcagatccaccaagtggtctacccttaattataaacagctcacttcttctttatattgtgtgtgtttgtgtattggtgtgcttggttttgggtgtaatatacaataagagaccgatgtgaatcagcgaatgtgattcccttcgaggaaatgaccattctctttgctccacaagcttatataatataatcaagggaaatcatgttttac

SEQ ID NO: 90742 - protein, 174 aa, Arabidopsis thaliana; identical to SEQ ID NO: 27087
  peptide (1)..(174): Ceres Seq. ID no. 12725073

SEQ ID NO: 90743 - protein, 147 aa, Arabidopsis thaliana; identical to SEQ ID NO: 27088
  peptide (1)..(147): Ceres Seq. ID no. 12725074

SEQ ID NO: 90744 - DNA, 1865 bp, Arabidopsis thaliana
  misc_feature (1)..(1865): Ceres Seq. ID no. 12725096
  misc_feature (1)..(1865): Ortholog of  Ceres SEQ ID NO 13585332 as cited in SEQ ID NO 60654
  misc_feature (1)..(1865): Ortholog of  Ceres SEQ ID NO 13502874 as cited in SEQ ID NO 66298
  misc_feature (1)..(1865): Ortholog of  Ceres SEQ ID NO 12614124 as cited in SEQ ID NO 68392
atcgctagtgttcatttctaacaaatgcacacctcactacacgcatacatacatcatgatgagctttaccacatcattaccatacccttttcacatcctactagtctttatcctctccatggcatcaatcactctactgggtcgaatactctcaaggcccaccaaaaccaaagaccgatcttgccagcttcctcctggcccaccaggatggcccatcctcggcaatctacccgaactattcatgactcgtcctaggtccaaatatttccgccttgccatgaaagagctaaaaacagatatagcatgtttcaactttgccggcatccgtgccatcaccataaactccgacgagatcgctagagaagcgtttagagagcgagacgcagatttggcagaccggcctcaacttttcatcatggagacaatcggagacaattacaaatcaatgggaatttcaccgtacggtgaacaattcatgaagatgaaaagagtgatcacaacggaaattatgtccgttaagacgttgaaaatgttggaggctgcaagaaccatcgaagcggataatctcatagcttacgttcactccatgtatcaacggtccgagacggtcgatgttagagagctctcgagggtttatggttacgcagtgaccatgcgaatgttgtttggaaggagacatgttacgaaagaaaacgtgttttctgatgatggaagactaggaaacgccgaaaaacatcatcttgaggtgattttcaacactcttaactgtttaccgagttttagtccagcggattacgtggaacgatggttgagaggttggaatgttgatggtcaagagaagagggtgacagagaactgtaacattgttcgtagttacaacaatcccataatcgacgagagggtccagttgtggagggaagaaggtggtaaggctgctgttgaagattggcttgatacgttcattaccctaaaagatcaaaacggaaagtacttggtcacaccagacgaaatcaaagctcaatgcgtagaattttgtatagcagcgattgataatccggcaaataacatggagtggacacttggggaaatgttaaagaacccggagattcttagaaaagctctgaaggagttggatgaagtagttggaagagacaggcttgtgcaagaatcagacataccaaatctaaactacttaaaagcttgttgtagagaaacattcagaattcacccaagtgctcattatgtcccttcccatcttgcgcgtcaagataccacccttgggggttatttcattcccaaaggtagccacattcatgtatgccgccctggactaggtcgtaaccctaaaatatggaaagatccattggtatacaaaccggagcgtcacctccaaggagacggaatcacaaaagaggttactctggtggaaacagagatgcgttttgtctcgtttagcaccggtcgacgtggctgcatcggtgttaaagtcgggacgatcatgatggttatgttgttggctaggtttcttcaagggtttaactggaaactccatcaagattttggaccgttaagcctcgaggaagatgatgcatcattgcttatggctaaacctcttcacttgtccgttgagccacgcttggcaccaaacctttatccaaagttccgtccttaagaagaagaaaacaagatggtgtctaaaaaaaaaaaacgccttgtttctttctctgttatcttcttcaacgcttagtcgtttctatgttatgttactactcttagtcgtttatgttttttaacttttacttgacgtactgtcgtttgttgttgtccttttcttttgaatctccgtcacttcataataaacaccg

SEQ ID NO: 90745 - protein, 556 aa, Arabidopsis thaliana
  peptide (1)..(556): Ceres Seq. ID no. 12725097
SLVFISNKCTPHYTHTYIMMSFTTSLPYPFHILLVFILSMASITLLGRILSRPTKTKDRSCQLPPGPPGWPILGNLPELFMTRPRSKYFRLAMKELKTDIACFNFAGIRAITINSDEIAREAFRERDADLADRPQLFIMETIGDNYKSMGISPYGEQFMKMKRVITTEIMSVKTLKMLEAARTIEADNLIAYVHSMYQRSETVDVRELSRVYGYAVTMRMLFGRRHVTKENVFSDDGRLGNAEKHHLEVIFNTLNCLPSFSPADYVERWLRGWNVDGQEKRVTENCNIVRSYNNPIIDERVQLWREEGGKAAVEDWLDTFITLKDQNGKYLVTPDEIKAQCVEFCIAAIDNPANNMEWTLGEMLKNPEILRKALKELDEVVGRDRLVQESDIPNLNYLKACCRETFRIHPSAHYVPSHLARQDTTLGGYFIPKGSHIHVCRPGLGRNPKIWKDPLVYKPERHLQGDGITKEVTLVETEMRFVSFSTGRRGCIGVKVGTIMMVMLLARFLQGFNWKLHQDFGPLSLEEDDASLLMAKPLHLSVEPRLAPNLYPKFRP

SEQ ID NO: 90746 - protein, 538 aa, Arabidopsis thaliana
  peptide (1)..(538): Ceres Seq. ID no. 12725098
MMSFTTSLPYPFHILLVFILSMASITLLGRILSRPTKTKDRSCQLPPGPPGWPILGNLPELFMTRPRSKYFRLAMKELKTDIACFNFAGIRAITINSDEIAREAFRERDADLADRPQLFIMETIGDNYKSMGISPYGEQFMKMKRVITTEIMSVKTLKMLEAARTIEADNLIAYVHSMYQRSETVDVRELSRVYGYAVTMRMLFGRRHVTKENVFSDDGRLGNAEKHHLEVIFNTLNCLPSFSPADYVERWLRGWNVDGQEKRVTENCNIVRSYNNPIIDERVQLWREEGGKAAVEDWLDTFITLKDQNGKYLVTPDEIKAQCVEFCIAAIDNPANNMEWTLGEMLKNPEILRKALKELDEVVGRDRLVQESDIPNLNYLKACCRETFRIHPSAHYVPSHLARQDTTLGGYFIPKGSHIHVCRPGLGRNPKIWKDPLVYKPERHLQGDGITKEVTLVETEMRFVSFSTGRRGCIGVKVGTIMMVMLLARFLQGFNWKLHQDFGPLSLEEDDASLLMAKPLHLSVEPRLAPNLYPKFRP

SEQ ID NO: 90747 - protein, 537 aa, Arabidopsis thaliana
  peptide (1)..(537): Ceres Seq. ID no. 12725099
MSFTTSLPYPFHILLVFILSMASITLLGRILSRPTKTKDRSCQLPPGPPGWPILGNLPELFMTRPRSKYFRLAMKELKTDIACFNFAGIRAITINSDEIAREAFRERDADLADRPQLFIMETIGDNYKSMGISPYGEQFMKMKRVITTEIMSVKTLKMLEAARTIEADNLIAYVHSMYQRSETVDVRELSRVYGYAVTMRMLFGRRHVTKENVFSDDGRLGNAEKHHLEVIFNTLNCLPSFSPADYVERWLRGWNVDGQEKRVTENCNIVRSYNNPIIDERVQLWREEGGKAAVEDWLDTFITLKDQNGKYLVTPDEIKAQCVEFCIAAIDNPANNMEWTLGEMLKNPEILRKALKELDEVVGRDRLVQESDIPNLNYLKACCRETFRIHPSAHYVPSHLARQDTTLGGYFIPKGSHIHVCRPGLGRNPKIWKDPLVYKPERHLQGDGITKEVTLVETEMRFVSFSTGRRGCIGVKVGTIMMVMLLARFLQGFNWKLHQDFGPLSLEEDDASLLMAKPLHLSVEPRLAPNLYPKFRP

SEQ ID NO: 90748 - DNA, 2126 bp, Arabidopsis thaliana
  misc_feature (1)..(2126): Ceres Seq. ID no. 12725137
  misc_feature (1)..(2126): Ortholog of  Ceres SEQ ID NO 14311055 as cited in SEQ ID NO 53705
agtgcgactttgcctcttttcaatgcccaatttcttgagattctggctgttctgcatccaaatattaaacaatcaattccttttataaaaagcaaaagacagaaatatttattattaagctaaagaattgatcaaaaaactcgattcacttttctcaaaaacccgaatataatctcattcccaatagcttccacttccatcgagagattttctttctttgtttttttctgtgattttctccaatggctaactccaagaagcaagcatggtttttttataccacaggcttaccaagtgacatagaaatcgaagttgatgatataacatttcatcttcataagtttcctctaatgtcaaaaagcaaaaaacttcaccaactaataacagagcaagaacagagtaaagtttattctcacatcaagctcgagaattttccaggaggttcagagattttcgagatggtgataaagataagctacggtttcaaagtcgacatctctgtttccacagctgttccactccgttgcgccgccgagtatctagaaatgacggaagagtactcaccggagaatctcatttcaaaaacagagaagtttctttcagagttcgtcttcactaacgtacaagaatccatcaaagcgttgaaagcttgtgaatcagtctcgtctttagctgaatcactctgtataacggaacagtgtatagactccatcgtcttccaagcttcctcaaccgatccgtcgtcgttttacggttggccaataaacaacggaggtatattcaccgttgaccggaagaaacagagcaaagattcgaaaacagagctttggttcgaagatctaacggagttgagttttccaatcttcagacgtgtgatcttatccatgaagtcgagtgtcctgagtcctgagattgtagagagatctctacttacttacgcgaagaaacacattccaggaatctcgcgttcatcgtcagcatcttcatcttcttcttcttcttccaccaccatagcttccgagaatcaacaaagagaattattagagacgataacttcagatcttccattaactgcgacgactacgagatctctcttcggtttgttacgagccgcgatcattctcaacgcctccgagaattgcaggaagtttctagagaaaaaaatcggatcgaatcttgagaaagctacgcttgatgatcttctcattccaagttactcgtatctcaacgaaacgttatacgatattgatttggtggagagactcttacgtcgttttctcgaaaacgtcgccgtgtcgtcgtcgtcattgacggtggttgggagattgatcgacggagttctcggtgaaattgcatcggacgctaatcttaaaccggaacagttttataatctggcggttttgcttccggttcaagcacgggtttacgatgatggactatacagagccgtcgatatatatttcaagactcattcatggatattggaggaagagaaggagaagatttgtagcgtgatggattgtagaaaactgactgttgaaggatgcacacacgcggcacaaaacgagcgtttaccactacgagccgtcgtacaagttctgtttttggagcagctacagctccggcaagtaatcactgggactttactgacggaggaagacggtgataaaacggtggtggacttgggtagatggaaggaagcggtgaaggagaatcaggtgcttcgtttggatatggatacgatgaggacacgagtgaaccagctagagaaagaatgcttgtacttgaagaaagtgatcgcgaagatcgacaaagaaagtttgttgaaggcgaagcatggggcggggaaatggtcaatcgggaagaagttcggatgcaaattttcggctcaagtttgtgattcacaggaggcaacgatggtcgatagaagatcacgacgttttcttagttagtacataaatcagaatcatcttgtgcttctaaaaattgtatttttacttcttctgtatatcttaaagaaaaagattgatactttagattgaatggaactctaaaacacaccctgatggacttgttattcagagaatcatagtataatgatttagagattatgaatgtaaatttgt

SEQ ID NO: 90749 - protein, 569 aa, Arabidopsis thaliana
  peptide (1)..(569): Ceres Seq. ID no. 12725138
MANSKKQAWFFYTTGLPSDIEIEVDDITFHLHKFPLMSKSKKLHQLITEQEQSKVYSHIKLENFPGGSEIFEMVIKISYGFKVDISVSTAVPLRCAAEYLEMTEEYSPENLISKTEKFLSEFVFTNVQESIKALKACESVSSLAESLCITEQCIDSIVFQASSTDPSSFYGWPINNGGIFTVDRKKQSKDSKTELWFEDLTELSFPIFRRVILSMKSSVLSPEIVERSLLTYAKKHIPGISRSSSASSSSSSSSTTIASENQQRELLETITSDLPLTATTTRSLFGLLRAAIILNASENCRKFLEKKIGSNLEKATLDDLLIPSYSYLNETLYDIDLVERLLRRFLENVAVSSSSLTVVGRLIDGVLGEIASDANLKPEQFYNLAVLLPVQARVYDDGLYRAVDIYFKTHSWILEEEKEKICSVMDCRKLTVEGCTHAAQNERLPLRAVVQVLFLEQLQLRQVITGTLLTEEDGDKTVVDLGRWKEAVKENQVLRLDMDTMRTRVNQLEKECLYLKKVIAKIDKESLLKAKHGAGKWSIGKKFGCKFSAQVCDSQEATMVDRRSRRFLS

SEQ ID NO: 90750 - protein, 533 aa, Arabidopsis thaliana
  peptide (1)..(533): Ceres Seq. ID no. 12725139
MSKSKKLHQLITEQEQSKVYSHIKLENFPGGSEIFEMVIKISYGFKVDISVSTAVPLRCAAEYLEMTEEYSPENLISKTEKFLSEFVFTNVQESIKALKACESVSSLAESLCITEQCIDSIVFQASSTDPSSFYGWPINNGGIFTVDRKKQSKDSKTELWFEDLTELSFPIFRRVILSMKSSVLSPEIVERSLLTYAKKHIPGISRSSSASSSSSSSSTTIASENQQRELLETITSDLPLTATTTRSLFGLLRAAIILNASENCRKFLEKKIGSNLEKATLDDLLIPSYSYLNETLYDIDLVERLLRRFLENVAVSSSSLTVVGRLIDGVLGEIASDANLKPEQFYNLAVLLPVQARVYDDGLYRAVDIYFKTHSWILEEEKEKICSVMDCRKLTVEGCTHAAQNERLPLRAVVQVLFLEQLQLRQVITGTLLTEEDGDKTVVDLGRWKEAVKENQVLRLDMDTMRTRVNQLEKECLYLKKVIAKIDKESLLKAKHGAGKWSIGKKFGCKFSAQVCDSQEATMVDRRSRRFLS

SEQ ID NO: 90751 - protein, 497 aa, Arabidopsis thaliana
  peptide (1)..(497): Ceres Seq. ID no. 12725140
MVIKISYGFKVDISVSTAVPLRCAAEYLEMTEEYSPENLISKTEKFLSEFVFTNVQESIKALKACESVSSLAESLCITEQCIDSIVFQASSTDPSSFYGWPINNGGIFTVDRKKQSKDSKTELWFEDLTELSFPIFRRVILSMKSSVLSPEIVERSLLTYAKKHIPGISRSSSASSSSSSSSTTIASENQQRELLETITSDLPLTATTTRSLFGLLRAAIILNASENCRKFLEKKIGSNLEKATLDDLLIPSYSYLNETLYDIDLVERLLRRFLENVAVSSSSLTVVGRLIDGVLGEIASDANLKPEQFYNLAVLLPVQARVYDDGLYRAVDIYFKTHSWILEEEKEKICSVMDCRKLTVEGCTHAAQNERLPLRAVVQVLFLEQLQLRQVITGTLLTEEDGDKTVVDLGRWKEAVKENQVLRLDMDTMRTRVNQLEKECLYLKKVIAKIDKESLLKAKHGAGKWSIGKKFGCKFSAQVCDSQEATMVDRRSRRFLS

SEQ ID NO: 90752 - DNA, 1605 bp, Arabidopsis thaliana
  misc_feature (1)..(1605): Ceres Seq. ID no. 12725144
  misc_feature (1)..(1605): Ortholog of  Ceres SEQ ID NO 12612314 as cited in SEQ ID NO 51420
  misc_feature (1)..(1605): Ortholog of  Ceres SEQ ID NO 14306493 as cited in SEQ ID NO 53170
  misc_feature (1)..(1605): Ortholog of  Ceres SEQ ID NO 14311095 as cited in SEQ ID NO 53197
atgagctcctctgactcttcttccgccgaatcccgtctagccacggctaagacggttctcaccaccgcggcttcggtggctgcgaccgcaatgctagctcgatctttagtccaagattatttgcctgacgaggtgcatcactacatttcctatggattccgttccatctttggttacttctcatcccaaatgacgataatcatcgaagaatttgaaggttttgctcacaatgaagtctttgaagctgcagaggcctatctagccaccaagatctctccttctaacaaaagaatcaaagtgagtaaacatgagaaagaaaacaactacaatgtcaccgtggagcgtgacgaagaagttgttgacacctacaatggcgtcaaattccagtggatcctccattgtcgtcatgtcgagtccaagcacttccacaacccacgggatctaaactccacactgagatctgaggtccgatcattcgaactcaacttccacaagaaattcaaagacgtagctcttgaatcttacttgccattcatggtgaaaagagccacgttgatgaagcaagagaagaaaacactcaagatcttcactctctccccagaaaacatgtatgggaactactctgacgcgtggacctctgttactcttgaccatccttctaccttcaaaactctagcaatggattcagatgtcaagacaagtgtgatggaagatctagacaaattcgtaaagcgaagagacttctataaaagggttggtaaagcttggaagagaggttacttgctgtacggtccaccaggcacagggaagtcaagcttgatcgcagccatggccaatcatctcaactttgatatatacgacctagagttgaccgcggttaacaacaattctgagctccggcgattattgattgccactgctaatcgttcgattcttatcgtagaagatatcgattgttcactagaattgaaagataggactagcgatgaacctcctcgggaatctgacgatatagaagatccacggtataaaaaagtgacactctctggactgttgaatttcatagatggtctatggtcaagctgcggtgacgaaaggatcataatcttcacaaccaattacaaagagaaactcgacgcggccttgctgagaccaggacgtatggatatgcacatccacatgtcgtattgcacaccaagtactttcaaagctcttgctttgaactatcttgagatcaaagagcaccgccttttcagcaagatcgaggaaggtattgaggcgacagaggtcactccagcagaagtagctgaacagcttatgagaaatgactctgtagacaaggttcttgagggtttgattgagttcttgaaagtcaagaagatcgaaaacgaacaagataaggccaaaacagagaagcaagagttggagaacaagaaaaagaccaaggagggaacagattccgtagtcaagaaagaggttgatgaacagctagtgaggaatgaccgtgttgataaggttcttgagggtttggtcgagttgttaaaagccaagaagatcgaggacgaccaagataaagccaaacatgaggaggttgaacaacattaa

SEQ ID NO: 90753 - protein, 534 aa, Arabidopsis thaliana; identical to SEQ ID NO: 22006
  peptide (1)..(534): Ceres Seq. ID no. 12725145

SEQ ID NO: 90754 - protein, 504 aa, Arabidopsis thaliana; identical to SEQ ID NO: 22007
  peptide (1)..(504): Ceres Seq. ID no. 12725146

SEQ ID NO: 90755 - protein, 471 aa, Arabidopsis thaliana
  peptide (1)..(471): Ceres Seq. ID no. 12725147
MTIIIEEFEGFAHNEVFEAAEAYLATKISPSNKRIKVSKHEKENNYNVTVERDEEVVDTYNGVKFQWILHCRHVESKHFHNPRDLNSTLRSEVRSFELNFHKKFKDVALESYLPFMVKRATLMKQEKKTLKIFTLSPENMYGNYSDAWTSVTLDHPSTFKTLAMDSDVKTSVMEDLDKFVKRRDFYKRVGKAWKRGYLLYGPPGTGKSSLIAAMANHLNFDIYDLELTAVNNNSELRRLLIATANRSILIVEDIDCSLELKDRTSDEPPRESDDIEDPRYKKVTLSGLLNFIDGLWSSCGDERIIIFTTNYKEKLDAALLRPGRMDMHIHMSYCTPSTFKALALNYLEIKEHRLFSKIEEGIEATEVTPAEVAEQLMRNDSVDKVLEGLIEFLKVKKIENEQDKAKTEKQELENKKKTKEGTDSVVKKEVDEQLVRNDRVDKVLEGLVELLKAKKIEDDQDKAKHEEVEQH

SEQ ID NO: 90756 - DNA, 1011 bp, Arabidopsis thaliana
  misc_feature (1)..(1011): Ceres Seq. ID no. 12725156
  misc_feature (1)..(1011): Ortholog of  Ceres SEQ ID NO 13596474 as cited in SEQ ID NO 62169
  misc_feature (1)..(1011): Ortholog of  Ceres SEQ ID NO 13598714 as cited in SEQ ID NO 62656
  misc_feature (1)..(1011): Ortholog of  Ceres SEQ ID NO 13596969 as cited in SEQ ID NO 63375
  misc_feature (1)..(1011): Ortholog of  Ceres SEQ ID NO 13597519 as cited in SEQ ID NO 64759
  misc_feature (1)..(1011): Ortholog of  Ceres SEQ ID NO 13597870 as cited in SEQ ID NO 64982
  misc_feature (1)..(1011): Ortholog of  Ceres SEQ ID NO 13587054 as cited in SEQ ID NO 0
atggcgggcattgttctctctcaaatctcacttgttgcgctgtttcctctatgtatttgttatcaaacacatcaaagcacgagctctgtagcctctctatcccctcagttttacgagaactcgtgcccaaacgcacaagccatcgttcaatcttacgtcgccaatgcatacttcaatgaccctcgcatggctgcctcaattcttaggctccatttccacgactgtttcgtcaatggatgtgatgcttccgtactattggacagtagtggaaccatggaaagcgagaaacgatcaaatgcaaatcgagactctgctcgagggttcgaagtcattgacgagatcaagtctgccttggaaaatgaatgtcctgaaacagtttcttgcgccgatctattggctctcgttgctagagactctattgttatttgtggtggacctagttgggaagtatatcttggaagaagagatgcaagagaagcaagcttgattggttccatggaaaacattccttctcccgagtccacgttacaaacaattctcactatgttcaactttcaaggacttgatctcaccgatcttgttgccctcttagggagtcacacgataggaaactcaaggtgtattggtttccgacaaaggttatacaaccatactggaaacaacgatcccgaccagactttgaatcaagactacgcctctatgttgcagcagggatgtccgatttcgggcaacgaccagaacctctttaatcttgactatgtgacgccgactaagtttgacaattactactacaagaatcttgtgaactttagaggactcttgagttctgatgagatattgttcacgcaaagcatagagactatggagatggtcaagtattacgcggagaatgagggagcgttctttgagcagtttgcgaagtcgatggtgaagatggggaacatctcaccgttgacggggacggatggtgagatccggaggatatgccggagggttaaccatgatgtttga

SEQ ID NO: 90757 - protein, 336 aa, Arabidopsis thaliana
  peptide (1)..(336): Ceres Seq. ID no. 12725157
MAGIVLSQISLVALFPLCICYQTHQSTSSVASLSPQFYENSCPNAQAIVQSYVANAYFNDPRMAASILRLHFHDCFVNGCDASVLLDSSGTMESEKRSNANRDSARGFEVIDEIKSALENECPETVSCADLLALVARDSIVICGGPSWEVYLGRRDAREASLIGSMENIPSPESTLQTILTMFNFQGLDLTDLVALLGSHTIGNSRCIGFRQRLYNHTGNNDPDQTLNQDYASMLQQGCPISGNDQNLFNLDYVTPTKFDNYYYKNLVNFRGLLSSDEILFTQSIETMEMVKYYAENEGAFFEQFAKSMVKMGNISPLTGTDGEIRRICRRVNHDV

SEQ ID NO: 90758 - protein, 274 aa, Arabidopsis thaliana
  peptide (1)..(274): Ceres Seq. ID no. 12725158
MAASILRLHFHDCFVNGCDASVLLDSSGTMESEKRSNANRDSARGFEVIDEIKSALENECPETVSCADLLALVARDSIVICGGPSWEVYLGRRDAREASLIGSMENIPSPESTLQTILTMFNFQGLDLTDLVALLGSHTIGNSRCIGFRQRLYNHTGNNDPDQTLNQDYASMLQQGCPISGNDQNLFNLDYVTPTKFDNYYYKNLVNFRGLLSSDEILFTQSIETMEMVKYYAENEGAFFEQFAKSMVKMGNISPLTGTDGEIRRICRRVNHDV

SEQ ID NO: 90759 - protein, 245 aa, Arabidopsis thaliana
  peptide (1)..(245): Ceres Seq. ID no. 12725159
MESEKRSNANRDSARGFEVIDEIKSALENECPETVSCADLLALVARDSIVICGGPSWEVYLGRRDAREASLIGSMENIPSPESTLQTILTMFNFQGLDLTDLVALLGSHTIGNSRCIGFRQRLYNHTGNNDPDQTLNQDYASMLQQGCPISGNDQNLFNLDYVTPTKFDNYYYKNLVNFRGLLSSDEILFTQSIETMEMVKYYAENEGAFFEQFAKSMVKMGNISPLTGTDGEIRRICRRVNHDV

SEQ ID NO: 90760 - DNA, 1128 bp, Arabidopsis thaliana
  misc_feature (1)..(1128): Ceres Seq. ID no. 12725164
  misc_feature (1)..(1128): Ortholog of  Ceres SEQ ID NO 14311832 as cited in SEQ ID NO 59054
aaatttttcttcttttgaccaccattgcatgcttacccgattgggaaactctttgttatccttattgatcttcttccaacggcgatttcccgatccaaattttgggttgattgaattcaaagtttccgtttttacaaaccaatttcgggaaagttttcatcttttttttatggctgcttacgcgaattatctccgactcgcacgacttggaggaacaagttcaggtgtaaacctgtcgactctcagatcattcggttattcaaatccagcatttgacaagactcaagagtttcgctcctcttcttcatcgttagtatcatattcttcgttcagacaattccacgccagattcatatctcagcttatcaaaaccaatgggaaacgtttgtttcttgtcgatacactagctttggttaggagcttagaagcacaaggcctgccttcaaagcaagccgaggcaataaccggtgctataactgaagttcttaacgatagcttaggagttgtttcacagttagttgtctccaagggagagatgcagaaagctgaaatgacgcaggaatcaaacttatccaagttcaaaagtgaaattaatagttcactggaccaccatttctctttgctgcaacacgagaatgagaaactccgcaatgacatagagcgaatccgctctgatataagacacgagatcgataaagtcacagcaggacaacggttggacctgaatcttgaaaaagggaggataagagatgagttacaaaatcaaaacggagaaacctctaaccttacaaacaaacttgaccgtgagattcacactttgagagctcagttagaagcagccaagtatgaggtgatcaagtactgtattggtactcttgtctccatctcagccgttggtctcgctgtcctccggatcgtcatgtaactccatctgacggtgccggttttaaagaccaactcatcaatcttccctgtcttttaattacgggatgaaaatcttggtcatgttaattatatattcgtatgtttaatgtaattgtattcccccttttttatgtgaaagaaataaagaataaccagtctagtaaatttgaacccttcatgtatatgaatatgatgatgttcttt

SEQ ID NO: 90761 - protein, 307 aa, Arabidopsis thaliana
  peptide (1)..(307): Ceres Seq. ID no. 12725165
NFSSFDHHCMLTRLGNSLLSLLIFFQRRFPDPNFGLIEFKVSVFTNQFRESFHLFFMAAYANYLRLARLGGTSSGVNLSTLRSFGYSNPAFDKTQEFRSSSSSLVSYSSFRQFHARFISQLIKTNGKRLFLVDTLALVRSLEAQGLPSKQAEAITGAITEVLNDSLGVVSQLVVSKGEMQKAEMTQESNLSKFKSEINSSLDHHFSLLQHENEKLRNDIERIRSDIRHEIDKVTAGQRLDLNLEKGRIRDELQNQNGETSNLTNKLDREIHTLRAQLEAAKYEVIKYCIGTLVSISAVGLAVLRIVM

SEQ ID NO: 90762 - protein, 298 aa, Arabidopsis thaliana
  peptide (1)..(298): Ceres Seq. ID no. 12725166
MLTRLGNSLLSLLIFFQRRFPDPNFGLIEFKVSVFTNQFRESFHLFFMAAYANYLRLARLGGTSSGVNLSTLRSFGYSNPAFDKTQEFRSSSSSLVSYSSFRQFHARFISQLIKTNGKRLFLVDTLALVRSLEAQGLPSKQAEAITGAITEVLNDSLGVVSQLVVSKGEMQKAEMTQESNLSKFKSEINSSLDHHFSLLQHENEKLRNDIERIRSDIRHEIDKVTAGQRLDLNLEKGRIRDELQNQNGETSNLTNKLDREIHTLRAQLEAAKYEVIKYCIGTLVSISAVGLAVLRIVM

SEQ ID NO: 90763 - protein, 251 aa, Arabidopsis thaliana
  peptide (1)..(251): Ceres Seq. ID no. 12725167
MAAYANYLRLARLGGTSSGVNLSTLRSFGYSNPAFDKTQEFRSSSSSLVSYSSFRQFHARFISQLIKTNGKRLFLVDTLALVRSLEAQGLPSKQAEAITGAITEVLNDSLGVVSQLVVSKGEMQKAEMTQESNLSKFKSEINSSLDHHFSLLQHENEKLRNDIERIRSDIRHEIDKVTAGQRLDLNLEKGRIRDELQNQNGETSNLTNKLDREIHTLRAQLEAAKYEVIKYCIGTLVSISAVGLAVLRIVM

SEQ ID NO: 90764 - DNA, 1250 bp, Arabidopsis thaliana
  misc_feature (1)..(1250): Ceres Seq. ID no. 12725202
  misc_feature (1)..(1250): Ortholog of  Ceres SEQ ID NO 14311961 as cited in SEQ ID NO 51512
accatttttttccacagaaccaatccttctacaatgcctgtattcctctcttctcgttttctcttcttctgcatcatcgtccccttactcatctctatcactctctaccaactcgacacgtttgacccagctcatcatcccgctgactcactcatctcctctactgcttcaatcccgcctctaataaacgaaagatttctcaccggagctgagtttatcggagtcggtcttctcaatagccccgaagacatcgcctaccatgaagactctggtttcatctacactggttgcgttgatggatgggtcaaacgagtcaaggtcgccgagtcggttaatgactcactcgttgaagatttggtcaacaccggtggtagaccgctcggaatcgctttcggaatccacggcgaagtcatcgtcgctgacgcttacaagggactgttgaatataagcggtgacgggaagaagacggaattgttaacggaagaagcggacggcgttagatttaagctaccggatgcagttactgttgcagataacggcgttttgtatttcactgatggttcttataagtacaatctccatcagtttagttttgatatcttggaaggcaaaccacacggtcgtctcatgagctttgatcccaccacaaaagtgacacgtgtacttctcagagatctctactttgctaatggtgtctctctgtctcctgatcaaacccatctcgtcttctgcgaaacccccataagaagatgtagtaagtattacatcaatggagggcgcgtggagttatttattcaaggcttaccaggctatccagataacatccggtatgatggagatggacattactggattgcaatgccttcgggagtaacaacgttgtggaagctttcaatgaaatacccattcttgaggaaaatcacagctatggcggctaagtacggctatgaacctatgtttatggagaatgcaggagttttgcaggtggatttggatgggaaccccatcgcatactaccatgatcaggcgctctctcacataaccaccggtgtcaagattgggaactatctctattgtggaagtctctggcattcacacattctccgacttgatctcctaaaataccctgcacaaaacaagaagctttgaaacttcatgtttataaaaaaaaaagacttttacattttaggagtattcactgtcacaaaatgtaaactcattgtcctgagaatgaatcatgatgtttctct

SEQ ID NO: 90765 - protein, 382 aa, Arabidopsis thaliana
  peptide (1)..(382): Ceres Seq. ID no. 12725203
TIFFHRTNPSTMPVFLSSRFLFFCIIVPLLISITLYQLDTFDPAHHPADSLISSTASIPPLINERFLTGAEFIGVGLLNSPEDIAYHEDSGFIYTGCVDGWVKRVKVAESVNDSLVEDLVNTGGRPLGIAFGIHGEVIVADAYKGLLNISGDGKKTELLTEEADGVRFKLPDAVTVADNGVLYFTDGSYKYNLHQFSFDILEGKPHGRLMSFDPTTKVTRVLLRDLYFANGVSLSPDQTHLVFCETPIRRCSKYYINGGRVELFIQGLPGYPDNIRYDGDGHYWIAMPSGVTTLWKLSMKYPFLRKITAMAAKYGYEPMFMENAGVLQVDLDGNPIAYYHDQALSHITTGVKIGNYLYCGSLWHSHILRLDLLKYPAQNKKL

SEQ ID NO: 90766 - protein, 371 aa, Arabidopsis thaliana
  peptide (1)..(371): Ceres Seq. ID no. 12725204
MPVFLSSRFLFFCIIVPLLISITLYQLDTFDPAHHPADSLISSTASIPPLINERFLTGAEFIGVGLLNSPEDIAYHEDSGFIYTGCVDGWVKRVKVAESVNDSLVEDLVNTGGRPLGIAFGIHGEVIVADAYKGLLNISGDGKKTELLTEEADGVRFKLPDAVTVADNGVLYFTDGSYKYNLHQFSFDILEGKPHGRLMSFDPTTKVTRVLLRDLYFANGVSLSPDQTHLVFCETPIRRCSKYYINGGRVELFIQGLPGYPDNIRYDGDGHYWIAMPSGVTTLWKLSMKYPFLRKITAMAAKYGYEPMFMENAGVLQVDLDGNPIAYYHDQALSHITTGVKIGNYLYCGSLWHSHILRLDLLKYPAQNKKL

SEQ ID NO: 90767 - DNA, 1086 bp, Arabidopsis thaliana
  misc_feature (1)..(1086): Ceres Seq. ID no. 12725205
  misc_feature (1)..(1086): Ortholog of  Ceres SEQ ID NO 12609146 as cited in SEQ ID NO 52118
  misc_feature (1)..(1086): Ortholog of  Ceres SEQ ID NO 13638136 as cited in SEQ ID NO 58644
  misc_feature (1)..(1086): Ortholog of  Ceres SEQ ID NO 15177947 as cited in SEQ ID NO 60308
  misc_feature (1)..(1086): Ortholog of  Ceres SEQ ID NO 13596868 as cited in SEQ ID NO 62806
  misc_feature (1)..(1086): Ortholog of  Ceres SEQ ID NO 15225826 as cited in SEQ ID NO 64774
  misc_feature (1)..(1086): Ortholog of  Ceres SEQ ID NO 13595885 as cited in SEQ ID NO 69265
  misc_feature (1)..(1086): Ortholog of  Ceres SEQ ID NO 12566239 as cited in SEQ ID NO 0
  misc_feature (1)..(1086): Ortholog of  Ceres SEQ ID NO 13599119 as cited in SEQ ID NO 0
atggcaccggtgactgaagtttctccgatgatcaacacattggaagtcgcagatgacaaaatgacgaatctcagttcctctgggaaacctccaagaaacatctctgcaatgcgccattgcaacagcactgcctggttgaccgattacgaaggagatgagagatttggtgcaaaatctccggaaggagtaaattcaacattccagcctgtgtttagatctggaagttggtctgataaaggaccaaaacaatcaatggaagatgaattcatttgtgttgatgatctcactgagtatattggatcatccactggagctttctatggggtgtttgatggacacggaggtgttgatgctgcatcattcacaaaaaagaacattatgaagcttgtaatggaagacaaacatttcccaaccagcacaaagaaggcaacaaggagtgcttttgtgaagactgatcatgctttggctgatgcttcttctcttgatagatcctctggcactactgcactcactgctctcattttggacaagactatgttgattgcaaacgctggtgactccagagcggtgcttgggaaacgaggcagagccattgagttatcaaaggaccacaaacctaactgtacttccgagcggctacgtattgagaagcttggaggtgtgatctacgatggttaccttaacgggcagctatctgtggctcgagccttaggagattggcacattaagggaactaaaggttcactctgcccgctcagctgcgagcctgagctggaagagattgtgctgacggaagaggatgagtatcttataatgggctgtgatggactctgggatgtgatgagtagccagtgtgcagtgacgatggtgaggagggagctgatgcagcataatgatcctgagagatgctctcaagctttggttaaggaggctcttcaacgaaacagctgtgacaatcttactgtagtggttgtctgtttctcgcccgaagcgcctcctcggattgagattcccaagtcgcataagaggaggagcatctctgcagagggattggatctcctcaaaggtgttttgaacgagttgtga

SEQ ID NO: 90768 - protein, 361 aa, Arabidopsis thaliana
  peptide (1)..(361): Ceres Seq. ID no. 12725206
MAPVTEVSPMINTLEVADDKMTNLSSSGKPPRNISAMRHCNSTAWLTDYEGDERFGAKSPEGVNSTFQPVFRSGSWSDKGPKQSMEDEFICVDDLTEYIGSSTGAFYGVFDGHGGVDAASFTKKNIMKLVMEDKHFPTSTKKATRSAFVKTDHALADASSLDRSSGTTALTALILDKTMLIANAGDSRAVLGKRGRAIELSKDHKPNCTSERLRIEKLGGVIYDGYLNGQLSVARALGDWHIKGTKGSLCPLSCEPELEEIVLTEEDEYLIMGCDGLWDVMSSQCAVTMVRRELMQHNDPERCSQALVKEALQRNSCDNLTVVVVCFSPEAPPRIEIPKSHKRRSISAEGLDLLKGVLNEL

SEQ ID NO: 90769 - protein, 352 aa, Arabidopsis thaliana
  peptide (1)..(352): Ceres Seq. ID no. 12725207
MINTLEVADDKMTNLSSSGKPPRNISAMRHCNSTAWLTDYEGDERFGAKSPEGVNSTFQPVFRSGSWSDKGPKQSMEDEFICVDDLTEYIGSSTGAFYGVFDGHGGVDAASFTKKNIMKLVMEDKHFPTSTKKATRSAFVKTDHALADASSLDRSSGTTALTALILDKTMLIANAGDSRAVLGKRGRAIELSKDHKPNCTSERLRIEKLGGVIYDGYLNGQLSVARALGDWHIKGTKGSLCPLSCEPELEEIVLTEEDEYLIMGCDGLWDVMSSQCAVTMVRRELMQHNDPERCSQALVKEALQRNSCDNLTVVVVCFSPEAPPRIEIPKSHKRRSISAEGLDLLKGVLNEL

SEQ ID NO: 90770 - protein, 341 aa, Arabidopsis thaliana
  peptide (1)..(341): Ceres Seq. ID no. 12725208
MTNLSSSGKPPRNISAMRHCNSTAWLTDYEGDERFGAKSPEGVNSTFQPVFRSGSWSDKGPKQSMEDEFICVDDLTEYIGSSTGAFYGVFDGHGGVDAASFTKKNIMKLVMEDKHFPTSTKKATRSAFVKTDHALADASSLDRSSGTTALTALILDKTMLIANAGDSRAVLGKRGRAIELSKDHKPNCTSERLRIEKLGGVIYDGYLNGQLSVARALGDWHIKGTKGSLCPLSCEPELEEIVLTEEDEYLIMGCDGLWDVMSSQCAVTMVRRELMQHNDPERCSQALVKEALQRNSCDNLTVVVVCFSPEAPPRIEIPKSHKRRSISAEGLDLLKGVLNEL

SEQ ID NO: 90771 - DNA, 3066 bp, Arabidopsis thaliana
  misc_feature (1)..(3066): Ceres Seq. ID no. 12725211
  misc_feature (1)..(3066): Ortholog of  Ceres SEQ ID NO 14310362 as cited in SEQ ID NO 54251
  misc_feature (1)..(3066): Ortholog of  Ceres SEQ ID NO 12583314 as cited in SEQ ID NO 56435
  misc_feature (1)..(3066): Ortholog of  Ceres SEQ ID NO 13654989 as cited in SEQ ID NO 63117
  misc_feature (1)..(3066): Ortholog of  Ceres SEQ ID NO 13584744 as cited in SEQ ID NO 69137
atctctgtcttctccaaaaactctctccgatttcatcgcttagggtttcttccccgattcttcagatctgagaagaagatcttcccggagaagtgctcttgatcgatgaagatcacagagggacgattccgtctctctcttcttcttcttcttcttctcatatctgcagcaactttaatctcagctgctgattactctccaacagagaaaatcctattgaattgcggtggtggtgcttctaatctaaccgacacagataaccgtatatggatctccgatgtcaaatcaaaattcttatcatcttcctctgaagactctaaaacatcaccagcgttaacacaagatccttccgttcccgaagttccttacatgacggcgagagttttccgatctcctttcacttacactttccctgtagcatcaggtcgtaaattcgtgcgtctctacttctacccaaactcgtacgacggtctcaacgctaccaactcgttattctccgtctcctttggtccttacactcttctcaagaatttcagtgcttctcagacggcggaggcgttgacttacgctttcatcatcaaagagtttgttgtcaacgttgaaggtggaacgttgaacatgacgtttacaccggaatcagctccgtctaatgcgtatgcgtttgttaatgggattgaggttacttcaatgcctgatatgtatagtagtactgatgggactttgactatggttggatcatctggctctgttactattgataacagtactgctcttgagaatgtgtataggctcaatgttggagggaatgatatctcgccttccgcggatacgggtttgtataggtcgtggtatgatgatcagccttatatatttggtgcaggacttggtattccagagactgctgatcccaacatgacgattaagtatcctacggggactcctacttatgttgctcctgtggatgtttattcaaccgcgaggtctatgggtccaacagctcagatcaatctcaactacaatcttacttggattttcagcattgactctggtttcacttaccttgttagacttcatttctgtgaggtttcttcgaatatcactaagatcaaccaacgggtgtttacaatctacctcaacaatcaaactgctgagcctgaagctgatgtgattgcttggactagttcaaacggggttccgtttcacaaggattacgtggtgaatcctccagagggaaatggacagcaagatttgtggcttgctcttcatcctaacccagttaacaagccggagtattatgattctcttcttaatggagtggagatattcaagatgaatacttctgatggtaatctggctggtaccaatcctatacctggtccacaggtgactgctgatccatctaaagtcctacgcccgactactaggaaatcgaaaagcaatacggctattattgcaggcgcagccagtggtgcagttgttctggcccttatcattgggttttgtgtgtttggtgcttaccgcagacgtaagcgtggtgattaccagcctgctagtgatgcaacatcagggtggcttccactatctctgtatggaaactcacattctgctggctcggcgaagacaaacacaacaggaagttatgcctcgtcccttccgtcaaatctttgccgtcacttctcgtttgctgagatcaaagctgccactaaaaactttgatgagtcccgggtgcttggtgttggtggtttcggcaaggtttacagaggagagattgatggcggaactacaaaggtagccatcaagagaggcaacccaatgtccgagcaaggtgtacatgagttccagactgagattgaaatgctttcaaagcttagacatcgtcatcttgtgtccttgattggatactgtgaagagaactgcgaaatgatcttagtctatgattacatggctcatggtacaatgagggagcatctctacaaaacccagaatccttctcttccatggaagcaacgtcttgagatatgcattggagcagcccgaggtttacactatctacacactggtgcaaaacacacaatcatccatagagatgtgaagacaacaaacattctattggatgagaaatgggtggccaaggtctctgattttggtctatcgaagactggtcctacactagaccacacacacgtaagcacagttgtgaaaggaagtttcggttatcttgacccagagtatttcagacggcagcaactgactgagaaatccgatgtctactcctttggcgttgttctattcgaagctctatgcgctcgtccagccttgaacccaacacttgcaaaggaacaagtgagcttagctgagtgggcaccatactgctacaagaaaggcatgctagatcaaatcgttgatccctacctcaagggcaagatcacaccagaatgcttcaaaaagtttgctgaaaccgcgatgaagtgtgttctagaccagggcattgagagaccatcaatgggagatgttctgtggaacttagaatttgcgttgcagctccaggaaagcgcagaagagaacggaaaaggagtatgcggtgacatggacatggatgagattaagtacgatgatggaaactgtaaaggaaagaacgacaagagttctgatgtgtatgaagggaatgtgacggactcgaggagcagtggaatagatatgagcatcggtggtaggagtttggccagcgaagattcagatggactcactccaagtgctgtgttttctcagatcatgaatccaaagggacgttagagaagtcttataacacggtacaacactactacctttctaaaccggctccatccaaaggagaccggttcgtttctcttttttatattttttttcctcttaactatttattattattctctttgctgttatttatttagaattttggatttgtgtatttgatgccacgatggagagtgtaaaaaataatgtatttttttttcttctttctacaaaaacattaaacatgaatcgcgtcaatgtactatttggtttgttatctataacgtttttggt

SEQ ID NO: 90772 - protein, 895 aa, Arabidopsis thaliana
  peptide (1)..(895): Ceres Seq. ID no. 12725212
MKITEGRFRLSLLLLLLLISAATLISAADYSPTEKILLNCGGGASNLTDTDNRIWISDVKSKFLSSSSEDSKTSPALTQDPSVPEVPYMTARVFRSPFTYTFPVASGRKFVRLYFYPNSYDGLNATNSLFSVSFGPYTLLKNFSASQTAEALTYAFIIKEFVVNVEGGTLNMTFTPESAPSNAYAFVNGIEVTSMPDMYSSTDGTLTMVGSSGSVTIDNSTALENVYRLNVGGNDISPSADTGLYRSWYDDQPYIFGAGLGIPETADPNMTIKYPTGTPTYVAPVDVYSTARSMGPTAQINLNYNLTWIFSIDSGFTYLVRLHFCEVSSNITKINQRVFTIYLNNQTAEPEADVIAWTSSNGVPFHKDYVVNPPEGNGQQDLWLALHPNPVNKPEYYDSLLNGVEIFKMNTSDGNLAGTNPIPGPQVTADPSKVLRPTTRKSKSNTAIIAGAASGAVVLALIIGFCVFGAYRRRKRGDYQPASDATSGWLPLSLYGNSHSAGSAKTNTTGSYASSLPSNLCRHFSFAEIKAATKNFDESRVLGVGGFGKVYRGEIDGGTTKVAIKRGNPMSEQGVHEFQTEIEMLSKLRHRHLVSLIGYCEENCEMILVYDYMAHGTMREHLYKTQNPSLPWKQRLEICIGAARGLHYLHTGAKHTIIHRDVKTTNILLDEKWVAKVSDFGLSKTGPTLDHTHVSTVVKGSFGYLDPEYFRRQQLTEKSDVYSFGVVLFEALCARPALNPTLAKEQVSLAEWAPYCYKKGMLDQIVDPYLKGKITPECFKKFAETAMKCVLDQGIERPSMGDVLWNLEFALQLQESAEENGKGVCGDMDMDEIKYDDGNCKGKNDKSSDVYEGNVTDSRSSGIDMSIGGRSLASEDSDGLTPSAVFSQIMNPKGR

SEQ ID NO: 90773 - protein, 807 aa, Arabidopsis thaliana
  peptide (1)..(807): Ceres Seq. ID no. 12725213
MTARVFRSPFTYTFPVASGRKFVRLYFYPNSYDGLNATNSLFSVSFGPYTLLKNFSASQTAEALTYAFIIKEFVVNVEGGTLNMTFTPESAPSNAYAFVNGIEVTSMPDMYSSTDGTLTMVGSSGSVTIDNSTALENVYRLNVGGNDISPSADTGLYRSWYDDQPYIFGAGLGIPETADPNMTIKYPTGTPTYVAPVDVYSTARSMGPTAQINLNYNLTWIFSIDSGFTYLVRLHFCEVSSNITKINQRVFTIYLNNQTAEPEADVIAWTSSNGVPFHKDYVVNPPEGNGQQDLWLALHPNPVNKPEYYDSLLNGVEIFKMNTSDGNLAGTNPIPGPQVTADPSKVLRPTTRKSKSNTAIIAGAASGAVVLALIIGFCVFGAYRRRKRGDYQPASDATSGWLPLSLYGNSHSAGSAKTNTTGSYASSLPSNLCRHFSFAEIKAATKNFDESRVLGVGGFGKVYRGEIDGGTTKVAIKRGNPMSEQGVHEFQTEIEMLSKLRHRHLVSLIGYCEENCEMILVYDYMAHGTMREHLYKTQNPSLPWKQRLEICIGAARGLHYLHTGAKHTIIHRDVKTTNILLDEKWVAKVSDFGLSKTGPTLDHTHVSTVVKGSFGYLDPEYFRRQQLTEKSDVYSFGVVLFEALCARPALNPTLAKEQVSLAEWAPYCYKKGMLDQIVDPYLKGKITPECFKKFAETAMKCVLDQGIERPSMGDVLWNLEFALQLQESAEENGKGVCGDMDMDEIKYDDGNCKGKNDKSSDVYEGNVTDSRSSGIDMSIGGRSLASEDSDGLTPSAVFSQIMNPKGR

SEQ ID NO: 90774 - protein, 724 aa, Arabidopsis thaliana
  peptide (1)..(724): Ceres Seq. ID no. 12725214
MTFTPESAPSNAYAFVNGIEVTSMPDMYSSTDGTLTMVGSSGSVTIDNSTALENVYRLNVGGNDISPSADTGLYRSWYDDQPYIFGAGLGIPETADPNMTIKYPTGTPTYVAPVDVYSTARSMGPTAQINLNYNLTWIFSIDSGFTYLVRLHFCEVSSNITKINQRVFTIYLNNQTAEPEADVIAWTSSNGVPFHKDYVVNPPEGNGQQDLWLALHPNPVNKPEYYDSLLNGVEIFKMNTSDGNLAGTNPIPGPQVTADPSKVLRPTTRKSKSNTAIIAGAASGAVVLALIIGFCVFGAYRRRKRGDYQPASDATSGWLPLSLYGNSHSAGSAKTNTTGSYASSLPSNLCRHFSFAEIKAATKNFDESRVLGVGGFGKVYRGEIDGGTTKVAIKRGNPMSEQGVHEFQTEIEMLSKLRHRHLVSLIGYCEENCEMILVYDYMAHGTMREHLYKTQNPSLPWKQRLEICIGAARGLHYLHTGAKHTIIHRDVKTTNILLDEKWVAKVSDFGLSKTGPTLDHTHVSTVVKGSFGYLDPEYFRRQQLTEKSDVYSFGVVLFEALCARPALNPTLAKEQVSLAEWAPYCYKKGMLDQIVDPYLKGKITPECFKKFAETAMKCVLDQGIERPSMGDVLWNLEFALQLQESAEENGKGVCGDMDMDEIKYDDGNCKGKNDKSSDVYEGNVTDSRSSGIDMSIGGRSLASEDSDGLTPSAVFSQIMNPKGR

SEQ ID NO: 90775 - DNA, 990 bp, Arabidopsis thaliana
  misc_feature (1)..(990): Ceres Seq. ID no. 12725215
  misc_feature (1)..(990): Ortholog of  Ceres SEQ ID NO 14308600 as cited in SEQ ID NO 60485
  misc_feature (1)..(990): Ortholog of  Ceres SEQ ID NO 13584797 as cited in SEQ ID NO 69087
ctcttcctcttctacgatctcttcttctctctttgttgcagtctcttctcatcttctccactctcgtctctcaagtatggttaattacaggattaatttccaacatctattatatatataaactcgttgaaatcataatttttttcttcagatattaagtaaacaaattggccatcgacgagagactcaaagagagacccatctccatggcaccaaggtggaaatggaaaggtgctgaggcaaaggcacttgcagaacctgtttcgaaaacagtctcggagctgagatcttcattgacccaaaccgaggctttaggtttcctctcaagttgtaacgtacttttatcggttgagtcagaggaagctgagcttttggatcgttgttgttttggtagactagttgttggtgctgagaaagataagagatggattcagttatcctttgaagaagctttctttttgttttacaaactgaaatgcatcaagatttgccttcacggtcgttctctggaaaacgaggtagatttatggcgatccatgagttcctttaagcaagattttgcgatcttgtacaaggcttattcgcatctacgatcgaagaactggattgtgagatcagggttacaatatggagttgatttcgtggtgtatagacatcatccatctcttgtccactctgaatacgccgttcttgttcagtccattggcgggaatgatcggttaaaggtgtggtccgatatccattgcagtgttcgactaaccggaagcgtcgcgaaatcattgttggttctttacgtcaacagaaaagtcaacacagagaagatgaatctgcctttgtgtttagaggactacacagttgaagagcaaacaatacgtagatggagtccagaacttagccgtgaagatgaaaccagaacatgattaagcttacatgttaacaagtcttgttgtaatgctgatttctagaagaatataaaatgaactaggttcc

SEQ ID NO: 90776 - protein, 237 aa, Arabidopsis thaliana
  peptide (1)..(237): Ceres Seq. ID no. 12725216
MAPRWKWKGAEAKALAEPVSKTVSELRSSLTQTEALGFLSSCNVLLSVESEEAELLDRCCFGRLVVGAEKDKRWIQLSFEEAFFLFYKLKCIKICLHGRSLENEVDLWRSMSSFKQDFAILYKAYSHLRSKNWIVRSGLQYGVDFVVYRHHPSLVHSEYAVLVQSIGGNDRLKVWSDIHCSVRLTGSVAKSLLVLYVNRKVNTEKMNLPLCLEDYTVEEQTIRRWSPELSREDETRT

SEQ ID NO: 90777 - protein, 127 aa, Arabidopsis thaliana
  peptide (1)..(127): Ceres Seq. ID no. 12725217
MSSFKQDFAILYKAYSHLRSKNWIVRSGLQYGVDFVVYRHHPSLVHSEYAVLVQSIGGNDRLKVWSDIHCSVRLTGSVAKSLLVLYVNRKVNTEKMNLPLCLEDYTVEEQTIRRWSPELSREDETRT

SEQ ID NO: 90778 - DNA, 3177 bp, Arabidopsis thaliana
  misc_feature (1)..(3177): Ceres Seq. ID no. 12725257
  misc_feature (1)..(3177): Ortholog of  Ceres SEQ ID NO 13600310 as cited in SEQ ID NO 5086
atggattcgattcagcaacgaagaggtgggattgtatctctctctccagctcagacaccacgatcaagtgacaaatcagcaagagaatcgagatcttctgaatcaaattcaaccaatagaaatgataaagaaaagggtgtgaatgtgcaggtcatattgcgttgcaggccattgagtgaggatgaagctagaattcatacaccggtggtgatttcttgtaacgagaaccgtagagaagttgctgccactcagagtattgctggaaagcatattgatagacattttgctttcgataaggtcttcggtccagcatctcaacagaaggacttatatgaccaagccatttgtccaattgtgtttgaagtacttgagggttacaactgtaccatatttgcgtatggtcagaccggaactggaaagacgtatacgatggaaggaggtgcaaggaaaaagaatggtgagttcccgagtgacgcaggtgttattccaagagctgttaagcaaattttcgacatattagaagctcagggggctgaatatagcatgaaggtcaccttcctagaactatataatgaggaaatctcagatcttttagcaccagaggagactataaaatttgttgatgagaagtctaaaaaatcgattgccctcatggaagacgggaaaggaagtgtctttgtccgtgggttagaagaagagatagtaagtacagcgaatgagatatacaagatcttagaaaaaggttccgcgaaaaggcgtacagctgaaactcttttgaataagcaaagtagtcgctctcattcaatattttccataaccattcacattaaggaaaatactccagagggagaagagatgatcaaatgtgggaaactaaatcttgttgaccttgctggttccgagaatatctcacgttctggtgcacgagagggacgagccagagaagctggagagatcaacaagagtttacttactcttggccgtgtcattaacgcgcttgtggagcactctggtcatattccttacagagatagcaaattgacgaggctcttgagagaatcattgggaggaaagacgaaaacttgtgtaatcgccacaatttcaccttccatccactgtttagaagagactctaagcactttggattatgcacatcgcgccaagaatatcaagaacaaaccagagatcaaccagaagatgatgaaatctgctgtcatgaaagatctgtactctgagattgacagactgaagcaagaggtatatgctgcaagagagaagaatgggatttatattccaaaagaccgctacattcaagaagaggctgagaaaaaggcaatggctgaaaagatagaaagattagaacttcaatcagaatccaaggacaagcgagtcgttgaccttcaggagctatacaattctcagcagattttaactgcagagttgagtgagaaacttgaaaaaactgagaaaaagcttgaggaaactgagcactcattgtttgatcttgaagagaaatacagacaggcgaatgcaaccattaaagagaaggaatttgtgatatctaatctcctcaagtcagaaaaatcacttgtcgagcgagcctttcagctacgcacagaactagaaagtgcatcatcagatgtttccaacttgttttccaaaatagaaagaaaggacaaaatcgaggatggaaacagatttctcatccaaaagttccagtcacagctcacacaacagcttgagctattgcataagactgtggcttcttcggtgactcaacaagaggttcaactaaaacacatggaggaagacatggagtcctttgtgtcgacaaaatctgaggctactgaagaactccgtgatagactttcaaaactgaagagagtttatggttctggcattgaagctcttgataacatagctgtgaagctagatggaaattctcagtcaacatttagtagccttaactcagaagtttcgaaacattcgcatgaacttgagaatgttttcaagggttttgcttccgaggctgacatgttactgcaagatctccaaagtagccttaacaaacaggaagagaagcttattacatttgcacagcagcaacggaaggcacactcgcgagctgtggatacagcaaggtcagtttcaaaagtaacagtagaattcttcaagactctagacacacatgctaccaaattaaccgggatagtagaagaggcacagacagttaaccacaagaaattgagcgaatttgaaaacaagtttgaggaatgtgctgcaaatgaagagagacaattgctagagaaagtagcagagcttcttgcaaattctaatgctaggaagaaaaaccttgtccaaatggctgtacacgatctacgcgagagcgcatccaccagaactactaccctacagcatgagatgtcaacaatgcaagattcaacttcttccattaaagcagagtggagcattcacatggagaaaacagaatcaagccaccacgaggacacttcagcagttgagagcgggaagaaagctatgcaagaagttctcttaaactgtttggagaagaccgagatgagtgcacatcaatggaggaaagctcaagaatcacttgtcagtctagaacgaaacaatgtggcttctgttgactccatcgttagaggtggcatggatgccaatgagaacctacgctctcaattctcgaccgctgtttcatcctctcttgatgtttttgatgctgcaaatagtagcctccttacttccatcgatcattcattgcaactcgataatgatgcatgtacaaaggtcaactccatgatcattccatgctgtgaagacttgatagagctaaagagtgatcacaatcacaagatcatagagatcacagagaatgcagggaaatgtcttcttgatgaatatgtagtggatgaaccatcatgttcaacgccaaagaaaagaccaatcgacataccaagcattgagtccatcgaagagcttagaactccagcatctgaggagttactgagagcgtttcgtgatgagaagttgtcgaagcaagccaatggggatgcaaagcagcagcagcagcagcaacaacaacaccttatacgcgcttcgtctctttacgaggcagctgtgtcggattcaagatatcccctctctgctgttaactga

SEQ ID NO: 90779 - protein, 1058 aa, Arabidopsis thaliana
  peptide (1)..(1058): Ceres Seq. ID no. 12725258
MDSIQQRRGGIVSLSPAQTPRSSDKSARESRSSESNSTNRNDKEKGVNVQVILRCRPLSEDEARIHTPVVISCNENRREVAATQSIAGKHIDRHFAFDKVFGPASQQKDLYDQAICPIVFEVLEGYNCTIFAYGQTGTGKTYTMEGGARKKNGEFPSDAGVIPRAVKQIFDILEAQGAEYSMKVTFLELYNEEISDLLAPEETIKFVDEKSKKSIALMEDGKGSVFVRGLEEEIVSTANEIYKILEKGSAKRRTAETLLNKQSSRSHSIFSITIHIKENTPEGEEMIKCGKLNLVDLAGSENISRSGAREGRAREAGEINKSLLTLGRVINALVEHSGHIPYRDSKLTRLLRESLGGKTKTCVIATISPSIHCLEETLSTLDYAHRAKNIKNKPEINQKMMKSAVMKDLYSEIDRLKQEVYAAREKNGIYIPKDRYIQEEAEKKAMAEKIERLELQSESKDKRVVDLQELYNSQQILTAELSEKLEKTEKKLEETEHSLFDLEEKYRQANATIKEKEFVISNLLKSEKSLVERAFQLRTELESASSDVSNLFSKIERKDKIEDGNRFLIQKFQSQLTQQLELLHKTVASSVTQQEVQLKHMEEDMESFVSTKSEATEELRDRLSKLKRVYGSGIEALDNIAVKLDGNSQSTFSSLNSEVSKHSHELENVFKGFASEADMLLQDLQSSLNKQEEKLITFAQQQRKAHSRAVDTARSVSKVTVEFFKTLDTHATKLTGIVEEAQTVNHKKLSEFENKFEECAANEERQLLEKVAELLANSNARKKNLVQMAVHDLRESASTRTTTLQHEMSTMQDSTSSIKAEWSIHMEKTESSHHEDTSAVESGKKAMQEVLLNCLEKTEMSAHQWRKAQESLVSLERNNVASVDSIVRGGMDANENLRSQFSTAVSSSLDVFDAANSSLLTSIDHSLQLDNDACTKVNSMIIPCCEDLIELKSDHNHKIIEITENAGKCLLDEYVVDEPSCSTPKKRPIDIPSIESIEELRTPASEELLRAFRDEKLSKQANGDAKQQQQQQQQHLIRASSLYEAAVSDSRYPLSAVN

SEQ ID NO: 90780 - protein, 915 aa, Arabidopsis thaliana
  peptide (1)..(915): Ceres Seq. ID no. 12725259
MEGGARKKNGEFPSDAGVIPRAVKQIFDILEAQGAEYSMKVTFLELYNEEISDLLAPEETIKFVDEKSKKSIALMEDGKGSVFVRGLEEEIVSTANEIYKILEKGSAKRRTAETLLNKQSSRSHSIFSITIHIKENTPEGEEMIKCGKLNLVDLAGSENISRSGAREGRAREAGEINKSLLTLGRVINALVEHSGHIPYRDSKLTRLLRESLGGKTKTCVIATISPSIHCLEETLSTLDYAHRAKNIKNKPEINQKMMKSAVMKDLYSEIDRLKQEVYAAREKNGIYIPKDRYIQEEAEKKAMAEKIERLELQSESKDKRVVDLQELYNSQQILTAELSEKLEKTEKKLEETEHSLFDLEEKYRQANATIKEKEFVISNLLKSEKSLVERAFQLRTELESASSDVSNLFSKIERKDKIEDGNRFLIQKFQSQLTQQLELLHKTVASSVTQQEVQLKHMEEDMESFVSTKSEATEELRDRLSKLKRVYGSGIEALDNIAVKLDGNSQSTFSSLNSEVSKHSHELENVFKGFASEADMLLQDLQSSLNKQEEKLITFAQQQRKAHSRAVDTARSVSKVTVEFFKTLDTHATKLTGIVEEAQTVNHKKLSEFENKFEECAANEERQLLEKVAELLANSNARKKNLVQMAVHDLRESASTRTTTLQHEMSTMQDSTSSIKAEWSIHMEKTESSHHEDTSAVESGKKAMQEVLLNCLEKTEMSAHQWRKAQESLVSLERNNVASVDSIVRGGMDANENLRSQFSTAVSSSLDVFDAANSSLLTSIDHSLQLDNDACTKVNSMIIPCCEDLIELKSDHNHKIIEITENAGKCLLDEYVVDEPSCSTPKKRPIDIPSIESIEELRTPASEELLRAFRDEKLSKQANGDAKQQQQQQQQHLIRASSLYEAAVSDSRYPLSAVN

SEQ ID NO: 90781 - protein, 877 aa, Arabidopsis thaliana
  peptide (1)..(877): Ceres Seq. ID no. 12725260
MKVTFLELYNEEISDLLAPEETIKFVDEKSKKSIALMEDGKGSVFVRGLEEEIVSTANEIYKILEKGSAKRRTAETLLNKQSSRSHSIFSITIHIKENTPEGEEMIKCGKLNLVDLAGSENISRSGAREGRAREAGEINKSLLTLGRVINALVEHSGHIPYRDSKLTRLLRESLGGKTKTCVIATISPSIHCLEETLSTLDYAHRAKNIKNKPEINQKMMKSAVMKDLYSEIDRLKQEVYAAREKNGIYIPKDRYIQEEAEKKAMAEKIERLELQSESKDKRVVDLQELYNSQQILTAELSEKLEKTEKKLEETEHSLFDLEEKYRQANATIKEKEFVISNLLKSEKSLVERAFQLRTELESASSDVSNLFSKIERKDKIEDGNRFLIQKFQSQLTQQLELLHKTVASSVTQQEVQLKHMEEDMESFVSTKSEATEELRDRLSKLKRVYGSGIEALDNIAVKLDGNSQSTFSSLNSEVSKHSHELENVFKGFASEADMLLQDLQSSLNKQEEKLITFAQQQRKAHSRAVDTARSVSKVTVEFFKTLDTHATKLTGIVEEAQTVNHKKLSEFENKFEECAANEERQLLEKVAELLANSNARKKNLVQMAVHDLRESASTRTTTLQHEMSTMQDSTSSIKAEWSIHMEKTESSHHEDTSAVESGKKAMQEVLLNCLEKTEMSAHQWRKAQESLVSLERNNVASVDSIVRGGMDANENLRSQFSTAVSSSLDVFDAANSSLLTSIDHSLQLDNDACTKVNSMIIPCCEDLIELKSDHNHKIIEITENAGKCLLDEYVVDEPSCSTPKKRPIDIPSIESIEELRTPASEELLRAFRDEKLSKQANGDAKQQQQQQQQHLIRASSLYEAAVSDSRYPLSAVN

SEQ ID NO: 90782 - DNA, 792 bp, Arabidopsis thaliana
  misc_feature (1)..(792): Ceres Seq. ID no. 12725263
  misc_feature (1)..(792): Ortholog of  Ceres SEQ ID NO 15226238 as cited in SEQ ID NO 68840
  misc_feature (1)..(792): Ortholog of  Ceres SEQ ID NO 12635175 as cited in SEQ ID NO 0
  misc_feature (1)..(792): Ortholog of  Ceres SEQ ID NO 14306100 as cited in SEQ ID NO 0
atgagaagctttctctacctcatcgtagtcatcttcctcttctcttcatccgttaacgcttgtgatcgatgtctacaccgttctaaagcatcttatttctcctctgcttctgctctctcttccggggcttgtgcctatggccctatggctacgagcttctttgccggccacattgcggccgctataccttccatttacaaagatggtgctggctgtggagcttgctttcaagtcagatgcaagaaccccaagttgtgtaacagtaaaggaaccattgtgatggtcacagacttgaacacgagcaaccaaactgatcttgtccttagtagtagagcttttagggctatggctaagcctgttgttggtgttgacaaataccttctcaaacaaggcatcgtcgacgttgaataccaaagagttccttgcaattacggtaaaaggaatttgaacgtgagagtggaagaagcaagcaaaaagccaaattacttggcgataaagctattgtaccaaggaggtcaaaccgaagtggtaggtatcgacattgctccagtaggttcgtcacaatggagttacatgagtagaagccacggagccgtttgggcgaccgataaagtaccaacgggagctctacagttcaagttcacggtgacaggcggctacgatggcaaaacggtttggtcaaagagggttcttccggcgaattggaactctgggaggatttatgatgccggcgttcagatcaccgacattgctcaagaaggttgtgatacatgcggtcacatatggaactga

SEQ ID NO: 90783 - protein, 263 aa, Arabidopsis thaliana
  peptide (1)..(263): Ceres Seq. ID no. 12725264
MRSFLYLIVVIFLFSSSVNACDRCLHRSKASYFSSASALSSGACAYGPMATSFFAGHIAAAIPSIYKDGAGCGACFQVRCKNPKLCNSKGTIVMVTDLNTSNQTDLVLSSRAFRAMAKPVVGVDKYLLKQGIVDVEYQRVPCNYGKRNLNVRVEEASKKPNYLAIKLLYQGGQTEVVGIDIAPVGSSQWSYMSRSHGAVWATDKVPTGALQFKFTVTGGYDGKTVWSKRVLPANWNSGRIYDAGVQITDIAQEGCDTCGHIWN

SEQ ID NO: 90784 - protein, 215 aa, Arabidopsis thaliana
  peptide (1)..(215): Ceres Seq. ID no. 12725265
MATSFFAGHIAAAIPSIYKDGAGCGACFQVRCKNPKLCNSKGTIVMVTDLNTSNQTDLVLSSRAFRAMAKPVVGVDKYLLKQGIVDVEYQRVPCNYGKRNLNVRVEEASKKPNYLAIKLLYQGGQTEVVGIDIAPVGSSQWSYMSRSHGAVWATDKVPTGALQFKFTVTGGYDGKTVWSKRVLPANWNSGRIYDAGVQITDIAQEGCDTCGHIWN

SEQ ID NO: 90785 - protein, 170 aa, Arabidopsis thaliana
  peptide (1)..(170): Ceres Seq. ID no. 12725266
MVTDLNTSNQTDLVLSSRAFRAMAKPVVGVDKYLLKQGIVDVEYQRVPCNYGKRNLNVRVEEASKKPNYLAIKLLYQGGQTEVVGIDIAPVGSSQWSYMSRSHGAVWATDKVPTGALQFKFTVTGGYDGKTVWSKRVLPANWNSGRIYDAGVQITDIAQEGCDTCGHIWN

SEQ ID NO: 90786 - DNA, 402 bp, Arabidopsis thaliana
  misc_feature (1)..(402): Ceres Seq. ID no. 12725267
  misc_feature (1)..(402): Ortholog of  Ceres SEQ ID NO 13495070 as cited in SEQ ID NO 53216
  misc_feature (1)..(402): Ortholog of  Ceres SEQ ID NO 13661333 as cited in SEQ ID NO 61620
  misc_feature (1)..(402): Ortholog of  Ceres SEQ ID NO 13596812 as cited in SEQ ID NO 62283
  misc_feature (1)..(402): Ortholog of  Ceres SEQ ID NO 13623021 as cited in SEQ ID NO 0
atggttttgcatgatgactgcaagctaacattcttggaactgaaggagagacgaacattccgttccatagtctacaagattgaggacaacatgcaagtgattgtagagaaacatcactacaaaaaaatgcatggcgaacgtgaacaatcatatgaggagtttgcaaacagtcttccagctgatgaatgccgatatgccattttggatatcgaattcgtcccaggggagagaaagatttgcttcatcgcgtggtctccatccactgccaagatgagaaagaagatgatttactcgagcactaaggataggttcaagagagaactagatggaattcaagtggagtttcacgcaactgatctaaccgatataagtcttgatgctatcagacgccgcatcaactaa

SEQ ID NO: 90787 - protein, 133 aa, Arabidopsis thaliana
  peptide (1)..(133): Ceres Seq. ID no. 12725268
MVLHDDCKLTFLELKERRTFRSIVYKIEDNMQVIVEKHHYKKMHGEREQSYEEFANSLPADECRYAILDIEFVPGERKICFIAWSPSTAKMRKKMIYSSTKDRFKRELDGIQVEFHATDLTDISLDAIRRRIN

SEQ ID NO: 90788 - protein, 103 aa, Arabidopsis thaliana
  peptide (1)..(103): Ceres Seq. ID no. 12725269
MQVIVEKHHYKKMHGEREQSYEEFANSLPADECRYAILDIEFVPGERKICFIAWSPSTAKMRKKMIYSSTKDRFKRELDGIQVEFHATDLTDISLDAIRRRIN

SEQ ID NO: 90789 - protein, 91 aa, Arabidopsis thaliana
  peptide (1)..(91): Ceres Seq. ID no. 12725270
MHGEREQSYEEFANSLPADECRYAILDIEFVPGERKICFIAWSPSTAKMRKKMIYSSTKDRFKRELDGIQVEFHATDLTDISLDAIRRRIN

SEQ ID NO: 90790 - DNA, 867 bp, Arabidopsis thaliana
  misc_feature (1)..(867): Ceres Seq. ID no. 12725283
  misc_feature (1)..(867): Ortholog of  Ceres SEQ ID NO 14316459 as cited in SEQ ID NO 57754
atgagcaatcatcaaactttgacttttgtttttggagagaaggaggtgttgaagcaattggagccgtggtgtgaacttaaagacaaagtggttcttgtgacaggagcttcctctggtataggaagagagatctgtcttgatctaggcaaagctggttgtaagattattgcagtagctcgtcgtgtcgatcgtctcaactctctctgctctgaaatcaacagctccagttcaactggaatccaagccgcggctcttaagctagacgttacatcagacgcagccaccattcaaaaagtggttcagggagcttggggaatctttggaaagatcgatgcgttgatcaacaatgccgggatcagaggcaatgtcaagtcgagtttggatttgtcaaaggaagaatgggacaacgtcttcaagaccaacttaacgggaccttggttagtatctaaatatgtttgtgttctaatgcgtgatgctaaactaggtggctcggtgataaacatctcatcgattgccgggattcgcggtatattgcccggtgcacttgcatatgcttgttccaaaataggtgttgataccatgtcaaagatgatggcagttgagttaggtgtgcacaagatcagagtgaactcgattgcgcccgggattttcaagtcagagatcacacaaggtcttatgcaaaaggagtggttcaagaatgtgaccgagaggactgtaccattaaagctgcaacagaccgttgatccagggataacttctctcgtacgctatctcatccatgactcttctcaatatatatccgggaatacatatattgttgattccggagctacattgcccggtgtgcccatcttttcatctctctga

SEQ ID NO: 90791 - protein, 288 aa, Arabidopsis thaliana
  peptide (1)..(288): Ceres Seq. ID no. 12725284
MSNHQTLTFVFGEKEVLKQLEPWCELKDKVVLVTGASSGIGREICLDLGKAGCKIIAVARRVDRLNSLCSEINSSSSTGIQAAALKLDVTSDAATIQKVVQGAWGIFGKIDALINNAGIRGNVKSSLDLSKEEWDNVFKTNLTGPWLVSKYVCVLMRDAKLGGSVINISSIAGIRGILPGALAYACSKIGVDTMSKMMAVELGVHKIRVNSIAPGIFKSEITQGLMQKEWFKNVTERTVPLKLQQTVDPGITSLVRYLIHDSSQYISGNTYIVDSGATLPGVPIFSSL

SEQ ID NO: 90792 - DNA, 1339 bp, Arabidopsis thaliana
  misc_feature (1)..(1339): Ceres Seq. ID no. 12725320
  misc_feature (1)..(1339): Ortholog of  Ceres SEQ ID NO 13596433 as cited in SEQ ID NO 68721
  misc_feature (1)..(1339): Ortholog of  Ceres SEQ ID NO 13599169 as cited in SEQ ID NO 0
agttcccgacacttgtgagagactataaaagtatacgatctcctcctctcgctctcttcagatcacaaagttttcgtttttagggttctctcatcgatctcggtttgtgatcttcttcttcatcaatggcgtctagtgataaacaaacaagcccaaagcctcctccttcaccgtctcctctccgtaattccaagttttgtcagtcaaatatgaggattttgatctcaggaggagctggattcattggttctcaccttgttgataagctgatggaaaacgaaaagaatgaggtgattgttgctgataactatttcactggttcaaaggacaaccttaagaagtggattggtcatccaagatttgagcttatccgtcacgatgtcacggagccacttttgatcgaggttgatcagatttaccatcttgcatgtcctgcttctcctatcttctacaagtacaaccctgtgaagacaatcaagaccaatgtgattggcacactgaacatgctaggtctcgccaagcgtgttggagcaaggattttgcttacctcaacctcggaggtatatggagatcctctcattcatccccagcctgagagctattggggaaatgtcaacccaattggtgttaggagctgttatgatgaaggcaagcgtgttgctgagaccttgatgtttgactaccacaggcaacatggaattgaaatccgcattgctagaatcttcaacacttatggtccacgcatgaacatcgatgatggccgtgttgtaagcaacttcattgcacaagcactccggggtgaggcattgactgttcagaaaccagggacacagactcgcagtttctgttatgtatctgacatggttgatggacttatgcgcctcatggaaggagatgacactggtcccatcaacatcggtaacccaggtgagtttacaatggtggagttggctgagacagtgaaagagctgattaacccgagcatagagataaagatggttgagaacacaccggatgatccaagacagaggaagccagacatcacaaaggctaaagaagtgttgggatgggaaccaaaggtgaagcttcgtgaaggccttccacttatggaagaagacttcaggctaaggctcggagtccacaagaactaaaactccatcaccgatcacacgcaaacgtgaatgcactacataaccaagttctacttttcatattccatggtgcaagcggttggtttcatataatatgtttctactttccacagtcgaaattattcctagagaaaaataaagattatgaacgaatgctttttatatttaaggaagataaaatttacttt

SEQ ID NO: 90793 - protein, 341 aa, Arabidopsis thaliana; identical to SEQ ID NO: 21850
  peptide (1)..(341): Ceres Seq. ID no. 12725321

SEQ ID NO: 90794 - protein, 313 aa, Arabidopsis thaliana; identical to SEQ ID NO: 21851
  peptide (1)..(313): Ceres Seq. ID no. 12725322

SEQ ID NO: 90795 - protein, 293 aa, Arabidopsis thaliana; identical to SEQ ID NO: 21852
  peptide (1)..(293): Ceres Seq. ID no. 12725323

SEQ ID NO: 90796 - DNA, 894 bp, Arabidopsis thaliana
  misc_feature (1)..(894): Ceres Seq. ID no. 12725328
  misc_feature (1)..(894): Ortholog of  Ceres SEQ ID NO 13598527 as cited in SEQ ID NO 64914
atggagaacaaaactcaagaggaagcttcgaccatcaaagtttcatcccttacttgcatagatcttgccaacccgaactttcaacaatcagcggtttctcttaaacaggcatgtctagattgtggatttttctatgtcacaaatcatggtataagtgaggagttgaaggacgaggcttttgagcagagcaagaagttctttgctcttcctttggaggagaaaatgaaagtcttgagaaatgaaaagcatcgaggctattcacccgtccttgatcaaattttagatcctgagaatcaagtcgacgttgttttgccgggatggcgggcgaccatggagaaatatcatcaagaagcattgagggtttgcaaggctattgctagattattagcattggcgctcgacttggacacaaattactttgataaaccggaaatgctgggaaatcctatcgcagttatgcgtttgcttcgttacgaagggatgtctgatcccttgaaaggaatatttggatgtggagctcattctgattacggaatgctgactctcttagcaaccgatagtgtaaccgggctccaggataaggacgtgaagcctaggaagtgggaatatgtaccatctattaaaggagcatatatcgtcaatcttggagacttgttggagcgttggagcaacggcatttttaaatccacattgcatcgggtacttgggaatggtcaagaccgatattccattccattcttcatagaaccgagtcacgactgtctagtagaatgtctacctacctgccagtccgaaaacaaccttcccaaatatccagctatcaaatgttcaacgttcctcacccaacgttaccagcaatcacatgtgaatttgagcatctacaaacagccctaa

SEQ ID NO: 90797 - protein, 297 aa, Arabidopsis thaliana
  peptide (1)..(297): Ceres Seq. ID no. 12725329
MENKTQEEASTIKVSSLTCIDLANPNFQQSAVSLKQACLDCGFFYVTNHGISEELKDEAFEQSKKFFALPLEEKMKVLRNEKHRGYSPVLDQILDPENQVDVVLPGWRATMEKYHQEALRVCKAIARLLALALDLDTNYFDKPEMLGNPIAVMRLLRYEGMSDPLKGIFGCGAHSDYGMLTLLATDSVTGLQDKDVKPRKWEYVPSIKGAYIVNLGDLLERWSNGIFKSTLHRVLGNGQDRYSIPFFIEPSHDCLVECLPTCQSENNLPKYPAIKCSTFLTQRYQQSHVNLSIYKQP

SEQ ID NO: 90798 - protein, 223 aa, Arabidopsis thaliana
  peptide (1)..(223): Ceres Seq. ID no. 12725330
MKVLRNEKHRGYSPVLDQILDPENQVDVVLPGWRATMEKYHQEALRVCKAIARLLALALDLDTNYFDKPEMLGNPIAVMRLLRYEGMSDPLKGIFGCGAHSDYGMLTLLATDSVTGLQDKDVKPRKWEYVPSIKGAYIVNLGDLLERWSNGIFKSTLHRVLGNGQDRYSIPFFIEPSHDCLVECLPTCQSENNLPKYPAIKCSTFLTQRYQQSHVNLSIYKQP

SEQ ID NO: 90799 - protein, 187 aa, Arabidopsis thaliana
  peptide (1)..(187): Ceres Seq. ID no. 12725331
MEKYHQEALRVCKAIARLLALALDLDTNYFDKPEMLGNPIAVMRLLRYEGMSDPLKGIFGCGAHSDYGMLTLLATDSVTGLQDKDVKPRKWEYVPSIKGAYIVNLGDLLERWSNGIFKSTLHRVLGNGQDRYSIPFFIEPSHDCLVECLPTCQSENNLPKYPAIKCSTFLTQRYQQSHVNLSIYKQP

SEQ ID NO: 90800 - DNA, 1317 bp, Arabidopsis thaliana
  misc_feature (1)..(1317): Ceres Seq. ID no. 12725349
  misc_feature (1)..(1317): Ortholog of  Ceres SEQ ID NO 13594345 as cited in SEQ ID NO 58043
  misc_feature (1)..(1317): Ortholog of  Ceres SEQ ID NO 12614112 as cited in SEQ ID NO 60891
  misc_feature (1)..(1317): Ortholog of  Ceres SEQ ID NO 13597574 as cited in SEQ ID NO 64677
  misc_feature (1)..(1317): Ortholog of  Ceres SEQ ID NO 13597843 as cited in SEQ ID NO 64850
  misc_feature (1)..(1317): Ortholog of  Ceres SEQ ID NO 13662880 as cited in SEQ ID NO 65422
  misc_feature (1)..(1317): Ortholog of  Ceres SEQ ID NO 12779098 as cited in SEQ ID NO 67698
  misc_feature (1)..(1317): Ortholog of  Ceres SEQ ID NO 13591190 as cited in SEQ ID NO 68044
  misc_feature (1)..(1317): Ortholog of  Ceres SEQ ID NO 13596089 as cited in SEQ ID NO 68373
atggagaagaaaatggaagcaaagagaaggatagtgttagttccaattccagcacaaggtcatgtaactccactgatgcaacttgggaaagtacttaactcgaagggcttctcaattacagttgttgagggacatttcaatcaagtaagctcttcttctcaacacttccctggttttcagtttgtcaccataaaagaaagcttaccagagtctgaattcgagaaactcggaggaatcgagtctatgataacgctcaacaaaacaagcgaggcaagcttcaaggactgtataagtcagttgttgctacaacaaggcaatgatattgcatgtatcatttacgacgagtacatgtacttctgtggagctgcagctaaggagttcagcattcctagtgtcatattcagcactcaaagtgctgcaaattacgtttcacatcctgatatgcaagacaaggtggtggaaaatttgtatccattacgatacaaagacctaccgacttcaggaatggggccactagatcgattttttgagctctgtagggaagtagccaacaaaagaacagcttcagctgttatcatcaacacggtgagctgtctagagagctcgtctctgtcatggctggaacaaaaagtaggaatttctgtgtatccattaggccctcttcacatgacagattcatcaccttctagtttacttgaagaggacaggagctgcattgaatggctgaacaagcagaaaccaaagtcagtgatatacataagcataggaacacttggtcaaatggaaaccaaggaagttttggagatgtcttgggggttgtgtaatagcaaccaaccatttctatgggttatccgagcgggttctatccttggcactaacggaatagagtcattgccagaggatgtcaataaaatggtctctgaaagaggatacattgtgaaacgagcaccgcagatagaagtacttggacatcctgcagtgggaggcttctggagccactgtggatggaactcaatactcgagagcattggagaaggagttccaatgatttgcaagccctttcatggcgagcaaaagttgaatgcaatgtatatagaaagtgtttggagaatagggtttcaggtggaaggtaaagtggatagaggagaggttgagagagctgtgaagaggttgatcgtggatgacgaaggtgcggggatgcgagagagagcccttgttctgaaagagaagatcaaagcctctgtcagtagtggaggcgcctcatacaacgcattggaagatattgtcaattacttgaagacaaagcaaagatgttga

SEQ ID NO: 90801 - protein, 438 aa, Arabidopsis thaliana
  peptide (1)..(438): Ceres Seq. ID no. 12725350
MEKKMEAKRRIVLVPIPAQGHVTPLMQLGKVLNSKGFSITVVEGHFNQVSSSSQHFPGFQFVTIKESLPESEFEKLGGIESMITLNKTSEASFKDCISQLLLQQGNDIACIIYDEYMYFCGAAAKEFSIPSVIFSTQSAANYVSHPDMQDKVVENLYPLRYKDLPTSGMGPLDRFFELCREVANKRTASAVIINTVSCLESSSLSWLEQKVGISVYPLGPLHMTDSSPSSLLEEDRSCIEWLNKQKPKSVIYISIGTLGQMETKEVLEMSWGLCNSNQPFLWVIRAGSILGTNGIESLPEDVNKMVSERGYIVKRAPQIEVLGHPAVGGFWSHCGWNSILESIGEGVPMICKPFHGEQKLNAMYIESVWRIGFQVEGKVDRGEVERAVKRLIVDDEGAGMRERALVLKEKIKASVSSGGASYNALEDIVNYLKTKQRC

SEQ ID NO: 90802 - protein, 434 aa, Arabidopsis thaliana
  peptide (1)..(434): Ceres Seq. ID no. 12725351
MEAKRRIVLVPIPAQGHVTPLMQLGKVLNSKGFSITVVEGHFNQVSSSSQHFPGFQFVTIKESLPESEFEKLGGIESMITLNKTSEASFKDCISQLLLQQGNDIACIIYDEYMYFCGAAAKEFSIPSVIFSTQSAANYVSHPDMQDKVVENLYPLRYKDLPTSGMGPLDRFFELCREVANKRTASAVIINTVSCLESSSLSWLEQKVGISVYPLGPLHMTDSSPSSLLEEDRSCIEWLNKQKPKSVIYISIGTLGQMETKEVLEMSWGLCNSNQPFLWVIRAGSILGTNGIESLPEDVNKMVSERGYIVKRAPQIEVLGHPAVGGFWSHCGWNSILESIGEGVPMICKPFHGEQKLNAMYIESVWRIGFQVEGKVDRGEVERAVKRLIVDDEGAGMRERALVLKEKIKASVSSGGASYNALEDIVNYLKTKQRC

SEQ ID NO: 90803 - protein, 413 aa, Arabidopsis thaliana
  peptide (1)..(413): Ceres Seq. ID no. 12725352
MQLGKVLNSKGFSITVVEGHFNQVSSSSQHFPGFQFVTIKESLPESEFEKLGGIESMITLNKTSEASFKDCISQLLLQQGNDIACIIYDEYMYFCGAAAKEFSIPSVIFSTQSAANYVSHPDMQDKVVENLYPLRYKDLPTSGMGPLDRFFELCREVANKRTASAVIINTVSCLESSSLSWLEQKVGISVYPLGPLHMTDSSPSSLLEEDRSCIEWLNKQKPKSVIYISIGTLGQMETKEVLEMSWGLCNSNQPFLWVIRAGSILGTNGIESLPEDVNKMVSERGYIVKRAPQIEVLGHPAVGGFWSHCGWNSILESIGEGVPMICKPFHGEQKLNAMYIESVWRIGFQVEGKVDRGEVERAVKRLIVDDEGAGMRERALVLKEKIKASVSSGGASYNALEDIVNYLKTKQRC

SEQ ID NO: 90804 - DNA, 1662 bp, Arabidopsis thaliana
  misc_feature (1)..(1662): Ceres Seq. ID no. 12725353
  misc_feature (1)..(1662): Ortholog of  Ceres SEQ ID NO 14315063 as cited in SEQ ID NO 52256
  misc_feature (1)..(1662): Ortholog of  Ceres SEQ ID NO 13597574 as cited in SEQ ID NO 64677
  misc_feature (1)..(1662): Ortholog of  Ceres SEQ ID NO 13662880 as cited in SEQ ID NO 65422
  misc_feature (1)..(1662): Ortholog of  Ceres SEQ ID NO 12779098 as cited in SEQ ID NO 67698
  misc_feature (1)..(1662): Ortholog of  Ceres SEQ ID NO 13591190 as cited in SEQ ID NO 68044
  misc_feature (1)..(1662): Ortholog of  Ceres SEQ ID NO 13595961 as cited in SEQ ID NO 68223
  misc_feature (1)..(1662): Ortholog of  Ceres SEQ ID NO 13596089 as cited in SEQ ID NO 68373
aacaccatccaccacatgattcacatgttgtgacgaagagagccaacaaaacgttcgagagtcagatactttatatatcggttaccgaagtgatcgaaaccgcgaaccacgaagctgagcaggatacttttaattagtagttcatgcaggttttgggaatggaggaaaagcctgcaaggagaagcgtagtgttggttccatttccagcacaaggacatatatctccaatgatgcaacttgccaaaacccttcacttaaagggtttctcgatcacagttgttcagactaagttcaattactttagcccttcagatgacttcactcatgattttcagttcgtcaccattccagaaagcttaccagagtctgatttcaagaatctcggaccaatacagtttctgtttaagctcaacaaagagtgtaaggtgagcttcaaggactgtttgggtcagttggtgctgcaacaaagtaatgagatctcatgtgtcatctacgatgagttcatgtactttgctgaagctgcagccaaagagtgtaagcttccaaacatcattttcagcacaacaagtgccacggctttcgcttgccgctctgtatttgacaaactatatgcaaacaatgtccaagctcccttgaaagaaactaaaggacaacaagaagagctagttccggagttttatcccttgagatataaagactttccagtttcacggtttgcatcattagagagcataatggaggtgtataggaatacagttgacaaacggacagcttcctcggtgataatcaacactgcgagctgtctagagagctcatctctgtcttttctgcaacaacaacagctacaaattccagtgtatcctataggccctcttcacatggtggcctcagctcctacaagtctgcttgaagagaacaagagctgcatcgaatggttgaacaaacaaaaggtaaactcggtgatatacataagcatgggaagcatagctttaatggaaatcaacgagataatggaagtcgcgtcaggattggctgctagcaaccaacacttcttatgggtgatccgaccagggtcaatacctggttccgagtggatagagtccatgcctgaagagtttagtaagatggttttggaccgaggttacattgtgaaatgggctccacagaaggaagtactttctcatcctgcagtaggagggttttggagccattgtggatggaactcgacactagaaagcatcggccaaggagttccaatgatctgcaggccattttcgggtgatcaaaaggtgaacgctagatacttggagtgtgtatggaaaattgggattcaagtggagggtgagctagacagaggagtggtcgagagagctgtgaagaggttaatggttgacgaagaaggagaggagatgaggaagagagctttcagtttaaaagagcaacttagagcctctgttaaaagtggaggctcttcacacaactcgctagaagagtttgtacacttcataaggactctatgaagacagttgtgtctactaaaacacacaaagcatcaagattcctttttcaaccattccaagtttgtttgcatagagtttatctgaacatcacttaaaaactcacctgcagaataacaaactataaaaattaatactttaccgc

SEQ ID NO: 90805 - protein, 458 aa, Arabidopsis thaliana
  peptide (1)..(458): Ceres Seq. ID no. 12725354
MQVLGMEEKPARRSVVLVPFPAQGHISPMMQLAKTLHLKGFSITVVQTKFNYFSPSDDFTHDFQFVTIPESLPESDFKNLGPIQFLFKLNKECKVSFKDCLGQLVLQQSNEISCVIYDEFMYFAEAAAKECKLPNIIFSTTSATAFACRSVFDKLYANNVQAPLKETKGQQEELVPEFYPLRYKDFPVSRFASLESIMEVYRNTVDKRTASSVIINTASCLESSSLSFLQQQQLQIPVYPIGPLHMVASAPTSLLEENKSCIEWLNKQKVNSVIYISMGSIALMEINEIMEVASGLAASNQHFLWVIRPGSIPGSEWIESMPEEFSKMVLDRGYIVKWAPQKEVLSHPAVGGFWSHCGWNSTLESIGQGVPMICRPFSGDQKVNARYLECVWKIGIQVEGELDRGVVERAVKRLMVDEEGEEMRKRAFSLKEQLRASVKSGGSSHNSLEEFVHFIRTL

SEQ ID NO: 90806 - protein, 453 aa, Arabidopsis thaliana
  peptide (1)..(453): Ceres Seq. ID no. 12725355
MEEKPARRSVVLVPFPAQGHISPMMQLAKTLHLKGFSITVVQTKFNYFSPSDDFTHDFQFVTIPESLPESDFKNLGPIQFLFKLNKECKVSFKDCLGQLVLQQSNEISCVIYDEFMYFAEAAAKECKLPNIIFSTTSATAFACRSVFDKLYANNVQAPLKETKGQQEELVPEFYPLRYKDFPVSRFASLESIMEVYRNTVDKRTASSVIINTASCLESSSLSFLQQQQLQIPVYPIGPLHMVASAPTSLLEENKSCIEWLNKQKVNSVIYISMGSIALMEINEIMEVASGLAASNQHFLWVIRPGSIPGSEWIESMPEEFSKMVLDRGYIVKWAPQKEVLSHPAVGGFWSHCGWNSTLESIGQGVPMICRPFSGDQKVNARYLECVWKIGIQVEGELDRGVVERAVKRLMVDEEGEEMRKRAFSLKEQLRASVKSGGSSHNSLEEFVHFIRTL

SEQ ID NO: 90807 - protein, 430 aa, Arabidopsis thaliana
  peptide (1)..(430): Ceres Seq. ID no. 12725356
MMQLAKTLHLKGFSITVVQTKFNYFSPSDDFTHDFQFVTIPESLPESDFKNLGPIQFLFKLNKECKVSFKDCLGQLVLQQSNEISCVIYDEFMYFAEAAAKECKLPNIIFSTTSATAFACRSVFDKLYANNVQAPLKETKGQQEELVPEFYPLRYKDFPVSRFASLESIMEVYRNTVDKRTASSVIINTASCLESSSLSFLQQQQLQIPVYPIGPLHMVASAPTSLLEENKSCIEWLNKQKVNSVIYISMGSIALMEINEIMEVASGLAASNQHFLWVIRPGSIPGSEWIESMPEEFSKMVLDRGYIVKWAPQKEVLSHPAVGGFWSHCGWNSTLESIGQGVPMICRPFSGDQKVNARYLECVWKIGIQVEGELDRGVVERAVKRLMVDEEGEEMRKRAFSLKEQLRASVKSGGSSHNSLEEFVHFIRTL

SEQ ID NO: 90808 - DNA, 1344 bp, Arabidopsis thaliana
  misc_feature (1)..(1344): Ceres Seq. ID no. 12725365
  misc_feature (1)..(1344): Ortholog of  Ceres SEQ ID NO 12614112 as cited in SEQ ID NO 60891
  misc_feature (1)..(1344): Ortholog of  Ceres SEQ ID NO 13597574 as cited in SEQ ID NO 64677
  misc_feature (1)..(1344): Ortholog of  Ceres SEQ ID NO 13662880 as cited in SEQ ID NO 65422
  misc_feature (1)..(1344): Ortholog of  Ceres SEQ ID NO 12779098 as cited in SEQ ID NO 67698
  misc_feature (1)..(1344): Ortholog of  Ceres SEQ ID NO 13596180 as cited in SEQ ID NO 67941
  misc_feature (1)..(1344): Ortholog of  Ceres SEQ ID NO 13591190 as cited in SEQ ID NO 68044
  misc_feature (1)..(1344): Ortholog of  Ceres SEQ ID NO 13596089 as cited in SEQ ID NO 68373
atggagaaaaatgcagagaagaaaagaatagtgttggttccatttccattacaaggacatatcactccaatgatgcaacttggtcaagcacttaacctgaaaggcttctcgattaccgttgctcttggagattccaatcgagtaagttctacgcaacacttccctggttttcaatttgtcacaatacctgaaaccataccactatctcaacacgaggcactcggagttgtcgagtttgtggttacgctcaacaaaacaagcgagacaagtttcaaggactgtatagctcatttgttgctgcaacatggaaatgatattgcttgtatcatttacgacgagctcatgtacttctctgaagctacagctaaggatttaaggattcctagtgtcatattcaccactggtagtgctacaaatcatgtttgttcttgtattttaagcaaactcaacgccgagaagttcttgatcgacatgaaagatcctgaagtgcaaaacatggtggtggaaaatttacatccactaaaatacaaagacttaccaacttcaggaatggggccgctagagcgatttttggagatttgtgccgaagttgtcaacaaaagaacagcttccgctgttataatcaatacgtcaagttgtctagagagctcgtctctgtcatggctgaaacaagaactcagtattccagtgtatccattaggccctcttcacattacaacttcagcaaattttagtttacttgaagaggacaggagctgcattgaatggctgaacaagcagaaactgaggtcagttatatacataagcgtaggaagcatagctcacatggaaaccaaggaagtattggagatggcttggggattgtataatagcaaccaaccttttctatgggtaatccgacccggtacagagtcaatgccagtggaagtcagtaagattgtctcggaaagaggatgcattgtgaaatgggcgccacagaatgaagtacttgtgcatcctgcagtgggaggtttctggagccactgtggatggaactcaacactcgagagtattgtggaaggagttccaatgatttgcagaccgtttaacggtgagcagaagttaaacgcgatgtatatagaaagtgtttggagagtaggggttctgcttcaaggagaagtggagagaggatgtgtagagagagctgtgaagaggttgattgtggatgatgaaggtgtaggaatgagggagagagcccttgttttaaaagagaagctcaatgcctctgtaagaagtggaggctcttcatacaatgcattggatgagctcgtccattacttggaggcagagtatagaaatacttga

SEQ ID NO: 90809 - protein, 447 aa, Arabidopsis thaliana
  peptide (1)..(447): Ceres Seq. ID no. 12725366
MEKNAEKKRIVLVPFPLQGHITPMMQLGQALNLKGFSITVALGDSNRVSSTQHFPGFQFVTIPETIPLSQHEALGVVEFVVTLNKTSETSFKDCIAHLLLQHGNDIACIIYDELMYFSEATAKDLRIPSVIFTTGSATNHVCSCILSKLNAEKFLIDMKDPEVQNMVVENLHPLKYKDLPTSGMGPLERFLEICAEVVNKRTASAVIINTSSCLESSSLSWLKQELSIPVYPLGPLHITTSANFSLLEEDRSCIEWLNKQKLRSVIYISVGSIAHMETKEVLEMAWGLYNSNQPFLWVIRPGTESMPVEVSKIVSERGCIVKWAPQNEVLVHPAVGGFWSHCGWNSTLESIVEGVPMICRPFNGEQKLNAMYIESVWRVGVLLQGEVERGCVERAVKRLIVDDEGVGMRERALVLKEKLNASVRSGGSSYNALDELVHYLEAEYRNT

SEQ ID NO: 90810 - protein, 424 aa, Arabidopsis thaliana
  peptide (1)..(424): Ceres Seq. ID no. 12725367
MMQLGQALNLKGFSITVALGDSNRVSSTQHFPGFQFVTIPETIPLSQHEALGVVEFVVTLNKTSETSFKDCIAHLLLQHGNDIACIIYDELMYFSEATAKDLRIPSVIFTTGSATNHVCSCILSKLNAEKFLIDMKDPEVQNMVVENLHPLKYKDLPTSGMGPLERFLEICAEVVNKRTASAVIINTSSCLESSSLSWLKQELSIPVYPLGPLHITTSANFSLLEEDRSCIEWLNKQKLRSVIYISVGSIAHMETKEVLEMAWGLYNSNQPFLWVIRPGTESMPVEVSKIVSERGCIVKWAPQNEVLVHPAVGGFWSHCGWNSTLESIVEGVPMICRPFNGEQKLNAMYIESVWRVGVLLQGEVERGCVERAVKRLIVDDEGVGMRERALVLKEKLNASVRSGGSSYNALDELVHYLEAEYRNT

SEQ ID NO: 90811 - protein, 423 aa, Arabidopsis thaliana
  peptide (1)..(423): Ceres Seq. ID no. 12725368
MQLGQALNLKGFSITVALGDSNRVSSTQHFPGFQFVTIPETIPLSQHEALGVVEFVVTLNKTSETSFKDCIAHLLLQHGNDIACIIYDELMYFSEATAKDLRIPSVIFTTGSATNHVCSCILSKLNAEKFLIDMKDPEVQNMVVENLHPLKYKDLPTSGMGPLERFLEICAEVVNKRTASAVIINTSSCLESSSLSWLKQELSIPVYPLGPLHITTSANFSLLEEDRSCIEWLNKQKLRSVIYISVGSIAHMETKEVLEMAWGLYNSNQPFLWVIRPGTESMPVEVSKIVSERGCIVKWAPQNEVLVHPAVGGFWSHCGWNSTLESIVEGVPMICRPFNGEQKLNAMYIESVWRVGVLLQGEVERGCVERAVKRLIVDDEGVGMRERALVLKEKLNASVRSGGSSYNALDELVHYLEAEYRNT

SEQ ID NO: 90812 - DNA, 1760 bp, Arabidopsis thaliana
  misc_feature (1)..(1760): Ceres Seq. ID no. 12725373
  misc_feature (1)..(1760): Ortholog of  Ceres SEQ ID NO 13595747 as cited in SEQ ID NO 58679
gcactcgccatggtgtctcatcttcaatgtatggcatccacattgtttacttgaggtacaagcaaaacgtctaagctcgtcgacctcctcttaatggcttcaagttcaacttcattcccgttaaccaccgcgccaccgcagggtgtcaggtttaaccggagaaaaccgaggttaaccgtgtgggctaagcaaacggcgtttcaactcgggaaaacgaagggtgatgatgactcggaggggaaacaaaaagggaagaacccgttccagtttgatttcggtaagttaccggacatgaagtcactgataccggttgtgacgaatccttctaccggtttagtgtttggtaataacagaaagaaagatcctggtactatttttgtggctggtgctacgggacaagctggtatacgcatagctcaaacgctcttacaacgaggattcagtgttcgagccggtgttcctgaccttggagctgcccaggacctagctcgtgtcgcggctacttacaagattttatcaaatgatgaagtcaagaggctaaacgcagttcaatcccccttccaagacgctgaatcaatagcaaaagcgattggaaacgcaaccaaagttgttgttacggtcggggcaacagagaatggtccggacgcccaagtttcgacctcagacgcattgctcgtggtccaagcagctgagctagccggcgtaagccacgtggcgatagtctacgacggcaccatcagcgggtccacatacaacgtgctcgacgggattacttcgtttttcggcaatcttttcgcaaaatctcagccattgactatctctgacctcatcgagaaagtagctcaaaccgacgtggcctacacactcataaagacgagtttgacggaggatttctctccggagaaagcttataacgtcgtcgtttcagctgaagggagtaacagcggcagtggcagtagttcgtccgaggcctacaaagtaatgtaatgttccgaagttgaagattgcgtcgctggttgcagacatttttgcgaatacggccgtggcagaaaataaggtggtggaagtttctacagatccatcagcaccatcgcggccagtggacgagcttttcagtgtaatcccggaagatgggaggagaaaagtgtacgcagatgcgatcgcaagggaaagagcagaggaagaagctaaagttgcagctgacaaagctcgagaggcagcagaagcagcgaaagagtttgagaagcaaatgcaaaagctctctgagaaagaagcagaagctgcaagcttagctgaggatgcgcagcagaaagcagatgccgtgggagtcacagtggacggtttatttaacaaggcgaaagatatcagctcaggtctctcctggaataaactcggctctcagttcgcaactgcgattcagaacgcttcagagacgcctaaagtacaggttgctacggtcagaggacaagcaaaagcgagaaacttgccacccaagaaagcagtggtgaagcagagaccatcatctccgtttgcatccaaaccgaaagaagaacgtccgaagaagccggagaaagaggtgaggaaagtgttcggaggattgtttaagcaagagaccatctacatcgacgatgattgaaaaggccatatgcgatgtccttttgaagttccgtacagtttccttttttctctttccttctgtttcaagttaaaattctgtaatcgtatgacaaaattatacataaaaaaccatcattctctct

SEQ ID NO: 90813 - protein, 297 aa, Arabidopsis thaliana
  peptide (1)..(297): Ceres Seq. ID no. 12725374
MASSSTSFPLTTAPPQGVRFNRRKPRLTVWAKQTAFQLGKTKGDDDSEGKQKGKNPFQFDFGKLPDMKSLIPVVTNPSTGLVFGNNRKKDPGTIFVAGATGQAGIRIAQTLLQRGFSVRAGVPDLGAAQDLARVAATYKILSNDEVKRLNAVQSPFQDAESIAKAIGNATKVVVTVGATENGPDAQVSTSDALLVVQAAELAGVSHVAIVYDGTISGSTYNVLDGITSFFGNLFAKSQPLTISDLIEKVAQTDVAYTLIKTSLTEDFSPEKAYNVVVSAEGSNSGSGSSSSEAYKVM

SEQ ID NO: 90814 - protein, 231 aa, Arabidopsis thaliana
  peptide (1)..(231): Ceres Seq. ID no. 12725375
MKSLIPVVTNPSTGLVFGNNRKKDPGTIFVAGATGQAGIRIAQTLLQRGFSVRAGVPDLGAAQDLARVAATYKILSNDEVKRLNAVQSPFQDAESIAKAIGNATKVVVTVGATENGPDAQVSTSDALLVVQAAELAGVSHVAIVYDGTISGSTYNVLDGITSFFGNLFAKSQPLTISDLIEKVAQTDVAYTLIKTSLTEDFSPEKAYNVVVSAEGSNSGSGSSSSEAYKVM

SEQ ID NO: 90815 - DNA, 615 bp, Arabidopsis thaliana
  misc_feature (1)..(615): Ceres Seq. ID no. 12725395
  misc_feature (1)..(615): Ortholog of  Ceres SEQ ID NO 13594498 as cited in SEQ ID NO 51322
  misc_feature (1)..(615): Ortholog of  Ceres SEQ ID NO 15179033 as cited in SEQ ID NO 0
atggcaatctccaatggcgccgtggaatttctccggcgacgactcctcccaactacactaatccacgtcacggctatagacggcatcgtgaacgttaattcactcttctcgcttgctcttttcctcggcctaaccacaagtggaaacatcactttcccggtttcctcatcagcctccgagaaccaccatctccgccgatgtatctctgcaaaaggtcccgcattagcggagaggctagtatcaagccatgtttactccttcagtttattcctcttctccagtctcatcgctatgtctctcaagcaagcaattaggacaacaacaacaacaacaaacgggaactgtttagaggaggaggcgcgtgtgttgaacgcgggagaggggcgtgtgaacttggcagctttaagggttgggattgttgcttcgtgtgttgcgtcggttttgggatgtgggttcttgacaatggcgttagtggatcttgttcagattaaacttggacctttggaatgtaagagaagctttcatgcacttgcagctattgttcctcttgttgtacttgttccttctgcacttattatctatgtgttccttgtgctctacgcatttatctattaa

SEQ ID NO: 90816 - protein, 204 aa, Arabidopsis thaliana
  peptide (1)..(204): Ceres Seq. ID no. 12725396
MAISNGAVEFLRRRLLPTTLIHVTAIDGIVNVNSLFSLALFLGLTTSGNITFPVSSSASENHHLRRCISAKGPALAERLVSSHVYSFSLFLFSSLIAMSLKQAIRTTTTTTNGNCLEEEARVLNAGEGRVNLAALRVGIVASCVASVLGCGFLTMALVDLVQIKLGPLECKRSFHALAAIVPLVVLVPSALIIYVFLVLYAFIY

SEQ ID NO: 90817 - protein, 107 aa, Arabidopsis thaliana
  peptide (1)..(107): Ceres Seq. ID no. 12725397
MSLKQAIRTTTTTTNGNCLEEEARVLNAGEGRVNLAALRVGIVASCVASVLGCGFLTMALVDLVQIKLGPLECKRSFHALAAIVPLVVLVPSALIIYVFLVLYAFIY

SEQ ID NO: 90818 - DNA, 1593 bp, Arabidopsis thaliana
  misc_feature (1)..(1593): Ceres Seq. ID no. 12725402
  misc_feature (1)..(1593): Ortholog of  Ceres SEQ ID NO 15171152 as cited in SEQ ID NO 60275
agggtttatatgaatttatgattcttcctcttaaaccctaatttcgtattcttactccttcctcgccaatcttcatcttcctcatgttttctctaattctccatggaagaaagtctgtggaattacagaaatggcgtaatttaagagttacagtgagcattgtgcaaaatgcatttccttttaccaccaaatcgttctcttctacaatagctaaagattcgagtccaaagggaagtactttcacagtctcttatctcgttgaatcattgggtttgactaaaaaacttgcagaaacaatctcaaagaaagtcaccttcgaagacaaggtaaatccagattctgttctgaatcttcttagaagtaatgggtttaaagattctcagatatctaggatcataagggcttacccacgattgcttgtaacagatgctgagaaatctcttcgtccaaagcttcagtttttaaagtctagaggagcttcaagctctgaggtcatagagattgtttcgaatgttccaacaatcttggataagaaaggtgaagaatctgttagtttatactatgatttcgttaaggacattatgcaagatggtaaaagtttgtgtatttcttgtccagagggaaagaaaggtaacagaattcgaaatatatcggttttgagagaattgggagtacctcagaagttgttgttttcattgcttatatctagatatcaacctgtttgtggtaaagagaagtttgaagaaagtttaaagaaagttgttgatatgggttttgatccggctaaatccaagtttgtggaagctttgcatgtagtttacgaaatgagcgagaaaacgatagaagagaaagtgaatgtgtataagaggttaggctttagtgaagccgagatatgggcgattttcaagaagtggccttactttttaaaattctctgagaagaagataattctgatgtttgaaacactgaagaagtgtggtttggtagaggaagagattatttcggtgttgaagagtcgtccacaatgcatacgatcttctgagcagaagatattagactctattgaaatgttcttaggcttaggattcagtagagatgatttcaagatgatggttaagcgatatccttgttgcactgcatattctggcgagacgctgaggaagaagtttgaggttttggtgaagatgatgaattggccgctagaggctgtggtcatgatccctacggtacttggatacagcttggagaagaggatagtgccaaggtctaacgtgatcaaagctctcatgtcgaaaggattgatcggaagtgaaaaccctccgatttcatctgtcttggtatgtactgatcaggagttcttgaaaaggtatgtgatgaagcatgacaagctagtgcctaagttgatggctatcttcaacagaggtcgtgtttcatagttaatcttttaacgcgtgaatagaactgaggaagaggagtttttatttactagtgtctgttaatgtctaaactgaaatccatttctgtaatagtcgtaacgaaaaatttaactactatatttgtggacatgtttagtgatttgaatttcaagttaag

SEQ ID NO: 90819 - protein, 450 aa, Arabidopsis thaliana
  peptide (1)..(450): Ceres Seq. ID no. 12725403
MFSLILHGRKSVELQKWRNLRVTVSIVQNAFPFTTKSFSSTIAKDSSPKGSTFTVSYLVESLGLTKKLAETISKKVTFEDKVNPDSVLNLLRSNGFKDSQISRIIRAYPRLLVTDAEKSLRPKLQFLKSRGASSSEVIEIVSNVPTILDKKGEESVSLYYDFVKDIMQDGKSLCISCPEGKKGNRIRNISVLRELGVPQKLLFSLLISRYQPVCGKEKFEESLKKVVDMGFDPAKSKFVEALHVVYEMSEKTIEEKVNVYKRLGFSEAEIWAIFKKWPYFLKFSEKKIILMFETLKKCGLVEEEIISVLKSRPQCIRSSEQKILDSIEMFLGLGFSRDDFKMMVKRYPCCTAYSGETLRKKFEVLVKMMNWPLEAVVMIPTVLGYSLEKRIVPRSNVIKALMSKGLIGSENPPISSVLVCTDQEFLKRYVMKHDKLVPKLMAIFNRGRVS

SEQ ID NO: 90820 - protein, 284 aa, Arabidopsis thaliana
  peptide (1)..(284): Ceres Seq. ID no. 12725404
MQDGKSLCISCPEGKKGNRIRNISVLRELGVPQKLLFSLLISRYQPVCGKEKFEESLKKVVDMGFDPAKSKFVEALHVVYEMSEKTIEEKVNVYKRLGFSEAEIWAIFKKWPYFLKFSEKKIILMFETLKKCGLVEEEIISVLKSRPQCIRSSEQKILDSIEMFLGLGFSRDDFKMMVKRYPCCTAYSGETLRKKFEVLVKMMNWPLEAVVMIPTVLGYSLEKRIVPRSNVIKALMSKGLIGSENPPISSVLVCTDQEFLKRYVMKHDKLVPKLMAIFNRGRVS

SEQ ID NO: 90821 - DNA, 2775 bp, Arabidopsis thaliana
  misc_feature (1)..(2775): Ceres Seq. ID no. 12725424
  misc_feature (1)..(2775): Ortholog of  Ceres SEQ ID NO 13595870 as cited in SEQ ID NO 62101
  misc_feature (1)..(2775): Ortholog of  Ceres SEQ ID NO 13590241 as cited in SEQ ID NO 63878
  misc_feature (1)..(2775): Ortholog of  Ceres SEQ ID NO 13657939 as cited in SEQ ID NO 66349
agggtttcgaaataatgactactacattcgaatttctgcaaccaagaatccacggatttgcaacttgttgtagtagtaatagtctattgtactcgaaagcttcgagatttttcaacgatcgttgtagggtttatcgccaaaatccgaatcggtttgtctccaattcaatcacgcttcctctgcagaagaaacaagttacagtgttgagaaatcacgaaaggtttaatctttgggatgggttttcaagaaagaagagtagattagttgtgaattgtcaagaagatgatcagaacgagagttctagtgaggaggaagaaagcagtcagagtactccggcgaagtcggagaggaaaagagagaagaaagaagataaggtgtggtggtcaaagggcaagaaatggcagtggcagccaataatccaagcgcaagggattggagttttgttgttgcaattgagtgttgttatgtttgtgatgcgattgcttcgacctggtatacctttacctggatcggagcctcgaattcagacgacttttgtgagtgtaccgtatagtgagttcttaagtaaagttaacagtaaccaggtgcagaaagtggaggttgatggggttcaagttttgtttaagttaagagatgatgggaagtggcaagagagtgaaactagtaggttgtctcagtcgtctgaatcgttgttaagaactgtggctcctacgaaaagggttgtgtattccactactaggccgggtgatatcaaaacaccgtatgagaagatgcttgggaataatgtggaatttggatcgcctgagaagcgttctggtggcttcttcaactctgcattgatagctcttttctacatagcggtacttgctgggcttattcgattccctgttagcttctccacgagttcaaccggccagcttaggacccgaaaggctggtggtcctgatgggggaaaagtctctggtggaggtgaaacaatcacttttgcggatgttgcaggtgttgatgaagcaaaggaagagctagaagaaatcgtggaatttcttaggaatcctgaaaagtatgtccgtctaggtgcacgtcctccgcgtggtgtcctattggttggtcttcccggaacagggaaaacccttcttgcaaaggctgttgctggggaagctgaagtccccttcataagttgctctgcaagtgagtttgtagagctgtatgtcggtatgggtgcctcacgtgtaagggatctttttgcacgggccaagaaggaagctccatcgattatatttattgatgagatagatgctgtggcaaaaagccgtgatggtaaattccgaatggggagcaacgatgaaagggagcaaactttaaatcagttgctcactgagatggatggttttgacagcaattctgcggttatcgttcttggagctacaaatcgtgccgatgtcttagatccggccctgcgtcgtcctgggagatttgatcgtgttgttacggtggaaacgccagacaaaattggaagagaatccattttgagagtacatgtgtcaaagaaagagcttcctttgggagatgatgtcaacctcggtagtattgcctcaatgaccactggtttcacgggggcagatcttgcaaacttggtaaatgaggctgccttgctagctggaagaaagaacaagacgaacgttgagaaaattgacttcattcaagctgtggagcgatcaatagcgggcatagagaagaaatctgcaagattaaaaggcaatgagaaggcagtggtcgcaaggcatgaagctgggcatgcagtggttggtaccgctgttgcaaatcttcttactggacagccacgtgttgagaaattaagcatattgccaagaacaggaggggcattgggatttacatacattcctcctactagtgaagacagatatttactcttcattgatgagctgcttgggcgtttagttacccttcttggaggtcgtgcagctgaagaagttgtttactcagggcgtatatcaacaggtgcatttgatgatataaggcgggcaactgatatggcatacaaggcagtagctgaatacggtcttaaccaaaaaatcggacctgtgtctgtggctacactttctggtggtgggattgacgattctggaggctcgccatggggaagagatcaggggaaactagttgatcttgttcaaaaagaagtgacaattttgttacaatctgctctcgatgttgcgctgtctgttgtacgcgctaatccagatgtattggaagggcttggtgctcaacttgaagagaaagagaaagtagaaggtgaagaactgcagaagtggttaagcatggtggttgcaccagaagaactcgcagtctttgtcgaaggaaagcaagagcttttgctcccagcacaagctagctccagttaacaactactctgttctatcatcaattatagctataaagacagtatctaacacggatcatcagctctttccttgctgccttctgtatctccaggtcagatctggttatcaccattgccctttagcatccatggttccagcatgcatagaacacttgaatcaaacttgaagaaccatattgggatatgacttttggtgataactcatagattttggtggatgtgttttaagatttggtattcttgctagatacagtctctttaacttggcaaaaaagtgtataattgattcatatgtataaaaagccagactgatatgtgtaaagatcttaaagacccccacaaaaggttgcaac

SEQ ID NO: 90822 - protein, 806 aa, Arabidopsis thaliana
  peptide (1)..(806): Ceres Seq. ID no. 12725425
GFEIMTTTFEFLQPRIHGFATCCSSNSLLYSKASRFFNDRCRVYRQNPNRFVSNSITLPLQKKQVTVLRNHERFNLWDGFSRKKSRLVVNCQEDDQNESSSEEEESSQSTPAKSERKREKKEDKVWWSKGKKWQWQPIIQAQGIGVLLLQLSVVMFVMRLLRPGIPLPGSEPRIQTTFVSVPYSEFLSKVNSNQVQKVEVDGVQVLFKLRDDGKWQESETSRLSQSSESLLRTVAPTKRVVYSTTRPGDIKTPYEKMLGNNVEFGSPEKRSGGFFNSALIALFYIAVLAGLIRFPVSFSTSSTGQLRTRKAGGPDGGKVSGGGETITFADVAGVDEAKEELEEIVEFLRNPEKYVRLGARPPRGVLLVGLPGTGKTLLAKAVAGEAEVPFISCSASEFVELYVGMGASRVRDLFARAKKEAPSIIFIDEIDAVAKSRDGKFRMGSNDEREQTLNQLLTEMDGFDSNSAVIVLGATNRADVLDPALRRPGRFDRVVTVETPDKIGRESILRVHVSKKELPLGDDVNLGSIASMTTGFTGADLANLVNEAALLAGRKNKTNVEKIDFIQAVERSIAGIEKKSARLKGNEKAVVARHEAGHAVVGTAVANLLTGQPRVEKLSILPRTGGALGFTYIPPTSEDRYLLFIDELLGRLVTLLGGRAAEEVVYSGRISTGAFDDIRRATDMAYKAVAEYGLNQKIGPVSVATLSGGGIDDSGGSPWGRDQGKLVDLVQKEVTILLQSALDVALSVVRANPDVLEGLGAQLEEKEKVEGEELQKWLSMVVAPEELAVFVEGKQELLLPAQASSS

SEQ ID NO: 90823 - protein, 802 aa, Arabidopsis thaliana
  peptide (1)..(802): Ceres Seq. ID no. 12725426
MTTTFEFLQPRIHGFATCCSSNSLLYSKASRFFNDRCRVYRQNPNRFVSNSITLPLQKKQVTVLRNHERFNLWDGFSRKKSRLVVNCQEDDQNESSSEEEESSQSTPAKSERKREKKEDKVWWSKGKKWQWQPIIQAQGIGVLLLQLSVVMFVMRLLRPGIPLPGSEPRIQTTFVSVPYSEFLSKVNSNQVQKVEVDGVQVLFKLRDDGKWQESETSRLSQSSESLLRTVAPTKRVVYSTTRPGDIKTPYEKMLGNNVEFGSPEKRSGGFFNSALIALFYIAVLAGLIRFPVSFSTSSTGQLRTRKAGGPDGGKVSGGGETITFADVAGVDEAKEELEEIVEFLRNPEKYVRLGARPPRGVLLVGLPGTGKTLLAKAVAGEAEVPFISCSASEFVELYVGMGASRVRDLFARAKKEAPSIIFIDEIDAVAKSRDGKFRMGSNDEREQTLNQLLTEMDGFDSNSAVIVLGATNRADVLDPALRRPGRFDRVVTVETPDKIGRESILRVHVSKKELPLGDDVNLGSIASMTTGFTGADLANLVNEAALLAGRKNKTNVEKIDFIQAVERSIAGIEKKSARLKGNEKAVVARHEAGHAVVGTAVANLLTGQPRVEKLSILPRTGGALGFTYIPPTSEDRYLLFIDELLGRLVTLLGGRAAEEVVYSGRISTGAFDDIRRATDMAYKAVAEYGLNQKIGPVSVATLSGGGIDDSGGSPWGRDQGKLVDLVQKEVTILLQSALDVALSVVRANPDVLEGLGAQLEEKEKVEGEELQKWLSMVVAPEELAVFVEGKQELLLPAQASSS

SEQ ID NO: 90824 - protein, 652 aa, Arabidopsis thaliana
  peptide (1)..(652): Ceres Seq. ID no. 12725427
MFVMRLLRPGIPLPGSEPRIQTTFVSVPYSEFLSKVNSNQVQKVEVDGVQVLFKLRDDGKWQESETSRLSQSSESLLRTVAPTKRVVYSTTRPGDIKTPYEKMLGNNVEFGSPEKRSGGFFNSALIALFYIAVLAGLIRFPVSFSTSSTGQLRTRKAGGPDGGKVSGGGETITFADVAGVDEAKEELEEIVEFLRNPEKYVRLGARPPRGVLLVGLPGTGKTLLAKAVAGEAEVPFISCSASEFVELYVGMGASRVRDLFARAKKEAPSIIFIDEIDAVAKSRDGKFRMGSNDEREQTLNQLLTEMDGFDSNSAVIVLGATNRADVLDPALRRPGRFDRVVTVETPDKIGRESILRVHVSKKELPLGDDVNLGSIASMTTGFTGADLANLVNEAALLAGRKNKTNVEKIDFIQAVERSIAGIEKKSARLKGNEKAVVARHEAGHAVVGTAVANLLTGQPRVEKLSILPRTGGALGFTYIPPTSEDRYLLFIDELLGRLVTLLGGRAAEEVVYSGRISTGAFDDIRRATDMAYKAVAEYGLNQKIGPVSVATLSGGGIDDSGGSPWGRDQGKLVDLVQKEVTILLQSALDVALSVVRANPDVLEGLGAQLEEKEKVEGEELQKWLSMVVAPEELAVFVEGKQELLLPAQASSS

SEQ ID NO: 90825 - DNA, 3030 bp, Arabidopsis thaliana
  misc_feature (1)..(3030): Ceres Seq. ID no. 12725428
  misc_feature (1)..(3030): Ortholog of  Ceres SEQ ID NO 13656662 as cited in SEQ ID NO 65594
atgagactatttcttttacttgctttcaatgctctcatgcaactcgaagcatatggttttaccgatgaaagtgataggcaagcgttgttggagatcaagtctcaagtttctgaaagcaaaagggatgccttgtccgcgtggaataactcattccctctctgcagctggaagtgggttagatgtggccgcaaacacaagagagttactcgtttggacctcggaggattgcagttgggaggagtgatatcaccatctattggtaatctttcgtttctcatatatcttgacctctctaataactcttttggtggaaccatccctcaagagatgggaaacttgtttagacttaaatatttggctgtgggctttaattatctggaaggagagattccagccagtttgtccaactgctctagattgttgtaccttgatttattttcaaacaatcttggagacggtgttccttcagaactagggtcattgagaaagcttctttatctatatcttggtctaaacgacctcaaaggaaagttccccgtatttatacgaaacttgacgtctctaatagtgctcaacttgggatataatcatctggaaggagaaattccagatgatatagctatgctgagtcaaatggtgtctcttacattaacaatgaacaacttctctggcgtttttcctcctgctttctacaacttgtcctcacttgagaatttatacctccttggtaatggtttctcgggtaacttgaagcctgattttggtaatctgctaccaaacattcatgagttatctttgcatggaaattttctaacaggagccatcccaacaacacttgccaatatttcaactctggaaatgtttggaattggtaaaaacaggatgacaggaagtatctctcccaactttggaaaactagagaatttgcattacctagaacttgctaacaattctttgggaagttactcttttggagatcttgcatttcttgatgctttgactaattgctcccatttgcatgggttatctgtgagttacaataggcttgggggtgctttgcctacatccattgtcaatatgtccacggaactcaccgttttgaaccttaaaggaaacctcatttatggaagcattcctcatgatattggaaatctcataggcctacaatcacttttgttggcagataatctattaacaggaccactcccaacctctcttggaaatcttgtagggctcggggaattaattttgttttcaaataggttttctggagagataccctcttttataggcaaccttactcagttagtaaaactatatttatccaacaatagttttgaaggaatcgttcctccgagtcttggtgattgtagtcacatgctcgacttacagattgggtataataagttaaatgggactatacctaaggagatcatgcaaatcccaacccttgttcacctcaacatggaatctaattctttgagtggctctctaccaaacgatattggaagattacaaaatcttgttgagctattacttgggaataataacttatcaggacatctcccacaaactttgggaaaatgtctttcgatggaagttatttatctacaagaaaaccattttgatggaaccattccagatataaaagggttgatgggtgttaaaaacgttgatttgtcaaacaataatctctctggaagtatatctgaatattttgaaaacttttccaagttggaatatctcaatctatccgataacaatttcgagggaagagtcccaacagaaggaatatttcaaaatgctactttagtttcagtattcggaaacaaaaatctttgtggaagcatcaaggaactgaaactaaagccatgcattgcccaagcaccaccagtggagacaaggcatccatctcttttgaagaaagttgcgattggggtcagcgtaggcatagctttgcttttgctattgttcatagtttctctaagctggttcaaaaaaagaaagaacaaccagaagatcaataattcagctccttttacattggagattttccatgaaaagctaagttatggagatctacgaaatgcgacagatggcttctcttcgagcaatatagttgggtcaggtagttttggtactgtgtttaaggcattgctccagacggagaacaagattgttgcagtgaaagttctaaacatgcagagacgtggagctatgaagagctttatggcagaatgtgaatctttgaaggatataaggcatcgtaatctcgtgaaactattgacagcttgcgctagtattgatttccaaggtaacgaattcagagctctcatctatgagttcatgccgaatggaagtttggataaatggctgcacccagaggaagtcgaagagattcataggccctcaagaactttgacacttcttgaaaggcttaacattgccatagacgtggcttctgttttggactatcttcatgttcactgtcatgagcctatagctcattgcgatcttaagccaagcaacatacttctcgacgatgatctaactgcccatgttagcgacttcggtctcgctcgtcttctcctcaaattcgaccaggagtctttcttcaaccaactaagctcagctggtgttagaggaaccattgggtatgccgcaccagaatatggaatgggaggacaaccgtcaatacacggtgatgtatatagctttggggttctcgttttggaaatgttcactggaaaaagaccaaccaatgagttatttggaggaaactttaccctgaacagctacaccaaggcggccttgccagaaagagttttggacattgcagacaaatcgattcttcatagtggtctcagagttggtttccctgtacttgagtgcttgaaagggattttggatgtgggacttagatgttgtgaagaatctccgctgaaccggttggcaacgagtgaagcagccaaggagttaatctcaatcagagagagattctttaaaacccggagaacagccagacgttga

SEQ ID NO: 90826 - protein, 1009 aa, Arabidopsis thaliana
  peptide (1)..(1009): Ceres Seq. ID no. 12725429
MRLFLLLAFNALMQLEAYGFTDESDRQALLEIKSQVSESKRDALSAWNNSFPLCSWKWVRCGRKHKRVTRLDLGGLQLGGVISPSIGNLSFLIYLDLSNNSFGGTIPQEMGNLFRLKYLAVGFNYLEGEIPASLSNCSRLLYLDLFSNNLGDGVPSELGSLRKLLYLYLGLNDLKGKFPVFIRNLTSLIVLNLGYNHLEGEIPDDIAMLSQMVSLTLTMNNFSGVFPPAFYNLSSLENLYLLGNGFSGNLKPDFGNLLPNIHELSLHGNFLTGAIPTTLANISTLEMFGIGKNRMTGSISPNFGKLENLHYLELANNSLGSYSFGDLAFLDALTNCSHLHGLSVSYNRLGGALPTSIVNMSTELTVLNLKGNLIYGSIPHDIGNLIGLQSLLLADNLLTGPLPTSLGNLVGLGELILFSNRFSGEIPSFIGNLTQLVKLYLSNNSFEGIVPPSLGDCSHMLDLQIGYNKLNGTIPKEIMQIPTLVHLNMESNSLSGSLPNDIGRLQNLVELLLGNNNLSGHLPQTLGKCLSMEVIYLQENHFDGTIPDIKGLMGVKNVDLSNNNLSGSISEYFENFSKLEYLNLSDNNFEGRVPTEGIFQNATLVSVFGNKNLCGSIKELKLKPCIAQAPPVETRHPSLLKKVAIGVSVGIALLLLLFIVSLSWFKKRKNNQKINNSAPFTLEIFHEKLSYGDLRNATDGFSSSNIVGSGSFGTVFKALLQTENKIVAVKVLNMQRRGAMKSFMAECESLKDIRHRNLVKLLTACASIDFQGNEFRALIYEFMPNGSLDKWLHPEEVEEIHRPSRTLTLLERLNIAIDVASVLDYLHVHCHEPIAHCDLKPSNILLDDDLTAHVSDFGLARLLLKFDQESFFNQLSSAGVRGTIGYAAPEYGMGGQPSIHGDVYSFGVLVLEMFTGKRPTNELFGGNFTLNSYTKAALPERVLDIADKSILHSGLRVGFPVLECLKGILDVGLRCCEESPLNRLATSEAAKELISIRERFFKTRRTARR

SEQ ID NO: 90827 - protein, 997 aa, Arabidopsis thaliana
  peptide (1)..(997): Ceres Seq. ID no. 12725430
MQLEAYGFTDESDRQALLEIKSQVSESKRDALSAWNNSFPLCSWKWVRCGRKHKRVTRLDLGGLQLGGVISPSIGNLSFLIYLDLSNNSFGGTIPQEMGNLFRLKYLAVGFNYLEGEIPASLSNCSRLLYLDLFSNNLGDGVPSELGSLRKLLYLYLGLNDLKGKFPVFIRNLTSLIVLNLGYNHLEGEIPDDIAMLSQMVSLTLTMNNFSGVFPPAFYNLSSLENLYLLGNGFSGNLKPDFGNLLPNIHELSLHGNFLTGAIPTTLANISTLEMFGIGKNRMTGSISPNFGKLENLHYLELANNSLGSYSFGDLAFLDALTNCSHLHGLSVSYNRLGGALPTSIVNMSTELTVLNLKGNLIYGSIPHDIGNLIGLQSLLLADNLLTGPLPTSLGNLVGLGELILFSNRFSGEIPSFIGNLTQLVKLYLSNNSFEGIVPPSLGDCSHMLDLQIGYNKLNGTIPKEIMQIPTLVHLNMESNSLSGSLPNDIGRLQNLVELLLGNNNLSGHLPQTLGKCLSMEVIYLQENHFDGTIPDIKGLMGVKNVDLSNNNLSGSISEYFENFSKLEYLNLSDNNFEGRVPTEGIFQNATLVSVFGNKNLCGSIKELKLKPCIAQAPPVETRHPSLLKKVAIGVSVGIALLLLLFIVSLSWFKKRKNNQKINNSAPFTLEIFHEKLSYGDLRNATDGFSSSNIVGSGSFGTVFKALLQTENKIVAVKVLNMQRRGAMKSFMAECESLKDIRHRNLVKLLTACASIDFQGNEFRALIYEFMPNGSLDKWLHPEEVEEIHRPSRTLTLLERLNIAIDVASVLDYLHVHCHEPIAHCDLKPSNILLDDDLTAHVSDFGLARLLLKFDQESFFNQLSSAGVRGTIGYAAPEYGMGGQPSIHGDVYSFGVLVLEMFTGKRPTNELFGGNFTLNSYTKAALPERVLDIADKSILHSGLRVGFPVLECLKGILDVGLRCCEESPLNRLATSEAAKELISIRERFFKTRRTARR

SEQ ID NO: 90828 - protein, 900 aa, Arabidopsis thaliana
  peptide (1)..(900): Ceres Seq. ID no. 12725431
MGNLFRLKYLAVGFNYLEGEIPASLSNCSRLLYLDLFSNNLGDGVPSELGSLRKLLYLYLGLNDLKGKFPVFIRNLTSLIVLNLGYNHLEGEIPDDIAMLSQMVSLTLTMNNFSGVFPPAFYNLSSLENLYLLGNGFSGNLKPDFGNLLPNIHELSLHGNFLTGAIPTTLANISTLEMFGIGKNRMTGSISPNFGKLENLHYLELANNSLGSYSFGDLAFLDALTNCSHLHGLSVSYNRLGGALPTSIVNMSTELTVLNLKGNLIYGSIPHDIGNLIGLQSLLLADNLLTGPLPTSLGNLVGLGELILFSNRFSGEIPSFIGNLTQLVKLYLSNNSFEGIVPPSLGDCSHMLDLQIGYNKLNGTIPKEIMQIPTLVHLNMESNSLSGSLPNDIGRLQNLVELLLGNNNLSGHLPQTLGKCLSMEVIYLQENHFDGTIPDIKGLMGVKNVDLSNNNLSGSISEYFENFSKLEYLNLSDNNFEGRVPTEGIFQNATLVSVFGNKNLCGSIKELKLKPCIAQAPPVETRHPSLLKKVAIGVSVGIALLLLLFIVSLSWFKKRKNNQKINNSAPFTLEIFHEKLSYGDLRNATDGFSSSNIVGSGSFGTVFKALLQTENKIVAVKVLNMQRRGAMKSFMAECESLKDIRHRNLVKLLTACASIDFQGNEFRALIYEFMPNGSLDKWLHPEEVEEIHRPSRTLTLLERLNIAIDVASVLDYLHVHCHEPIAHCDLKPSNILLDDDLTAHVSDFGLARLLLKFDQESFFNQLSSAGVRGTIGYAAPEYGMGGQPSIHGDVYSFGVLVLEMFTGKRPTNELFGGNFTLNSYTKAALPERVLDIADKSILHSGLRVGFPVLECLKGILDVGLRCCEESPLNRLATSEAAKELISIRERFFKTRRTARR

SEQ ID NO: 90829 - DNA, 3078 bp, Arabidopsis thaliana
  misc_feature (1)..(3078): Ceres Seq. ID no. 12725432
  misc_feature (1)..(3078): Ortholog of  Ceres SEQ ID NO 13656662 as cited in SEQ ID NO 65594
atgggggttccttgtattgttatgagactgattcttgtatctgctttacttgtctctgtgtcacttgaacattcagatatggtctgtgcacaaacaatcagattgacggaggagactgataaacaagcattgcttgagttcaagtctcaagtttctgaaacaagtagagttgtgttgggctcgtggaatgactccctgcctctctgtagctggaccggtgttaagtgtggcctcaaacacaggagagtaactggtgtggatcttggaggactaaaactaaccggtgtagtctctccctttgttggtaacctctcatttcttagatctttgaatcttgcagacaactttttccatggtgccatcccttcagaggttggaaacttgttcaggcttcaatatttgaacatgagcaataatttatttggaggggtgattccggttgttctgtcgaactgctctagcctgtcaacacttgatttatcatcaaatcatcttgaacaaggcgtgcctttggagtttggttcgctgtctaagcttgtccttctctctcttggtagaaacaatctaacagggaagtttcctgcctcattgggaaacctgacatcactccagatgctcgattttatatataaccaaatagaaggagagatccctggggatatagccagactgaaacagatgatctttttccgaatagcattaaacaagtttaatggggttttccctcctccaatttacaacctgtcttcactaatattcctgtccattaccggcaacagtttctctggcacccttagacctgactttggttctcttctccctaaccttcaaatactatatatggggataaatagtttcacgggtaccattccagagacactttccaatatctcaagtcttcgacaacttgatattccgtctaaccatcttactggaaagataccattgagtttcggaagacttcagaatctattactgctaggccttaataataactctctgggaaactactcttctggtgatcttgattttcttggtgcactgactaactgcagtcagttgcagtatttgaatgttggcttcaacaaactcggcggtcagttgcctgtctttatagccaatctctccacccaattaactgagctctctcttggtggaaatctcatctctggaagtattcctcatggcatagggaatcttgtaagcctgcaaacattagacttgggcgaaaatctgttgacaggcaaacttcctccctcattgggagaactttctgaattgagaaaagtcttgctctattcaaatggactgtctggagagataccatcttccttggggaatatcagtgggctaacatacctgtatctgcttaacaacagttttgaaggaagcatcccttcaagtcttggaagttgcagctaccttctagacttgaacctcggtactaataagttgaatggcagcataccccatgagcttatggaacttccatctcttgtcgtcttaaatgtctcatttaatttgttggttggccctttgagacaagacattggaaagcttaaatttctattagctctagacgtttcatacaataaactatcaggacagattccacaaaccttggcgaattgtctctcactagaattccttttgctgcaagggaattcatttgttgggcccattccagatataagagggttgactggcctcagattcctagatctgtcgaagaataatctctctggtacaatacctgaatatatggcgaacttttccaaactgcagaacctgaatctctctttgaacaacttcgacggagctgtgccaacggaaggggtatttcgtaataccagtgcgatgtcggtctttggtaacataaacctctgtggaggcatcccgtcattacagcttcagccatgctctgttgaattaccaagaaggcattcatcagtcagaaagataatcaccatttgtgtcagtgcagttatggcagcacttttgcttctatgtctgtgtgtggtttatctatgctggtacaaactgagagtgaagagtgtcagagctaataataatgagaatgatcggtctttctccccagtgaaatcgttttatgaaaagataagttatgatgagctctacaagacaaccggtggcttctcttccagcaatttgattgggtcgggtaactttggggctgtgtttaaaggatttcttgggtccaagaacaaggctgttgccattaaagttttgaatctctgcaaacgtggtgctgcaaagagtttcatagcggaatgtgaagcattaggaggtataaggcatcgcaaccttgtgaagttggttactatctgttcaagttctgattttgaaggaaatgattttagagctctagtgtatgagttcatgcctaatggaaacttggacatgtggctgcacccggatgaaatagaagaaactggcaatccctcgagaaccctgggcctttttgcgagactcaacattgccatagatgttgcttcggctctggtttatcttcatacttattgtcacaaccctatagcccactgtgatattaagccaagcaatattctactagacaaagatttgactgctcatgtaagcgactttggtttggcacaactcctactaaaatttgatcgggatacattccatattcaattcagctctgcaggtgttcgtggaaccattggctatgctgcaccagaatatggtatgggaggtcatccatcaattatgggagacgtgtacagttttggtattgtcctattggagattttcactggaaaaagacccaccaataagttattcgtggacggtttaactctacatagttttactaaatcagcattgcagaaacgacaagcactagatatcacagacgaaactattctccgtggtgcatatgctcagcatttcaatatggtcgaatgcttgacccttgtgtttcgggtgggagtcagttgttcagaagaatcaccggtaaaccggatatcaatggctgaggctataagcaagctggtctctatcagagaaagttttttcagagacgaggagacttaa

SEQ ID NO: 90830 - protein, 1025 aa, Arabidopsis thaliana
  peptide (1)..(1025): Ceres Seq. ID no. 12725433
MGVPCIVMRLILVSALLVSVSLEHSDMVCAQTIRLTEETDKQALLEFKSQVSETSRVVLGSWNDSLPLCSWTGVKCGLKHRRVTGVDLGGLKLTGVVSPFVGNLSFLRSLNLADNFFHGAIPSEVGNLFRLQYLNMSNNLFGGVIPVVLSNCSSLSTLDLSSNHLEQGVPLEFGSLSKLVLLSLGRNNLTGKFPASLGNLTSLQMLDFIYNQIEGEIPGDIARLKQMIFFRIALNKFNGVFPPPIYNLSSLIFLSITGNSFSGTLRPDFGSLLPNLQILYMGINSFTGTIPETLSNISSLRQLDIPSNHLTGKIPLSFGRLQNLLLLGLNNNSLGNYSSGDLDFLGALTNCSQLQYLNVGFNKLGGQLPVFIANLSTQLTELSLGGNLISGSIPHGIGNLVSLQTLDLGENLLTGKLPPSLGELSELRKVLLYSNGLSGEIPSSLGNISGLTYLYLLNNSFEGSIPSSLGSCSYLLDLNLGTNKLNGSIPHELMELPSLVVLNVSFNLLVGPLRQDIGKLKFLLALDVSYNKLSGQIPQTLANCLSLEFLLLQGNSFVGPIPDIRGLTGLRFLDLSKNNLSGTIPEYMANFSKLQNLNLSLNNFDGAVPTEGVFRNTSAMSVFGNINLCGGIPSLQLQPCSVELPRRHSSVRKIITICVSAVMAALLLLCLCVVYLCWYKLRVKSVRANNNENDRSFSPVKSFYEKISYDELYKTTGGFSSSNLIGSGNFGAVFKGFLGSKNKAVAIKVLNLCKRGAAKSFIAECEALGGIRHRNLVKLVTICSSSDFEGNDFRALVYEFMPNGNLDMWLHPDEIEETGNPSRTLGLFARLNIAIDVASALVYLHTYCHNPIAHCDIKPSNILLDKDLTAHVSDFGLAQLLLKFDRDTFHIQFSSAGVRGTIGYAAPEYGMGGHPSIMGDVYSFGIVLLEIFTGKRPTNKLFVDGLTLHSFTKSALQKRQALDITDETILRGAYAQHFNMVECLTLVFRVGVSCSEESPVNRISMAEAISKLVSIRESFFRDEET

SEQ ID NO: 90831 - protein, 1018 aa, Arabidopsis thaliana
  peptide (1)..(1018): Ceres Seq. ID no. 12725434
MRLILVSALLVSVSLEHSDMVCAQTIRLTEETDKQALLEFKSQVSETSRVVLGSWNDSLPLCSWTGVKCGLKHRRVTGVDLGGLKLTGVVSPFVGNLSFLRSLNLADNFFHGAIPSEVGNLFRLQYLNMSNNLFGGVIPVVLSNCSSLSTLDLSSNHLEQGVPLEFGSLSKLVLLSLGRNNLTGKFPASLGNLTSLQMLDFIYNQIEGEIPGDIARLKQMIFFRIALNKFNGVFPPPIYNLSSLIFLSITGNSFSGTLRPDFGSLLPNLQILYMGINSFTGTIPETLSNISSLRQLDIPSNHLTGKIPLSFGRLQNLLLLGLNNNSLGNYSSGDLDFLGALTNCSQLQYLNVGFNKLGGQLPVFIANLSTQLTELSLGGNLISGSIPHGIGNLVSLQTLDLGENLLTGKLPPSLGELSELRKVLLYSNGLSGEIPSSLGNISGLTYLYLLNNSFEGSIPSSLGSCSYLLDLNLGTNKLNGSIPHELMELPSLVVLNVSFNLLVGPLRQDIGKLKFLLALDVSYNKLSGQIPQTLANCLSLEFLLLQGNSFVGPIPDIRGLTGLRFLDLSKNNLSGTIPEYMANFSKLQNLNLSLNNFDGAVPTEGVFRNTSAMSVFGNINLCGGIPSLQLQPCSVELPRRHSSVRKIITICVSAVMAALLLLCLCVVYLCWYKLRVKSVRANNNENDRSFSPVKSFYEKISYDELYKTTGGFSSSNLIGSGNFGAVFKGFLGSKNKAVAIKVLNLCKRGAAKSFIAECEALGGIRHRNLVKLVTICSSSDFEGNDFRALVYEFMPNGNLDMWLHPDEIEETGNPSRTLGLFARLNIAIDVASALVYLHTYCHNPIAHCDIKPSNILLDKDLTAHVSDFGLAQLLLKFDRDTFHIQFSSAGVRGTIGYAAPEYGMGGHPSIMGDVYSFGIVLLEIFTGKRPTNKLFVDGLTLHSFTKSALQKRQALDITDETILRGAYAQHFNMVECLTLVFRVGVSCSEESPVNRISMAEAISKLVSIRESFFRDEET

SEQ ID NO: 90832 - protein, 999 aa, Arabidopsis thaliana
  peptide (1)..(999): Ceres Seq. ID no. 12725435
MVCAQTIRLTEETDKQALLEFKSQVSETSRVVLGSWNDSLPLCSWTGVKCGLKHRRVTGVDLGGLKLTGVVSPFVGNLSFLRSLNLADNFFHGAIPSEVGNLFRLQYLNMSNNLFGGVIPVVLSNCSSLSTLDLSSNHLEQGVPLEFGSLSKLVLLSLGRNNLTGKFPASLGNLTSLQMLDFIYNQIEGEIPGDIARLKQMIFFRIALNKFNGVFPPPIYNLSSLIFLSITGNSFSGTLRPDFGSLLPNLQILYMGINSFTGTIPETLSNISSLRQLDIPSNHLTGKIPLSFGRLQNLLLLGLNNNSLGNYSSGDLDFLGALTNCSQLQYLNVGFNKLGGQLPVFIANLSTQLTELSLGGNLISGSIPHGIGNLVSLQTLDLGENLLTGKLPPSLGELSELRKVLLYSNGLSGEIPSSLGNISGLTYLYLLNNSFEGSIPSSLGSCSYLLDLNLGTNKLNGSIPHELMELPSLVVLNVSFNLLVGPLRQDIGKLKFLLALDVSYNKLSGQIPQTLANCLSLEFLLLQGNSFVGPIPDIRGLTGLRFLDLSKNNLSGTIPEYMANFSKLQNLNLSLNNFDGAVPTEGVFRNTSAMSVFGNINLCGGIPSLQLQPCSVELPRRHSSVRKIITICVSAVMAALLLLCLCVVYLCWYKLRVKSVRANNNENDRSFSPVKSFYEKISYDELYKTTGGFSSSNLIGSGNFGAVFKGFLGSKNKAVAIKVLNLCKRGAAKSFIAECEALGGIRHRNLVKLVTICSSSDFEGNDFRALVYEFMPNGNLDMWLHPDEIEETGNPSRTLGLFARLNIAIDVASALVYLHTYCHNPIAHCDIKPSNILLDKDLTAHVSDFGLAQLLLKFDRDTFHIQFSSAGVRGTIGYAAPEYGMGGHPSIMGDVYSFGIVLLEIFTGKRPTNKLFVDGLTLHSFTKSALQKRQALDITDETILRGAYAQHFNMVECLTLVFRVGVSCSEESPVNRISMAEAISKLVSIRESFFRDEET

SEQ ID NO: 90833 - DNA, 1747 bp, Arabidopsis thaliana
  misc_feature (1)..(1747): Ceres Seq. ID no. 12725463
  misc_feature (1)..(1747): Ortholog of  Ceres SEQ ID NO 13656091 as cited in SEQ ID NO 69094
gcccttggtaagatttcatcaacggttctccaaccaaactcttttattgaatttgaattgaatttgaaatttgataatcaaatatagatgatctgaatccaggaaaacaggatccaagtggggttgaattatggaggatgagacgagatcaacgtcatcactttccgatatagctattagtattatcgacgaaggtcctctttctccattacgacaacgtagtgaaagaagtgttgtatctcatatcaaacgcaacttacagtcatcggggaaaccactgattcttttggaatcagctggtaaggcgtcctgctgcatcttcagaatccctgatagcctcgcagaggtgaatcctaaagcctataagcccaaagttgtttccattggtccttatcattacggagaaaatcacctccaaatgattcagcagcacaagtttcggtttctggagcttttcgtagacagggcaacaaagaaaggaatggacgaaaacgtcttgtatgcggcagtaggtgctttgcaacacaagataagagcttcttattctgaggaacttaggatagaaaaatcagaactggtgtctatgatgattttggatgggtgcttcattctcatgttgttacttatcgtgtcaagaaagatagatttggatatgaataaggatccaatcttcacgatcccctggattttggcatctattcagagtgatcttctcctcttggaaaatcaggtccctttctttgttcttcgaactatatttgataaatcaggaatagggtcacctggtgatctaaacaggatggcgtttagcttcttcaacctctcaatagataaaccagatacatattgggcgaaacacagagaccgcggggctaaacatcttcttgacctcaaccgtaagaccttcatacctagcatgagatctatgggtgaatcagaaacaacaccatcctcgaaatttcaacactctaagggtaaatccggagaagtatcatcgtcagagtctacatttccgttgatactgtcggccaaaagacttcgcctccaagggataaagttcaggttaaggagtgatgctgaatcaatattagatataaaattaaagaagaacaagcttcagataccactgttaagattggatggtttcatcagctcaatcttcctcaactgtgttgcctttgaacagttttacacagagagtaccaacgacataacaagctacgtggttttcatgggatgtcttctaaacgatcaggaagatgctactttcttgaacaacgacaagcggatcatagagaactactttggcaacgagaatgaggtatcacagtttttcaaaactatatgtaaagatgttgtatttgacacacgtagaagttacttacggaatgtgtttgagggagttaacgagtacacctccaaaacgtacaatggagtatgggctggctttaggcacacgcactttgagtcaccatggactgctctgtcatcctttgctgttgttttcgttattcttcttaccatgacgcaagccgcttatgcgattcgttcctactatcacgatacagagtgagatggaaactcagcttctccataggggcttccttcgggaaaatcacgtgaactacttgttctgttttatccgctacaaatgtcattcgcgctttaattagacccgcacatacgtgcaggatttcatatttttaaaaatatggtgtattaaatttatattcaatttagttttttc

SEQ ID NO: 90834 - protein, 480 aa, Arabidopsis thaliana; identical to SEQ ID NO: 77000
  peptide (1)..(480): Ceres Seq. ID no. 12725464

SEQ ID NO: 90835 - protein, 384 aa, Arabidopsis thaliana; identical to SEQ ID NO: 77001
  peptide (1)..(384): Ceres Seq. ID no. 12725465

SEQ ID NO: 90836 - protein, 363 aa, Arabidopsis thaliana; identical to SEQ ID NO: 77002
  peptide (1)..(363): Ceres Seq. ID no. 12725466

SEQ ID NO: 90837 - DNA, 930 bp, Arabidopsis thaliana
  misc_feature (1)..(930): Ceres Seq. ID no. 12725478
  misc_feature (1)..(930): Ortholog of  Ceres SEQ ID NO 14311477 as cited in SEQ ID NO 51390
  misc_feature (1)..(930): Ortholog of  Ceres SEQ ID NO 14302840 as cited in SEQ ID NO 62295
  misc_feature (1)..(930): Ortholog of  Ceres SEQ ID NO 13596892 as cited in SEQ ID NO 62900
atggatatacttaccaccattctcaatcttcttcttcctcctcttactatcatctttctcttcctgttttacccattttatcttttgatcaaacttgtgctttgtcttcgtaagaaccttcacttcgaaaacgtagccagaaaagtagttctaatcaccggagcttcctctggcatcggagagcatgtggcatacgaatacgcaaagaaaggagcatatttggctcttgttgctcgaagaagggatcgtctagagattgtagcagaaacatcacgtcaattaggatctggtaatgtcatcatcatacctggtgatgtttctaatgttgaggactgcaagaagttcatcgatgagacgattcgtcatttcggaaaactagaccacctgatcaataatgctggtgtatttcaaactgttcttttcgaagatttcacacaaattcaagacgcaaatcctataatggacatcaacttttggggtacaacatacatcacctattttgcaattcctcatcttcgaaagagtaaaggaaaaatcgtcgcgattacatcgggttcagcaaatatacctttgccattggcaagcatctatgcagcaagcaaagcagccttattaagattctttgagacattaagaatagagctaagtcctgatatcaaaataacaattgttctcccaggagttgtatcaacagatatgaccactcctcactgtatagagaagtatggttcggattttattctatcggaatcagtgagtaaatgcgcaaaggcaatcttcagaggtattggcagaggagagacatacatagaagaaccatcttggatgaaatggctgtttataatgaaaaatgtatgtcccgaaatcgttgattacggacttaactatctatttgttagttatctaaaaccttatttcaagcgtgattga

SEQ ID NO: 90838 - protein, 309 aa, Arabidopsis thaliana
  peptide (1)..(309): Ceres Seq. ID no. 12725479
MDILTTILNLLLPPLTIIFLFLFYPFYLLIKLVLCLRKNLHFENVARKVVLITGASSGIGEHVAYEYAKKGAYLALVARRRDRLEIVAETSRQLGSGNVIIIPGDVSNVEDCKKFIDETIRHFGKLDHLINNAGVFQTVLFEDFTQIQDANPIMDINFWGTTYITYFAIPHLRKSKGKIVAITSGSANIPLPLASIYAASKAALLRFFETLRIELSPDIKITIVLPGVVSTDMTTPHCIEKYGSDFILSESVSKCAKAIFRGIGRGETYIEEPSWMKWLFIMKNVCPEIVDYGLNYLFVSYLKPYFKRD

SEQ ID NO: 90839 - protein, 156 aa, Arabidopsis thaliana; identical to SEQ ID NO: 84779
  peptide (1)..(156): Ceres Seq. ID no. 12725480

SEQ ID NO: 90840 - DNA, 776 bp, Arabidopsis thaliana
  misc_feature (1)..(776): Ceres Seq. ID no. 12725481
  misc_feature (1)..(776): Ortholog of  Ceres SEQ ID NO 12474478 as cited in SEQ ID NO 96
  misc_feature (1)..(776): Ortholog of  Ceres SEQ ID NO 14309053 as cited in SEQ ID NO 0
atggcaaaacaaatattctacactctctttctattcctcttatccacggctattctcacggcgtcgtcctccgcccccagagccgcaataacttcaaaacgtgctataaacttcatacaagcctcttgcaaagccacaacatacccaaccgtatgcgtcaactctctcaccggttacgccaactccatccaaacaagccctcgacgtctagccgagaccgcactcaatgtgaccgtgactcaggcccagtccaccaaggtcttcgtctggcgcttggggcgtttcactagtctcaagaaacgagagattcaagccgttaaggactgcatcgaggagatccatgatgccgttgaccgtttgaccatgtcgatccatgaagtgaagatgtgtggtagtgctaaaggtcgtgaccagttttggttccacatgagcaatgctcaaacgtggaccagcgctgctttgactaatgcaaacacttgctccgatgggtttgcgggtcgggtcatggatgggcgggtaaagaactcagtaagggcacggatcttgaatttgggaagaggaactagtaacgctttagccttgatcaatgctttcgctaaaaaatactaaataatgtaatacattttctttttgttcttaattctgtaatttgagctacgaatgtgtggatcagctcgagggaaattttatttcttaaaatgtttcatgcataatccgatgtaattctggataaattttgattaaaaatgaatgtacaagtataacattgttaagtt

SEQ ID NO: 90841 - protein, 202 aa, Arabidopsis thaliana
  peptide (1)..(202): Ceres Seq. ID no. 12725482
MAKQIFYTLFLFLLSTAILTASSSAPRAAITSKRAINFIQASCKATTYPTVCVNSLTGYANSIQTSPRRLAETALNVTVTQAQSTKVFVWRLGRFTSLKKREIQAVKDCIEEIHDAVDRLTMSIHEVKMCGSAKGRDQFWFHMSNAQTWTSAALTNANTCSDGFAGRVMDGRVKNSVRARILNLGRGTSNALALINAFAKKY

SEQ ID NO: 90842 - DNA, 1785 bp, Arabidopsis thaliana
  misc_feature (1)..(1785): Ceres Seq. ID no. 12725483
  misc_feature (1)..(1785): Ortholog of  Ceres SEQ ID NO 13594037 as cited in SEQ ID NO 55666
  misc_feature (1)..(1785): Ortholog of  Ceres SEQ ID NO 13657707 as cited in SEQ ID NO 66407
atgcttagaggcatctttcacatttgcctcttggcctcatttcttcttctaccgttctcctccgccgtacatgatagtggcttcaccggtggtaccgatgctcctcctccgtgggaccataatgtttccccaccaccagaaaccgcaccatccccaacccccacctcgagtccctctacaacctcaccgccatctcctggaccggtggctgcgccatctccgatcaacaacggctctgtctccggggacatgacatggtggtgcaacaagactccacacgctgagacatgcaattactacttccggaagagctcacaaaacaacattaacctacgaccaccaaggttccggtccgagttcttacggatgctggtcaaggtagcacttgaccaagccgtgatcacacacagtcaaaccgttaagtttggaccgagctgcaccaacaaccaaaggaaagccgcttggtcagactgcgtaaatctcttccaaaacacggtggctcagctgaaccgaacgctcaagggacttaacccggcggcttcgagtgatgtcaaatgtacggacttcgacgcacaaacgtggctcagcacggctcagaccaacatcgagacgtgccgttccggatccgaggatcttaacgtctcggatttcgtcatgccggtgatatccaacaagaacttgtcggatttgattggaaactgcttggccgtcaatggagttctcatgaagcaacatgatcatacgactactgctaaccacaaagaatacttcccaagctgggtttcaagacatgagagacgattactcgtatcagcctctttagcgaaatcgagtccccacctagtggtggcacaagacaggtccggccatttccggtcgatccaagctgccataaacttcgcagcgagaaggagattcaagtcaagatttgtgatatatgtgaagaaaggtgtttaccgagagaacattgatgtcggcaatgataaccacaacatcatgctcgtcggagatggcgagagaaaaacaatcatcacaagtggccgaagcgtccagcatggctacaccacctataactctgcaaccggcggctttggaggccaaaggtttgtagcaaaagacatgacattcatcaacacggccgggccattacgtgggcaagctgttgcggttcgatcatcctctgacctctctgttttctaccgtgtcggtatccatggattccaagacaccctctacatccattcacaacgccagttctttagggaatgttatatctcaggcaccatcgacttcatcttcggaaatgcagctgttgtcttccagaactgcatgattctcgtccggcgccctcttcatggccaagccaacatcataacagctcaaggtcgtggtgacccttttcagaacacaggaataacaatccatagctcaaggataattgcagcttctgatttgaagcctgtgatccgagcttacaagacctatttaggccgaccgtggcaagcttattcacgcgtcacaatcatgaagacctatatagataactcgatcagccccttgggatggtctccttggttaagaggatccaattttgctcttaatacagttttctatggagagtataaaaattttggaccggggtcttccacaagatggcgggtccggtggaaaggattccacgccataacgagcaccgcggttgcttctcggtttacggttggaagccttatagccggcggttcatggttgccagccactggcgtgcctttcaagtcagggttgtga

SEQ ID NO: 90843 - protein, 594 aa, Arabidopsis thaliana
  peptide (1)..(594): Ceres Seq. ID no. 12725484
MLRGIFHICLLASFLLLPFSSAVHDSGFTGGTDAPPPWDHNVSPPPETAPSPTPTSSPSTTSPPSPGPVAAPSPINNGSVSGDMTWWCNKTPHAETCNYYFRKSSQNNINLRPPRFRSEFLRMLVKVALDQAVITHSQTVKFGPSCTNNQRKAAWSDCVNLFQNTVAQLNRTLKGLNPAASSDVKCTDFDAQTWLSTAQTNIETCRSGSEDLNVSDFVMPVISNKNLSDLIGNCLAVNGVLMKQHDHTTTANHKEYFPSWVSRHERRLLVSASLAKSSPHLVVAQDRSGHFRSIQAAINFAARRRFKSRFVIYVKKGVYRENIDVGNDNHNIMLVGDGERKTIITSGRSVQHGYTTYNSATGGFGGQRFVAKDMTFINTAGPLRGQAVAVRSSSDLSVFYRVGIHGFQDTLYIHSQRQFFRECYISGTIDFIFGNAAVVFQNCMILVRRPLHGQANIITAQGRGDPFQNTGITIHSSRIIAASDLKPVIRAYKTYLGRPWQAYSRVTIMKTYIDNSISPLGWSPWLRGSNFALNTVFYGEYKNFGPGSSTRWRVRWKGFHAITSTAVASRFTVGSLIAGGSWLPATGVPFKSGL

SEQ ID NO: 90844 - protein, 511 aa, Arabidopsis thaliana
  peptide (1)..(511): Ceres Seq. ID no. 12725485
MTWWCNKTPHAETCNYYFRKSSQNNINLRPPRFRSEFLRMLVKVALDQAVITHSQTVKFGPSCTNNQRKAAWSDCVNLFQNTVAQLNRTLKGLNPAASSDVKCTDFDAQTWLSTAQTNIETCRSGSEDLNVSDFVMPVISNKNLSDLIGNCLAVNGVLMKQHDHTTTANHKEYFPSWVSRHERRLLVSASLAKSSPHLVVAQDRSGHFRSIQAAINFAARRRFKSRFVIYVKKGVYRENIDVGNDNHNIMLVGDGERKTIITSGRSVQHGYTTYNSATGGFGGQRFVAKDMTFINTAGPLRGQAVAVRSSSDLSVFYRVGIHGFQDTLYIHSQRQFFRECYISGTIDFIFGNAAVVFQNCMILVRRPLHGQANIITAQGRGDPFQNTGITIHSSRIIAASDLKPVIRAYKTYLGRPWQAYSRVTIMKTYIDNSISPLGWSPWLRGSNFALNTVFYGEYKNFGPGSSTRWRVRWKGFHAITSTAVASRFTVGSLIAGGSWLPATGVPFKSGL

SEQ ID NO: 90845 - protein, 472 aa, Arabidopsis thaliana
  peptide (1)..(472): Ceres Seq. ID no. 12725486
MLVKVALDQAVITHSQTVKFGPSCTNNQRKAAWSDCVNLFQNTVAQLNRTLKGLNPAASSDVKCTDFDAQTWLSTAQTNIETCRSGSEDLNVSDFVMPVISNKNLSDLIGNCLAVNGVLMKQHDHTTTANHKEYFPSWVSRHERRLLVSASLAKSSPHLVVAQDRSGHFRSIQAAINFAARRRFKSRFVIYVKKGVYRENIDVGNDNHNIMLVGDGERKTIITSGRSVQHGYTTYNSATGGFGGQRFVAKDMTFINTAGPLRGQAVAVRSSSDLSVFYRVGIHGFQDTLYIHSQRQFFRECYISGTIDFIFGNAAVVFQNCMILVRRPLHGQANIITAQGRGDPFQNTGITIHSSRIIAASDLKPVIRAYKTYLGRPWQAYSRVTIMKTYIDNSISPLGWSPWLRGSNFALNTVFYGEYKNFGPGSSTRWRVRWKGFHAITSTAVASRFTVGSLIAGGSWLPATGVPFKSGL

SEQ ID NO: 90846 - DNA, 1604 bp, Arabidopsis thaliana
  misc_feature (1)..(1604): Ceres Seq. ID no. 12725502
  misc_feature (1)..(1604): Ortholog of  Ceres SEQ ID NO 14314464 as cited in SEQ ID NO 52405
  misc_feature (1)..(1604): Ortholog of  Ceres SEQ ID NO 15177592 as cited in SEQ ID NO 58436
  misc_feature (1)..(1604): Ortholog of  Ceres SEQ ID NO 13655251 as cited in SEQ ID NO 62888
  misc_feature (1)..(1604): Ortholog of  Ceres SEQ ID NO 13597194 as cited in SEQ ID NO 63661
  misc_feature (1)..(1604): Ortholog of  Ceres SEQ ID NO 14302883 as cited in SEQ ID NO 66384
  misc_feature (1)..(1604): Ortholog of  Ceres SEQ ID NO 13662855 as cited in SEQ ID NO 69059
acgagacaaccaaacacagatctgcttccttcttcacctttttttttttttttttgtaattttggtttccctttttttttattaaataagatttattcctccatcgttacctaatccccttcttcgtcttcttcagcttcactgagtcttacgaacatagcaaaatccaaatcaaattcctgaagaaacctctttcgctctcgtcttcgttttcagatcaacaagaaatggcaacagcaacatcagcttctctgttttcaactgtttcttcatcttactccaaagctagctccataccacattcaagactccaatctgtgaaattcaactcagtccctagcttcaccggtctcaaatcaacctctctcatctccggatctgattcctcttccttagccaagactctacgcggttccgtaacgaaagcacaaacatctgacaagaagccttacggattcaaaatcaacgcttcatacaaagtagctgttcttggtgctgctggtggtataggtcagcctttatcacttctcatcaagatgtctccgttagtctctacgcttcatctttacgatatcgccaatgttaaaggagttgctgctgatctaagtcattgtaacactccttctcaagttcgtgatttcactggtccttctgagttagctgattgtttgaaagatgttaacgttgttgtcatccctgctggtgtgccgaggaaacccggtatgactcgtgacgatcttttcaacatcaatgccaatattgtcaagactcttgttgaagctgttgctgagaattgccctaatgctttcattcatattattagtaacccggttaactctacggtacctattgctgctgaagtgttgaagaagaaaggtgtttatgatcctaagaagctgtttggtgtcactactttggatgttgtgagggctaacacttttgtttctcagaagaagaatcttaagcttattgatgttgatgttccggttattggtggacatgctggaatcaccattttgcctctcctctcgaagacaaaaccgtctgttaactttactgatgaagagatccaagagctcactgttaggattcagaacgctggtactgaggttgttgatgctaaggcaggtgcaggttcagctactttgtcaatggcttatgctgctgctagatttgtagagtcatctcttcgtgctcttgatggagacggagatgtctacgagtgctcgtttgtggagtcgactctgactgatcttcctttctttgcatcacgggttaagatagggaagaacggtcttgaagctgtgattgagtcagaccttcagggattgactgagtatgagcagaaagcactagaagctcttaaggtagaattgaaagctagcattgacaagggtgtcgcatttgcaaacaaaccagctgctgcagcagctaactagatcgcaagctgataacatttttcttctgatcatttcgagttttgttttatttttcatatttgttgcatcggcgagacattttcgtgttgtagaataaagaatgtatttgcttcagtttgaagattttggaacatggcattgaagcagaatttataaatcatcacc

SEQ ID NO: 90847 - protein, 403 aa, Arabidopsis thaliana
  peptide (1)..(403): Ceres Seq. ID no. 12725503
MATATSASLFSTVSSSYSKASSIPHSRLQSVKFNSVPSFTGLKSTSLISGSDSSSLAKTLRGSVTKAQTSDKKPYGFKINASYKVAVLGAAGGIGQPLSLLIKMSPLVSTLHLYDIANVKGVAADLSHCNTPSQVRDFTGPSELADCLKDVNVVVIPAGVPRKPGMTRDDLFNINANIVKTLVEAVAENCPNAFIHIISNPVNSTVPIAAEVLKKKGVYDPKKLFGVTTLDVVRANTFVSQKKNLKLIDVDVPVIGGHAGITILPLLSKTKPSVNFTDEEIQELTVRIQNAGTEVVDAKAGAGSATLSMAYAAARFVESSLRALDGDGDVYECSFVESTLTDLPFFASRVKIGKNGLEAVIESDLQGLTEYEQKALEALKVELKASIDKGVAFANKPAAAAAN

SEQ ID NO: 90848 - protein, 300 aa, Arabidopsis thaliana; identical to SEQ ID NO: 22021
  peptide (1)..(300): Ceres Seq. ID no. 12725504

SEQ ID NO: 90849 - protein, 238 aa, Arabidopsis thaliana; identical to SEQ ID NO: 22022
  peptide (1)..(238): Ceres Seq. ID no. 12725505

SEQ ID NO: 90850 - DNA, 1158 bp, Arabidopsis thaliana
  misc_feature (1)..(1158): Ceres Seq. ID no. 12725540
  misc_feature (1)..(1158): Ortholog of  Ceres SEQ ID NO 13599990 as cited in SEQ ID NO 0
atggaaggaaattgctcgcaaggacgctttgattctcaagtttcttctatgagagatcttcgtccaaatgctataaatcagaatcagaaacaacaccatccaaattctcgacaagactcaggctttaacaatactatggatacacgtcacaacaatgtcgacagaggaaagaaatcaatgagtgaagatgatgaactatgtttgttaagtagtgatggtcaaaacaagtccaaggaaaactctccttggcaacgtgtgaaatggatggataagatggtgaagctaatgataactgctctttcttatatcggtgaagactctggttctgataagaaatttgcagttttgcagaagaaaggtaagtggagatcagtttctaaagtcatggatgaaagaggttatcatgtttcgccgcagcaatgtgaagataagtttaatgatcttaataagcggtataagaagcttaatgagatgcttggtagaggaacttcttgtgaggttgttgagaatccttcactcttggataagattgattacttgaatgagaaagagaaagatgaagttaggagaatcatgagctctaaacatcttttctatgaagagatgtgttcttatcataacggaaacagattgcatttgcctcatgaccctgcggtacagagatctcttcacttgattacgcttggaagccgtgatgatcatgataatgatgaacatgggaaacaccaaaacgaagatcttgatgatgatgatgactatgaggaagatcatgatggagctttaagtgaccgtcctttgaagaggttaagacaaagccagagccatgaagatgttggtcatccgaataagggttatgatgtcccttgcttgcctcgttcccaagctgatgtgaatcgaggaatatcgctagatagtaggaaagctgctggcttacagaggcagcagattgagtctaagtctttagagttagaaggacgaaagcttcagattcaagcggagatgatggaactggagagacaacaattcaagtgggaggtgtttagtaagagaagagagcagaagcttgcgaaaatgagaatggaaaacgaaaggatgaaacttgagaatgaaaggatgagtcttgaactgaaacgaatagagttgggtgctaaattgtga

SEQ ID NO: 90851 - protein, 385 aa, Arabidopsis thaliana
  peptide (1)..(385): Ceres Seq. ID no. 12725541
MEGNCSQGRFDSQVSSMRDLRPNAINQNQKQHHPNSRQDSGFNNTMDTRHNNVDRGKKSMSEDDELCLLSSDGQNKSKENSPWQRVKWMDKMVKLMITALSYIGEDSGSDKKFAVLQKKGKWRSVSKVMDERGYHVSPQQCEDKFNDLNKRYKKLNEMLGRGTSCEVVENPSLLDKIDYLNEKEKDEVRRIMSSKHLFYEEMCSYHNGNRLHLPHDPAVQRSLHLITLGSRDDHDNDEHGKHQNEDLDDDDDYEEDHDGALSDRPLKRLRQSQSHEDVGHPNKGYDVPCLPRSQADVNRGISLDSRKAAGLQRQQIESKSLELEGRKLQIQAEMMELERQQFKWEVFSKRREQKLAKMRMENERMKLENERMSLELKRIELGAKL

SEQ ID NO: 90852 - protein, 369 aa, Arabidopsis thaliana
  peptide (1)..(369): Ceres Seq. ID no. 12725542
MRDLRPNAINQNQKQHHPNSRQDSGFNNTMDTRHNNVDRGKKSMSEDDELCLLSSDGQNKSKENSPWQRVKWMDKMVKLMITALSYIGEDSGSDKKFAVLQKKGKWRSVSKVMDERGYHVSPQQCEDKFNDLNKRYKKLNEMLGRGTSCEVVENPSLLDKIDYLNEKEKDEVRRIMSSKHLFYEEMCSYHNGNRLHLPHDPAVQRSLHLITLGSRDDHDNDEHGKHQNEDLDDDDDYEEDHDGALSDRPLKRLRQSQSHEDVGHPNKGYDVPCLPRSQADVNRGISLDSRKAAGLQRQQIESKSLELEGRKLQIQAEMMELERQQFKWEVFSKRREQKLAKMRMENERMKLENERMSLELKRIELGAKL

SEQ ID NO: 90853 - protein, 340 aa, Arabidopsis thaliana
  peptide (1)..(340): Ceres Seq. ID no. 12725543
MDTRHNNVDRGKKSMSEDDELCLLSSDGQNKSKENSPWQRVKWMDKMVKLMITALSYIGEDSGSDKKFAVLQKKGKWRSVSKVMDERGYHVSPQQCEDKFNDLNKRYKKLNEMLGRGTSCEVVENPSLLDKIDYLNEKEKDEVRRIMSSKHLFYEEMCSYHNGNRLHLPHDPAVQRSLHLITLGSRDDHDNDEHGKHQNEDLDDDDDYEEDHDGALSDRPLKRLRQSQSHEDVGHPNKGYDVPCLPRSQADVNRGISLDSRKAAGLQRQQIESKSLELEGRKLQIQAEMMELERQQFKWEVFSKRREQKLAKMRMENERMKLENERMSLELKRIELGAKL

SEQ ID NO: 90854 - DNA, 735 bp, Arabidopsis thaliana
  misc_feature (1)..(735): Ceres Seq. ID no. 12725578
  misc_feature (1)..(735): Ortholog of  Ceres SEQ ID NO 14314759 as cited in SEQ ID NO 59915
  misc_feature (1)..(735): Ortholog of  Ceres SEQ ID NO 13661769 as cited in SEQ ID NO 61435
  misc_feature (1)..(735): Ortholog of  Ceres SEQ ID NO 13600585 as cited in SEQ ID NO 0
atgaccgagtcatccattatctccgtcaaacaatcgtctccggtgccggaggaggaggatcatcatcatcaccaacaagactcccaccgaaccaacaccaagaaacgtgtaagatccgacccgggttaccgaggcgtccggatgcgaacgtggggcaaatgggtctccgagatccgagagcctcgcaagaagagccgaatctggctaggcactttctccacaccggaaatggcggcgcgtgcacatgacgcagctgctctcaccattaaaggaacttccgccgtcctcaacttcccggagctcgccacttaccttccccgtccagcttcctcctctccacgcgacgttcaagccgcagccgccgtagcggccgccatggacttctccccctcctcctcctctctcgtagtctccgatccaaccaccgtcatcgccccagctgagacgcagttgtcttcctcgagctattcaacgtgtacgtcatcgtcgttgtcaccgtcaagcgaagaagctgcgtcgacggcggaagaactaagcgagatagtggagttaccgagtctagagacgagttacgatgagtcattgagcgagtttgtgtacgttgactcggcgtatccacctagttcgccttggtatattaataattgttatagcttttattaccacagcgacgaaaatggcatttcgatggctgaacctttcgactcttccaattttggccccctttttccttag

SEQ ID NO: 90855 - protein, 244 aa, Arabidopsis thaliana
  peptide (1)..(244): Ceres Seq. ID no. 12725579
MTESSIISVKQSSPVPEEEDHHHHQQDSHRTNTKKRVRSDPGYRGVRMRTWGKWVSEIREPRKKSRIWLGTFSTPEMAARAHDAAALTIKGTSAVLNFPELATYLPRPASSSPRDVQAAAAVAAAMDFSPSSSSLVVSDPTTVIAPAETQLSSSSYSTCTSSSLSPSSEEAASTAEELSEIVELPSLETSYDESLSEFVYVDSAYPPSSPWYINNCYSFYYHSDENGISMAEPFDSSNFGPLFP

SEQ ID NO: 90856 - protein, 197 aa, Arabidopsis thaliana
  peptide (1)..(197): Ceres Seq. ID no. 12725580
MRTWGKWVSEIREPRKKSRIWLGTFSTPEMAARAHDAAALTIKGTSAVLNFPELATYLPRPASSSPRDVQAAAAVAAAMDFSPSSSSLVVSDPTTVIAPAETQLSSSSYSTCTSSSLSPSSEEAASTAEELSEIVELPSLETSYDESLSEFVYVDSAYPPSSPWYINNCYSFYYHSDENGISMAEPFDSSNFGPLFP

SEQ ID NO: 90857 - protein, 168 aa, Arabidopsis thaliana
  peptide (1)..(168): Ceres Seq. ID no. 12725581
MAARAHDAAALTIKGTSAVLNFPELATYLPRPASSSPRDVQAAAAVAAAMDFSPSSSSLVVSDPTTVIAPAETQLSSSSYSTCTSSSLSPSSEEAASTAEELSEIVELPSLETSYDESLSEFVYVDSAYPPSSPWYINNCYSFYYHSDENGISMAEPFDSSNFGPLFP

SEQ ID NO: 90858 - DNA, 1968 bp, Arabidopsis thaliana
  misc_feature (1)..(1968): Ceres Seq. ID no. 12725586
  misc_feature (1)..(1968): Ortholog of  Ceres SEQ ID NO 14302990 as cited in SEQ ID NO 67543
ggctcgatttttgttggagtccttgattcgagcaagtttaaagactcgagggttttcttctggataacgtaattagatactcgtgttttctgaaagggtcatcactgctattgtcatagcttgagaaaggatctatttttaatatcagtgatattggtatctatgagatttggagtagttgtttggaggaacgtgtcctcttgcttgatgtgaagattgcttcttgttgtttgctgtttcttaatggagtggaggggaatcctctgctcgttgctttttattgtttccgtgggagagtcgtcaagtagatttgggataatgtggcatcctaatcttggtgttgattctggacaatacttgacttggccaatcttaagtgctagtgtattcgtggttattgccatcctcctccccatgtatcttatctttgagcacttagcttcttataatcaaccagaggaacagaagtttcttattggacttattctgatggttcctgtttatgccgtggaatcgtttttgtctttggtgaattcagaagcagctttcaactgcgaggtgattagagattgttatgaagcttttgcactctattgtttcgagagatatttgatagcttgcctagatggagaagaacgtacaattgaattcatggaacaacagacagttatcacccagagtactcctcttctagaaggcacatgttcttatggggttgtagagcatccctttccaatgaactgcttcgtaaaagattggagtcttggtcctcagttttatcatgctgtgaaaattggcatcgttcaatatatgatactgaaaatgatttgtgctctgttagcaatgatcctcgaagcctttggggtttatggagaagggaagttcgcatggaattatggatatccatatctggctgtagtgctcaatttcagtcaaacatgggcattgtattgccttgtacagttctataatgtcatcaaagataagctagcacccataaaaccactggccaagtttctaacatttaagtctattgtattcctcacctggtggcaaggtattattgttgcgttcctcttctctatgggactcgtcaaagggtctttggctaaggaactgaaaacgcgaatacaagactacatcatctgtatcgaaatgggtattgctgctgttgtccatctctatgtgtttccagcagcgccttacaagcgtggagaaagatgtgttcgtaatgtagcagtcatgtcagattatgcctctatagatgtaccacctgatccagaagaggttaaagatagtgaacgaacaactagaacgcggtatggtagacatgacgatagagagaaacgcttgaatttcccacaaagtgtccgtgatgttgtgcttgggagtggtgaaatcattgtggatgacatgagattcacagtttcacatgtggtggaaccggttgaaagaggaatagcgaaaataaacagaacattccatcagatatctgaaaatgtgaaaagatttgagcagcagaagaaaacaacaaaggatgattcatatgtgataccactgaatcaatgggcgaaagaattctcagatgttcatgaaaacctctatgatggagggagtgtgagcgacagcggtttgggaagcacaaatcggcatcaccagtctagagtctcgggattgtggactagaatgcgaaggtaagaaaaacaaaaggtggtgcaagtgcaaacgaagctgaaacaattctgaagatgccttttttgtggaagtctcatcttcgtcacatctaacaaagaagttgtagatttatgggatgatgcttactctgctggatttaaacacaggtaacaacagatgatgctactaactagttttcctctacctttacacaaactttattgagaagttagatttgtatctcgtaatgacagtttcttacacaaaaataaaataaaatacaaatttgtcatg

SEQ ID NO: 90859 - protein, 484 aa, Arabidopsis thaliana
  peptide (1)..(484): Ceres Seq. ID no. 12725587
MEWRGILCSLLFIVSVGESSSRFGIMWHPNLGVDSGQYLTWPILSASVFVVIAILLPMYLIFEHLASYNQPEEQKFLIGLILMVPVYAVESFLSLVNSEAAFNCEVIRDCYEAFALYCFERYLIACLDGEERTIEFMEQQTVITQSTPLLEGTCSYGVVEHPFPMNCFVKDWSLGPQFYHAVKIGIVQYMILKMICALLAMILEAFGVYGEGKFAWNYGYPYLAVVLNFSQTWALYCLVQFYNVIKDKLAPIKPLAKFLTFKSIVFLTWWQGIIVAFLFSMGLVKGSLAKELKTRIQDYIICIEMGIAAVVHLYVFPAAPYKRGERCVRNVAVMSDYASIDVPPDPEEVKDSERTTRTRYGRHDDREKRLNFPQSVRDVVLGSGEIIVDDMRFTVSHVVEPVERGIAKINRTFHQISENVKRFEQQKKTTKDDSYVIPLNQWAKEFSDVHENLYDGGSVSDSGLGSTNRHHQSRVSGLWTRMRR

SEQ ID NO: 90860 - protein, 459 aa, Arabidopsis thaliana
  peptide (1)..(459): Ceres Seq. ID no. 12725588
MWHPNLGVDSGQYLTWPILSASVFVVIAILLPMYLIFEHLASYNQPEEQKFLIGLILMVPVYAVESFLSLVNSEAAFNCEVIRDCYEAFALYCFERYLIACLDGEERTIEFMEQQTVITQSTPLLEGTCSYGVVEHPFPMNCFVKDWSLGPQFYHAVKIGIVQYMILKMICALLAMILEAFGVYGEGKFAWNYGYPYLAVVLNFSQTWALYCLVQFYNVIKDKLAPIKPLAKFLTFKSIVFLTWWQGIIVAFLFSMGLVKGSLAKELKTRIQDYIICIEMGIAAVVHLYVFPAAPYKRGERCVRNVAVMSDYASIDVPPDPEEVKDSERTTRTRYGRHDDREKRLNFPQSVRDVVLGSGEIIVDDMRFTVSHVVEPVERGIAKINRTFHQISENVKRFEQQKKTTKDDSYVIPLNQWAKEFSDVHENLYDGGSVSDSGLGSTNRHHQSRVSGLWTRMRR

SEQ ID NO: 90861 - protein, 427 aa, Arabidopsis thaliana
  peptide (1)..(427): Ceres Seq. ID no. 12725589
MYLIFEHLASYNQPEEQKFLIGLILMVPVYAVESFLSLVNSEAAFNCEVIRDCYEAFALYCFERYLIACLDGEERTIEFMEQQTVITQSTPLLEGTCSYGVVEHPFPMNCFVKDWSLGPQFYHAVKIGIVQYMILKMICALLAMILEAFGVYGEGKFAWNYGYPYLAVVLNFSQTWALYCLVQFYNVIKDKLAPIKPLAKFLTFKSIVFLTWWQGIIVAFLFSMGLVKGSLAKELKTRIQDYIICIEMGIAAVVHLYVFPAAPYKRGERCVRNVAVMSDYASIDVPPDPEEVKDSERTTRTRYGRHDDREKRLNFPQSVRDVVLGSGEIIVDDMRFTVSHVVEPVERGIAKINRTFHQISENVKRFEQQKKTTKDDSYVIPLNQWAKEFSDVHENLYDGGSVSDSGLGSTNRHHQSRVSGLWTRMRR

SEQ ID NO: 90862 - DNA, 2415 bp, Arabidopsis thaliana
  misc_feature (1)..(2415): Ceres Seq. ID no. 12725594
  misc_feature (1)..(2415): Ortholog of  Ceres SEQ ID NO 14310784 as cited in SEQ ID NO 58503
tttcattgtcttcatgcgactcgtcgagtttcgtcccttcactctcttcacatcaaattccgcaccaccacatccacgtgtctcaacctccactctcctacgtctctccaccgtcgccggcgtctgcagcgtctgcttcatcaattcctcgccgtctctctgaaagaaaaaaaggaaccacctttctctctctgttttgctcgatctgttgtaatttactctgtagcgatcatcagatcgccggcgttttaaaccgccatgaaactctccgacgttggattagacgttgtcaaaactccgagattggttaaattgattgcgtttgcgtttctctcaatctcaacaatttttctcttcaatcacttctcagattccttctcttatccatctcttccttttcccatctcctcttcttcaaacgtcaccgaagctattcaaaccaacataacatccgtcgcggcggtggcaccatctcctccaccgcgtcctcgtctcaaaatatcacctcctccgcttccaccgacagtggtgagaacaggtatcatcaacgagaatggtgccatgtctgattccttcgaaatcggcggattcgatccagattccatcgacgagcttaaatcagccaccggaaattcgtcggttgaggaaaaagaatcgccggaagtcggttttcagattgagaaactcaaattgtgtgacaagacgaagatagattacattccttgcttagacaacgaagaagagataaagagattgaacaatacagatcgaggagaaaattacgagagacattgtcctaaacagagcttagattgcttgattccacctccagatggttataagaaaccaatccaatggccacagagcagagacaagatatggttcaataatgtgcctcatacacgtttagtggaagataaaggaggtcaaaattggattagaagagagaaagataagtttgttttccctggaggtggaactcaattcatccatggagctgatcagtacttagaccagatctcccagatgattcctgatattacatttggatcacgcacccgtgttgctttggacattggctgtggtgtggcgagctttggtgcgtttttgatgcagcgtaacacgacaaccttgtctgtagcaccaaaagatgttcatgagaatcagatacagtttgcattggagcgtggtgttcctgcgatggtggctgtctttgccacacggaggttgttgtatccaagccagtcttttgagatgattcattgttccagatgcagaattaattggacacgcgatgatgggatacttcttcttgaagttaatagaatgcttagagcaggaggctactttgtttgggctgcacaacccgtttacaaacatgaggataacttgcaagagcagtggaaagaaatgttagaccttacgaatcgaatctgttgggagcttatcaagaaagagggatatattgctgtgtggaggaagcctctaaacaacagctgctatgtcagtcgcgaagctggaacaaaacctcctttgtgcagacctgatgatgatcctgatgatgtttggtatgtagatatgaaaccgtgcatcacccgattacctgataatggctatggggctaatgtctccacatggcctgcacgtcttcatgatccgccagagaggctacaaagcattcaaatggatgcgtacatatcccgaaaggaaattatgaaggcagagtctagattttggttagaagtagtagagagttatgtgcgggttttccgctggaaggagttcaaactgaggaatgttctggacatgagagctggttttggagggtttgcagcagcattaaacgatctggggcttgactgttgggttatgaacattgttcccgttagcggattcaacaccttgccagttatttatgaccgtggactacaaggggctatgcacgactggtgtgagccatttgacacctacccaagaacctatgatctgatacatgctgcatttctcttctctgttgagaaaaagaggtgcaacataacaaacattatgctggagatggaccggatgttgagaccaggaggacatgtttacataagggattcactgtctttgatggaccaacttcagcaagtggctaaagccatcggttggactgctggtgttcatgataccggggaaggaccccacgcaagcgttaggattctcatctgcgataaacggatatgaggaaaagaaaaagaaaagatacgaaatcgaatgtgatgataagtctgctcaaagcgacagttcttcttagtgataaattgataattgtattattgtttatttgtttgttgatttgattgttgaagaatgaagagtgttaatacacttgagctactttaacacatgagtaacaaaaagattcattttctc

SEQ ID NO: 90863 - protein, 655 aa, Arabidopsis thaliana
  peptide (1)..(655): Ceres Seq. ID no. 12725595
MKLSDVGLDVVKTPRLVKLIAFAFLSISTIFLFNHFSDSFSYPSLPFPISSSSNVTEAIQTNITSVAAVAPSPPPRPRLKISPPPLPPTVVRTGIINENGAMSDSFEIGGFDPDSIDELKSATGNSSVEEKESPEVGFQIEKLKLCDKTKIDYIPCLDNEEEIKRLNNTDRGENYERHCPKQSLDCLIPPPDGYKKPIQWPQSRDKIWFNNVPHTRLVEDKGGQNWIRREKDKFVFPGGGTQFIHGADQYLDQISQMIPDITFGSRTRVALDIGCGVASFGAFLMQRNTTTLSVAPKDVHENQIQFALERGVPAMVAVFATRRLLYPSQSFEMIHCSRCRINWTRDDGILLLEVNRMLRAGGYFVWAAQPVYKHEDNLQEQWKEMLDLTNRICWELIKKEGYIAVWRKPLNNSCYVSREAGTKPPLCRPDDDPDDVWYVDMKPCITRLPDNGYGANVSTWPARLHDPPERLQSIQMDAYISRKEIMKAESRFWLEVVESYVRVFRWKEFKLRNVLDMRAGFGGFAAALNDLGLDCWVMNIVPVSGFNTLPVIYDRGLQGAMHDWCEPFDTYPRTYDLIHAAFLFSVEKKRCNITNIMLEMDRMLRPGGHVYIRDSLSLMDQLQQVAKAIGWTAGVHDTGEGPHASVRILICDKRI

SEQ ID NO: 90864 - protein, 554 aa, Arabidopsis thaliana
  peptide (1)..(554): Ceres Seq. ID no. 12725596
MSDSFEIGGFDPDSIDELKSATGNSSVEEKESPEVGFQIEKLKLCDKTKIDYIPCLDNEEEIKRLNNTDRGENYERHCPKQSLDCLIPPPDGYKKPIQWPQSRDKIWFNNVPHTRLVEDKGGQNWIRREKDKFVFPGGGTQFIHGADQYLDQISQMIPDITFGSRTRVALDIGCGVASFGAFLMQRNTTTLSVAPKDVHENQIQFALERGVPAMVAVFATRRLLYPSQSFEMIHCSRCRINWTRDDGILLLEVNRMLRAGGYFVWAAQPVYKHEDNLQEQWKEMLDLTNRICWELIKKEGYIAVWRKPLNNSCYVSREAGTKPPLCRPDDDPDDVWYVDMKPCITRLPDNGYGANVSTWPARLHDPPERLQSIQMDAYISRKEIMKAESRFWLEVVESYVRVFRWKEFKLRNVLDMRAGFGGFAAALNDLGLDCWVMNIVPVSGFNTLPVIYDRGLQGAMHDWCEPFDTYPRTYDLIHAAFLFSVEKKRCNITNIMLEMDRMLRPGGHVYIRDSLSLMDQLQQVAKAIGWTAGVHDTGEGPHASVRILICDKRI

SEQ ID NO: 90865 - protein, 399 aa, Arabidopsis thaliana
  peptide (1)..(399): Ceres Seq. ID no. 12725597
MIPDITFGSRTRVALDIGCGVASFGAFLMQRNTTTLSVAPKDVHENQIQFALERGVPAMVAVFATRRLLYPSQSFEMIHCSRCRINWTRDDGILLLEVNRMLRAGGYFVWAAQPVYKHEDNLQEQWKEMLDLTNRICWELIKKEGYIAVWRKPLNNSCYVSREAGTKPPLCRPDDDPDDVWYVDMKPCITRLPDNGYGANVSTWPARLHDPPERLQSIQMDAYISRKEIMKAESRFWLEVVESYVRVFRWKEFKLRNVLDMRAGFGGFAAALNDLGLDCWVMNIVPVSGFNTLPVIYDRGLQGAMHDWCEPFDTYPRTYDLIHAAFLFSVEKKRCNITNIMLEMDRMLRPGGHVYIRDSLSLMDQLQQVAKAIGWTAGVHDTGEGPHASVRILICDKRI

SEQ ID NO: 90866 - DNA, 1446 bp, Arabidopsis thaliana
  misc_feature (1)..(1446): Ceres Seq. ID no. 12725610
  misc_feature (1)..(1446): Ortholog of  Ceres SEQ ID NO 13594216 as cited in SEQ ID NO 57054
  misc_feature (1)..(1446): Ortholog of  Ceres SEQ ID NO 13598512 as cited in SEQ ID NO 64094
  misc_feature (1)..(1446): Ortholog of  Ceres SEQ ID NO 13657677 as cited in SEQ ID NO 66119
  misc_feature (1)..(1446): Ortholog of  Ceres SEQ ID NO 14301550 as cited in SEQ ID NO 66519
  misc_feature (1)..(1446): Ortholog of  Ceres SEQ ID NO 15180570 as cited in SEQ ID NO 0
atgacgatcagaattatcaatcgtcaatccagattctgctgtaagagttttctgtctgcgaggctgtatagttcaagcgaacaagtgagagatgttgcggatgtggcgaagaacatatctaaagtattgatgtcttctccgcaattggtgcttgactcggctttagatcaaagtgggttaagggtttcacaagaagttgtagaagatgttttaaatagattcaggaatgctggtttgttgacatacaggttcttccaatggtctgagaagcaacggcattacgagcatagtgttcgtgcgtaccacatgatgattgagtctacggcgaagataaggcagtacaagctcatgtgggatcttatcaatgcaatgaggaagaagaagatgctaaatgtagagactttttgtatcgtgatgaggaagtatgcgagggcgcagaaagtggatgaggcgatttacgcgtttaatgtgatggagaagtatgatttgccgccgaatcttgtggcgttcaacgggttgttgagtgcgttgtgtaaatccaagaatgtgaggaaagcacaggaagttttcgaaaatatgagggatcgctttacgcctgactccaaaacgtatagcatattgcttgagggatgggggaaagaacccaacttgcccaaggcaagagaggtcttccgggaaatgattgatgcgggttgtcatccggatatagtgacgtatagtataatggttgacatactttgtaaagctggaagagttgatgaagctcttggcattgtgaggagcatggatccaagcatttgcaagccgaccacttttatctatagtgtgcttgtacatacttatggaactgagaaccggcttgaagaggcggttgatactttcctcgagatggaaagaagtggaatgaaagccgatgtagcagttttcaattcattgatcggtgcattttgcaaagcaaataggatgaagaatgtgtatagggttttgaaagaaatgaagagtaaaggtgtgacgcctaactccaagtcatgtaacatcattctacgccatctaatagaacgaggggagaaagacgaagcttttgatgtctttaggaagatgattaaagtgtgtgaaccagatgcagacacttacacgatggtgatcaagatgttttgtgaaaagaaagagatggagacagcggataaagtgtggaaatacatgaggaagaaaggggtgttccctagtatgcatacattctcggttcttattaatgggttgtgcgaggagcgtaccactcagaaagcttgtgttttgttagaggagatgatcgagatggggattcgaccatcgggtgtaacgtttggtagattaagacagctgcttatcaaagaagagagagaagatgtgctcaagttccttaatgagaagatgaacgttttggtcaatgagccgttgtgtgattga

SEQ ID NO: 90867 - protein, 481 aa, Arabidopsis thaliana
  peptide (1)..(481): Ceres Seq. ID no. 12725611
MTIRIINRQSRFCCKSFLSARLYSSSEQVRDVADVAKNISKVLMSSPQLVLDSALDQSGLRVSQEVVEDVLNRFRNAGLLTYRFFQWSEKQRHYEHSVRAYHMMIESTAKIRQYKLMWDLINAMRKKKMLNVETFCIVMRKYARAQKVDEAIYAFNVMEKYDLPPNLVAFNGLLSALCKSKNVRKAQEVFENMRDRFTPDSKTYSILLEGWGKEPNLPKAREVFREMIDAGCHPDIVTYSIMVDILCKAGRVDEALGIVRSMDPSICKPTTFIYSVLVHTYGTENRLEEAVDTFLEMERSGMKADVAVFNSLIGAFCKANRMKNVYRVLKEMKSKGVTPNSKSCNIILRHLIERGEKDEAFDVFRKMIKVCEPDADTYTMVIKMFCEKKEMETADKVWKYMRKKGVFPSMHTFSVLINGLCEERTTQKACVLLEEMIEMGIRPSGVTFGRLRQLLIKEEREDVLKFLNEKMNVLVNEPLCD

SEQ ID NO: 90868 - protein, 438 aa, Arabidopsis thaliana
  peptide (1)..(438): Ceres Seq. ID no. 12725612
MSSPQLVLDSALDQSGLRVSQEVVEDVLNRFRNAGLLTYRFFQWSEKQRHYEHSVRAYHMMIESTAKIRQYKLMWDLINAMRKKKMLNVETFCIVMRKYARAQKVDEAIYAFNVMEKYDLPPNLVAFNGLLSALCKSKNVRKAQEVFENMRDRFTPDSKTYSILLEGWGKEPNLPKAREVFREMIDAGCHPDIVTYSIMVDILCKAGRVDEALGIVRSMDPSICKPTTFIYSVLVHTYGTENRLEEAVDTFLEMERSGMKADVAVFNSLIGAFCKANRMKNVYRVLKEMKSKGVTPNSKSCNIILRHLIERGEKDEAFDVFRKMIKVCEPDADTYTMVIKMFCEKKEMETADKVWKYMRKKGVFPSMHTFSVLINGLCEERTTQKACVLLEEMIEMGIRPSGVTFGRLRQLLIKEEREDVLKFLNEKMNVLVNEPLCD

SEQ ID NO: 90869 - protein, 379 aa, Arabidopsis thaliana
  peptide (1)..(379): Ceres Seq. ID no. 12725613
MMIESTAKIRQYKLMWDLINAMRKKKMLNVETFCIVMRKYARAQKVDEAIYAFNVMEKYDLPPNLVAFNGLLSALCKSKNVRKAQEVFENMRDRFTPDSKTYSILLEGWGKEPNLPKAREVFREMIDAGCHPDIVTYSIMVDILCKAGRVDEALGIVRSMDPSICKPTTFIYSVLVHTYGTENRLEEAVDTFLEMERSGMKADVAVFNSLIGAFCKANRMKNVYRVLKEMKSKGVTPNSKSCNIILRHLIERGEKDEAFDVFRKMIKVCEPDADTYTMVIKMFCEKKEMETADKVWKYMRKKGVFPSMHTFSVLINGLCEERTTQKACVLLEEMIEMGIRPSGVTFGRLRQLLIKEEREDVLKFLNEKMNVLVNEPLCD

SEQ ID NO: 90870 - DNA, 2343 bp, Arabidopsis thaliana
  misc_feature (1)..(2343): Ceres Seq. ID no. 12725618
  misc_feature (1)..(2343): Ortholog of  Ceres SEQ ID NO 13600595 as cited in SEQ ID NO 629
  misc_feature (1)..(2343): Ortholog of  Ceres SEQ ID NO 13593379 as cited in SEQ ID NO 20573
atggcggttatagttgccggagacgtcgcaaacgtaacatacgacggtcgctcgctgatcatcgacggcgaacataagatccttttctccggctcaatccattatactcgcagcactcctcagatgtggccgtccttgatagcaaaggcaaaatctggaggaatagatgtagtagacacatatgtgttctggaacgttcacgagccgcaacaaggccagttcgatttcagtggaagccgtgatatcgtgaagtttatcaaggaagtaaaaaatcatggcttatatgtctgtcttcggattggaccttttatccaaggggaatggtcttatgggggtttgcctttctggttgcataatgtccaagggattgtcttcaggacagataatgagccattcaagtatcacatgaagagatatgcgaaaatgattgttaagctgatgaaatcggaaaacttgtatgcttcccaaggaggacctatcatactctcacagattgagaacgagtatgggatggttggtagagcttttcgacaagaagggaaatcatatgtcaaatggacagcaaaattggctgttgagcttgacacaggagtgccatgggttatgtgcaagcaagatgatgcccctgatcctttggttaatgcttgcaatgggaggcaatgtggagaaacattcaaaggacccaattcacccaacaaacctgcaatatggactgagaactggacgagtttgtcagctgaggatatagcgtttcatgttgctcttttcatcgctaagaatggaagctttgtaaactactacatgtatcatggaggaaccaacttcgggagaaatgcttcacagttcgtaatcaccagttattatgatcaggctccacttgatgaatatgggttacttaggcaaccaaaatggggacaccttaaggaattacatgctgcagttaagttgtgtgaagagcctctactttcaggactgcaaactacaatatcattggggaagctacaaactgcttttgtgtttgggaagaaggcgaacctatgcgctgccattctggtgaatcaagacaaatgcgagtctactgtacagtttcgtaattcttcatatcgtttgtctccaaaatctgtaagtgtcctgccagactgcaagaatgtagccttcaacactgccaaggtcaatgcacaatacaacacgagaacaaggaaagcaagacaaaatttgtcgtctcctcaaatgtgggaggaatttacagaaacagtcccaagtttcagtgaaacgtcaataagatcagaatccttgcttgagcacatgaataccacacaggatacttccgactatctgtggcaaacaactaggtttcagcaatctgaaggagctccatcagttcttaaagtcaaccatctcggacatgctctacacgcctttgttaatgggagattcataggttctatgcatggaactttcaaagcgcacagatttttgctggagaaaaatatgtcattgaataatggcacaaataacttggcattactcagcgtaatggtaggattaccgaattcaggagcacatctagaaaggagagtcgttggatcacggagcgtaaagatttggaatggaagatatcaactgtacttcaacaactatagttggggatatcaggttggcctgaaaggggagaaattccatgtttacactgaagatgggtccgcaaaagttcagtggaagcagtacagagactccaaaagtcagcctctaacttggtacaaggcctcatttgacacaccagagggggaagatccggtggccttgaacttaggatcaatgggaaaaggagaagcttgggtgaatggccagagtatagctatgttctcctactttaggtaccatataccgagatcttttcttaaaccaaacagtaacttactagtcattttggaagaagaaagagaagggaatcctcttggtataactatagacacagtgtcggtcactgaagtctgtggtcatgtctccaatacaaatcctcatcctgtcatatctccaagaaagaaaggcctcaaccgaaaaaatctaacataccggtatgataggaagcctaaggttcagctccagtgtcctactggcaggaaaatttcaaagatattgtttgcaagctttggcactccaaatggaagttgcgggagctattctattggaagctgtcactcacccaactctttagctgttgtacagaaggcttgtctgaaaaaaagtaggtgttctgtacctgtatggagcaaaacatttggtggtgattcatgtccacacactgttaaatctctgcttgttcgtgcacaatgctcatga

SEQ ID NO: 90871 - protein, 780 aa, Arabidopsis thaliana
  peptide (1)..(780): Ceres Seq. ID no. 12725619
MAVIVAGDVANVTYDGRSLIIDGEHKILFSGSIHYTRSTPQMWPSLIAKAKSGGIDVVDTYVFWNVHEPQQGQFDFSGSRDIVKFIKEVKNHGLYVCLRIGPFIQGEWSYGGLPFWLHNVQGIVFRTDNEPFKYHMKRYAKMIVKLMKSENLYASQGGPIILSQIENEYGMVGRAFRQEGKSYVKWTAKLAVELDTGVPWVMCKQDDAPDPLVNACNGRQCGETFKGPNSPNKPAIWTENWTSLSAEDIAFHVALFIAKNGSFVNYYMYHGGTNFGRNASQFVITSYYDQAPLDEYGLLRQPKWGHLKELHAAVKLCEEPLLSGLQTTISLGKLQTAFVFGKKANLCAAILVNQDKCESTVQFRNSSYRLSPKSVSVLPDCKNVAFNTAKVNAQYNTRTRKARQNLSSPQMWEEFTETVPSFSETSIRSESLLEHMNTTQDTSDYLWQTTRFQQSEGAPSVLKVNHLGHALHAFVNGRFIGSMHGTFKAHRFLLEKNMSLNNGTNNLALLSVMVGLPNSGAHLERRVVGSRSVKIWNGRYQLYFNNYSWGYQVGLKGEKFHVYTEDGSAKVQWKQYRDSKSQPLTWYKASFDTPEGEDPVALNLGSMGKGEAWVNGQSIAMFSYFRYHIPRSFLKPNSNLLVILEEEREGNPLGITIDTVSVTEVCGHVSNTNPHPVISPRKKGLNRKNLTYRYDRKPKVQLQCPTGRKISKILFASFGTPNGSCGSYSIGSCHSPNSLAVVQKACLKKSRCSVPVWSKTFGGDSCPHTVKSLLVRAQCS

SEQ ID NO: 90872 - protein, 739 aa, Arabidopsis thaliana
  peptide (1)..(739): Ceres Seq. ID no. 12725620
MWPSLIAKAKSGGIDVVDTYVFWNVHEPQQGQFDFSGSRDIVKFIKEVKNHGLYVCLRIGPFIQGEWSYGGLPFWLHNVQGIVFRTDNEPFKYHMKRYAKMIVKLMKSENLYASQGGPIILSQIENEYGMVGRAFRQEGKSYVKWTAKLAVELDTGVPWVMCKQDDAPDPLVNACNGRQCGETFKGPNSPNKPAIWTENWTSLSAEDIAFHVALFIAKNGSFVNYYMYHGGTNFGRNASQFVITSYYDQAPLDEYGLLRQPKWGHLKELHAAVKLCEEPLLSGLQTTISLGKLQTAFVFGKKANLCAAILVNQDKCESTVQFRNSSYRLSPKSVSVLPDCKNVAFNTAKVNAQYNTRTRKARQNLSSPQMWEEFTETVPSFSETSIRSESLLEHMNTTQDTSDYLWQTTRFQQSEGAPSVLKVNHLGHALHAFVNGRFIGSMHGTFKAHRFLLEKNMSLNNGTNNLALLSVMVGLPNSGAHLERRVVGSRSVKIWNGRYQLYFNNYSWGYQVGLKGEKFHVYTEDGSAKVQWKQYRDSKSQPLTWYKASFDTPEGEDPVALNLGSMGKGEAWVNGQSIAMFSYFRYHIPRSFLKPNSNLLVILEEEREGNPLGITIDTVSVTEVCGHVSNTNPHPVISPRKKGLNRKNLTYRYDRKPKVQLQCPTGRKISKILFASFGTPNGSCGSYSIGSCHSPNSLAVVQKACLKKSRCSVPVWSKTFGGDSCPHTVKSLLVRAQCS

SEQ ID NO: 90873 - protein, 645 aa, Arabidopsis thaliana
  peptide (1)..(645): Ceres Seq. ID no. 12725621
MKRYAKMIVKLMKSENLYASQGGPIILSQIENEYGMVGRAFRQEGKSYVKWTAKLAVELDTGVPWVMCKQDDAPDPLVNACNGRQCGETFKGPNSPNKPAIWTENWTSLSAEDIAFHVALFIAKNGSFVNYYMYHGGTNFGRNASQFVITSYYDQAPLDEYGLLRQPKWGHLKELHAAVKLCEEPLLSGLQTTISLGKLQTAFVFGKKANLCAAILVNQDKCESTVQFRNSSYRLSPKSVSVLPDCKNVAFNTAKVNAQYNTRTRKARQNLSSPQMWEEFTETVPSFSETSIRSESLLEHMNTTQDTSDYLWQTTRFQQSEGAPSVLKVNHLGHALHAFVNGRFIGSMHGTFKAHRFLLEKNMSLNNGTNNLALLSVMVGLPNSGAHLERRVVGSRSVKIWNGRYQLYFNNYSWGYQVGLKGEKFHVYTEDGSAKVQWKQYRDSKSQPLTWYKASFDTPEGEDPVALNLGSMGKGEAWVNGQSIAMFSYFRYHIPRSFLKPNSNLLVILEEEREGNPLGITIDTVSVTEVCGHVSNTNPHPVISPRKKGLNRKNLTYRYDRKPKVQLQCPTGRKISKILFASFGTPNGSCGSYSIGSCHSPNSLAVVQKACLKKSRCSVPVWSKTFGGDSCPHTVKSLLVRAQCS

SEQ ID NO: 90874 - DNA, 2893 bp, Arabidopsis thaliana
  misc_feature (1)..(2893): Ceres Seq. ID no. 12725622
  misc_feature (1)..(2893): Ortholog of  Ceres SEQ ID NO 13600301 as cited in SEQ ID NO 1010
atgggttgcggaggatcaaaagtagataatcaaccaatagtgattctctgtagagaacgaaaggagctgcttaaagcggcgtcgtatcatcgttctgctctcgctgtcgctcacctaacttacttccagtctctctccgacgtcggtgaagctattcaacgtttcgttgacgacgaagtcgtagctggtttttcttcttcttcttcgccggattctccagttcttacacttccgtccgacgaagggaaaccgacgaaacacaagaggatttctccttcttcaaccacctcaatttctcattccgtcatcgaagaagaagacactgatgatgattcgcatttgcatctaagctccggatccgaatccgaatcagaagttggatctaaggatcatatccaaattactagcactccagaacaagagcggtcaacggaatcatttccttccggttatcatccaacaaactatgctccaccggtttacccacctggttatccacccggttacccattcagttacccgaccggttattcatcgggtaattatcaaccgggttacccgaattacacaggtgagaatccatacggaaatcgaggaatgtattacatgaagaaatctgcgccacaatcacgaccgttcattttccaaccggagaatcatcgagtggaggagaacgcgcaatggccgtcggattctggatttagaaacacaggagtgcaacggagatcgccgtctccgttacctcctccgtcaccacctacggtttcaacttgggattttttgaatgtgtttgatacttatgattacagcaacgcccgttctcgtgcttcgggatattatccgatgggaatggcgtcaatctcaagcagtcctgattcgaaggaagttagagaaagagaagggattcctgagctagaagaagtaacagagcaagaagttatcaagcaagtgtatagacgtcccaagagaccaggattggagaaggttaaagaacacagagacgagcacaagcacaacgtttttcctgagaggaacattaacaaaagggaagttccaatgccagaacaagtcactgagagctcattggattcagagacaatttcgtctttttcaggaagtgatgtagaatcggagtttcactatgttaatggtggtgaaggaaagagtagcagcatcagttcaatcagtcatggggctgggacaaagagctcgagagaagtagaagaacagtatgggaggaaaaaaggagtgagctttgagttggaggaaacaacgagcacttcgtcttttgatgttgaatcttccaagataagtagcttatccagtttgtcgattcatgccactagggatctcagagaagttgttaaggagatcaagagtgagttcgagattgcttcttcttgtgggaaggaggttgctttgttacttgaagtcggcaagttgccttatcagcataaaaacaatggcgttaaagttatcttatccaggatcatgtatctggtagcaccatccacacggtcatcgcactctcagcccagactatcaatacgtttaacatctagaactcgaaaaatggcgaaatcatacaatggacaagatgttaatggaggcttcaatggaaacctctcatcaaccttagagaaactgtatgcgtgggaaaagaaactgtacaaggaagtcaaggacgaagaaaagcttcgtgctatctatgaagagaagtgcaggagactaaaaaaaatggatagtcatggagcagaatctatcaagatcgatgctactcgggcagccattaggaagcttctgaccaaaatcgatgtttgtataagatcagttgattcgatttccagcagaatccataaacttagagatgaagagttgcagccacagttgatacagttaattcacgggttgataagaatgtggaggtcaatgctgaggtgccaccagaaacagtttcaggcgatcagggagagcaaggttcgatctctaaaggcgaacacaaccttacaaaatgactctggctctacagcaattcttgatcttgagatagagcttagagaatggtgcatcagcttcaacaactgggtcaacacccagaaatcatacgtccagttcctaagcggatggctcacgaaatgccttcactatgaacccgaggcaaccgatgacggaatcgctcctttctctcctagccagatcggtgcaccgcccatctttatcatttgcaaagattggcaagaagcaatgtgtagaatatctggagagaatgtgaccaatgcaatgcaaggttttgcttcaagcctacacgagctatgggagaagcaagaagaagagcaaagggtaaaagcgcaatctgagcagcgagatgcagagtcagagagaagtgtggtttcgaaaggtcggtcagagagcgggatatcagctttggatgatttgaaagtggatttagattcaatgaggaagaggctagtcgaggagagaggtaagggtaaagaaaccattaagcttgtgaacaacgcgtcttcgagcagcttaaaagctggtttagttcccattttcggggcactgagaaaattcacatcagaagttgtgaaagctcatgaaattgttaggcttcaacatcctcagacctcttcttgagtagagagtgtggacttaccacatttttgcaccgttttgaagttttgttacttgcaaattagacataggtctatatagaaggaaattgttgtatagatgagttcatattcaattattggttggttagtttcccttgtaaaccgtttttaaatggtgaagaagaagatatctagtttgccttgtaagccgttacttgctgaattaaaaagaatgtaatatgactgttcctggttgagattaaaaggaaaatagg

SEQ ID NO: 90875 - protein, 879 aa, Arabidopsis thaliana
  peptide (1)..(879): Ceres Seq. ID no. 12725623
MGCGGSKVDNQPIVILCRERKELLKAASYHRSALAVAHLTYFQSLSDVGEAIQRFVDDEVVAGFSSSSSPDSPVLTLPSDEGKPTKHKRISPSSTTSISHSVIEEEDTDDDSHLHLSSGSESESEVGSKDHIQITSTPEQERSTESFPSGYHPTNYAPPVYPPGYPPGYPFSYPTGYSSGNYQPGYPNYTGENPYGNRGMYYMKKSAPQSRPFIFQPENHRVEENAQWPSDSGFRNTGVQRRSPSPLPPPSPPTVSTWDFLNVFDTYDYSNARSRASGYYPMGMASISSSPDSKEVREREGIPELEEVTEQEVIKQVYRRPKRPGLEKVKEHRDEHKHNVFPERNINKREVPMPEQVTESSLDSETISSFSGSDVESEFHYVNGGEGKSSSISSISHGAGTKSSREVEEQYGRKKGVSFELEETTSTSSFDVESSKISSLSSLSIHATRDLREVVKEIKSEFEIASSCGKEVALLLEVGKLPYQHKNNGVKVILSRIMYLVAPSTRSSHSQPRLSIRLTSRTRKMAKSYNGQDVNGGFNGNLSSTLEKLYAWEKKLYKEVKDEEKLRAIYEEKCRRLKKMDSHGAESIKIDATRAAIRKLLTKIDVCIRSVDSISSRIHKLRDEELQPQLIQLIHGLIRMWRSMLRCHQKQFQAIRESKVRSLKANTTLQNDSGSTAILDLEIELREWCISFNNWVNTQKSYVQFLSGWLTKCLHYEPEATDDGIAPFSPSQIGAPPIFIICKDWQEAMCRISGENVTNAMQGFASSLHELWEKQEEEQRVKAQSEQRDAESERSVVSKGRSESGISALDDLKVDLDSMRKRLVEERGKGKETIKLVNNASSSSLKAGLVPIFGALRKFTSEVVKAHEIVRLQHPQTSS

SEQ ID NO: 90876 - protein, 680 aa, Arabidopsis thaliana
  peptide (1)..(680): Ceres Seq. ID no. 12725624
MYYMKKSAPQSRPFIFQPENHRVEENAQWPSDSGFRNTGVQRRSPSPLPPPSPPTVSTWDFLNVFDTYDYSNARSRASGYYPMGMASISSSPDSKEVREREGIPELEEVTEQEVIKQVYRRPKRPGLEKVKEHRDEHKHNVFPERNINKREVPMPEQVTESSLDSETISSFSGSDVESEFHYVNGGEGKSSSISSISHGAGTKSSREVEEQYGRKKGVSFELEETTSTSSFDVESSKISSLSSLSIHATRDLREVVKEIKSEFEIASSCGKEVALLLEVGKLPYQHKNNGVKVILSRIMYLVAPSTRSSHSQPRLSIRLTSRTRKMAKSYNGQDVNGGFNGNLSSTLEKLYAWEKKLYKEVKDEEKLRAIYEEKCRRLKKMDSHGAESIKIDATRAAIRKLLTKIDVCIRSVDSISSRIHKLRDEELQPQLIQLIHGLIRMWRSMLRCHQKQFQAIRESKVRSLKANTTLQNDSGSTAILDLEIELREWCISFNNWVNTQKSYVQFLSGWLTKCLHYEPEATDDGIAPFSPSQIGAPPIFIICKDWQEAMCRISGENVTNAMQGFASSLHELWEKQEEEQRVKAQSEQRDAESERSVVSKGRSESGISALDDLKVDLDSMRKRLVEERGKGKETIKLVNNASSSSLKAGLVPIFGALRKFTSEVVKAHEIVRLQHPQTSS

SEQ ID NO: 90877 - protein, 677 aa, Arabidopsis thaliana
  peptide (1)..(677): Ceres Seq. ID no. 12725625
MKKSAPQSRPFIFQPENHRVEENAQWPSDSGFRNTGVQRRSPSPLPPPSPPTVSTWDFLNVFDTYDYSNARSRASGYYPMGMASISSSPDSKEVREREGIPELEEVTEQEVIKQVYRRPKRPGLEKVKEHRDEHKHNVFPERNINKREVPMPEQVTESSLDSETISSFSGSDVESEFHYVNGGEGKSSSISSISHGAGTKSSREVEEQYGRKKGVSFELEETTSTSSFDVESSKISSLSSLSIHATRDLREVVKEIKSEFEIASSCGKEVALLLEVGKLPYQHKNNGVKVILSRIMYLVAPSTRSSHSQPRLSIRLTSRTRKMAKSYNGQDVNGGFNGNLSSTLEKLYAWEKKLYKEVKDEEKLRAIYEEKCRRLKKMDSHGAESIKIDATRAAIRKLLTKIDVCIRSVDSISSRIHKLRDEELQPQLIQLIHGLIRMWRSMLRCHQKQFQAIRESKVRSLKANTTLQNDSGSTAILDLEIELREWCISFNNWVNTQKSYVQFLSGWLTKCLHYEPEATDDGIAPFSPSQIGAPPIFIICKDWQEAMCRISGENVTNAMQGFASSLHELWEKQEEEQRVKAQSEQRDAESERSVVSKGRSESGISALDDLKVDLDSMRKRLVEERGKGKETIKLVNNASSSSLKAGLVPIFGALRKFTSEVVKAHEIVRLQHPQTSS

SEQ ID NO: 90878 - DNA, 1146 bp, Arabidopsis thaliana
  misc_feature (1)..(1146): Ceres Seq. ID no. 12725626
  misc_feature (1)..(1146): Ortholog of  Ceres SEQ ID NO 14304148 as cited in SEQ ID NO 57313
  misc_feature (1)..(1146): Ortholog of  Ceres SEQ ID NO 13598513 as cited in SEQ ID NO 64102
atgtcaaaccatcttcaagatcccttaaccacttaccctaaaccgggtttaaccaaagaagaacaagaaatcgacgagaaaatggtgagcttgcaagcggagagtatagtcaacgccgtggctttccccatggttctcaaagccgccttagagcttggagtcattgatacgatcgctgctgctagcaacggcacgtggctctcaccgtctgagatagccgttagtctcccaaacaaacccactaacccggaggcgccggtattgctggaccggatgctgcggttacttgtaagccactcgatcttgaagtgttgtatggttgaaagcagagaaaatggtcaaaccggaaagatcgagagagtatatgcagctgaaccgatttgcaagtacttcttgaaagatagtgacggctctggttctctctcgtccttgttattgttgctccatagccaagtcattctcaaaacatggacaaatctcaaggatgtgatactagaaggaaaagatgcattcagctctgcccacgacatgagacttttcgaatatattagttcggatgaccagttctctaagttgtttcaccgcgcaatgtcggaatcttccacaatggtcatgaagaaggttctagaagaatacagaggatttgaagatgttaacactttggtggatgtaggaggaggtatcggcaccatattaggtctcatcacttccaagtatcctcatatcaaaggtgttaatttcgacttagctcaagttttaacccaagctcctttttatccaggagtcaagcatgtctccggagacatgtttattgaagttccaaaaggagatgccatctttatgaaatggatactacatgattggggagacgaggattgtataaagattctgaaaaattgttggaaaagtctaccggaaaaaggtaaagtgatcattgtagagatgattacaccaatggaaccaaagcctaatgacttttcgtgtaacaccgtgttgggcatggacttgttgatgttaacacaatgctctggtggtaaagagcgatctctttcgcagttcgagaatttagcgtttgcgtcaggctttcttctatgtgaaatcatatgtctttcttattcatattctgttatcgaattccacaaataa

SEQ ID NO: 90879 - protein, 381 aa, Arabidopsis thaliana
  peptide (1)..(381): Ceres Seq. ID no. 12725627
MSNHLQDPLTTYPKPGLTKEEQEIDEKMVSLQAESIVNAVAFPMVLKAALELGVIDTIAAASNGTWLSPSEIAVSLPNKPTNPEAPVLLDRMLRLLVSHSILKCCMVESRENGQTGKIERVYAAEPICKYFLKDSDGSGSLSSLLLLLHSQVILKTWTNLKDVILEGKDAFSSAHDMRLFEYISSDDQFSKLFHRAMSESSTMVMKKVLEEYRGFEDVNTLVDVGGGIGTILGLITSKYPHIKGVNFDLAQVLTQAPFYPGVKHVSGDMFIEVPKGDAIFMKWILHDWGDEDCIKILKNCWKSLPEKGKVIIVEMITPMEPKPNDFSCNTVLGMDLLMLTQCSGGKERSLSQFENLAFASGFLLCEIICLSYSYSVIEFHK

SEQ ID NO: 90880 - protein, 354 aa, Arabidopsis thaliana
  peptide (1)..(354): Ceres Seq. ID no. 12725628
MVSLQAESIVNAVAFPMVLKAALELGVIDTIAAASNGTWLSPSEIAVSLPNKPTNPEAPVLLDRMLRLLVSHSILKCCMVESRENGQTGKIERVYAAEPICKYFLKDSDGSGSLSSLLLLLHSQVILKTWTNLKDVILEGKDAFSSAHDMRLFEYISSDDQFSKLFHRAMSESSTMVMKKVLEEYRGFEDVNTLVDVGGGIGTILGLITSKYPHIKGVNFDLAQVLTQAPFYPGVKHVSGDMFIEVPKGDAIFMKWILHDWGDEDCIKILKNCWKSLPEKGKVIIVEMITPMEPKPNDFSCNTVLGMDLLMLTQCSGGKERSLSQFENLAFASGFLLCEIICLSYSYSVIEFHK

SEQ ID NO: 90881 - protein, 338 aa, Arabidopsis thaliana
  peptide (1)..(338): Ceres Seq. ID no. 12725629
MVLKAALELGVIDTIAAASNGTWLSPSEIAVSLPNKPTNPEAPVLLDRMLRLLVSHSILKCCMVESRENGQTGKIERVYAAEPICKYFLKDSDGSGSLSSLLLLLHSQVILKTWTNLKDVILEGKDAFSSAHDMRLFEYISSDDQFSKLFHRAMSESSTMVMKKVLEEYRGFEDVNTLVDVGGGIGTILGLITSKYPHIKGVNFDLAQVLTQAPFYPGVKHVSGDMFIEVPKGDAIFMKWILHDWGDEDCIKILKNCWKSLPEKGKVIIVEMITPMEPKPNDFSCNTVLGMDLLMLTQCSGGKERSLSQFENLAFASGFLLCEIICLSYSYSVIEFHK

SEQ ID NO: 90882 - DNA, 735 bp, Arabidopsis thaliana
  misc_feature (1)..(735): Ceres Seq. ID no. 12725634
  misc_feature (1)..(735): Ortholog of  Ceres SEQ ID NO 13594435 as cited in SEQ ID NO 57977
atggtgaaacaagaactcaagatccaagttactacttcctcatcatcactctctcattcttcatcttcttcttcttcttcaacgtcggcactacgtcatcaatcttgtaagaacaagataaagaagtataaaggtgtgaggatgcgaagttggggatcatgggttactgaaattagggcaccaaatcaaaagacaagaatctggttaggttcttactccaccgcagaagcagctgctagggcttacgacgctgctctcttgtgtcttaagggacctaaagctaatctcaacttccctaacatcaccactacttctccttttcttatgaacatcgacgaaaagacccttttgtccccaaaatcaatccaaaaggtcgccgctcaagccgctaactcctcttctgaccattttacccctccgtccgatgaaaatgatcatgatcatgatgacggactcgatcaccatccatctgcttcttcttcagctgcatcttcaccaccagatgatgatcatcataatgatgacgatggtgatttggtatcgttgatggaatctttcgtggattacaacgaacacgtgtctctgatggatccatcgctgtatgaatttggacataatgagatcttcttcaccaacggagatccgtttgattattctccacagttacatagctcagaggcaacgatggatgacttctacgacgatgttgatattccgctatggagtttcagttaa

SEQ ID NO: 90883 - protein, 244 aa, Arabidopsis thaliana
  peptide (1)..(244): Ceres Seq. ID no. 12725635
MVKQELKIQVTTSSSSLSHSSSSSSSSTSALRHQSCKNKIKKYKGVRMRSWGSWVTEIRAPNQKTRIWLGSYSTAEAAARAYDAALLCLKGPKANLNFPNITTTSPFLMNIDEKTLLSPKSIQKVAAQAANSSSDHFTPPSDENDHDHDDGLDHHPSASSSAASSPPDDDHHNDDDGDLVSLMESFVDYNEHVSLMDPSLYEFGHNEIFFTNGDPFDYSPQLHSSEATMDDFYDDVDIPLWSFS

SEQ ID NO: 90884 - protein, 197 aa, Arabidopsis thaliana
  peptide (1)..(197): Ceres Seq. ID no. 12725636
MRSWGSWVTEIRAPNQKTRIWLGSYSTAEAAARAYDAALLCLKGPKANLNFPNITTTSPFLMNIDEKTLLSPKSIQKVAAQAANSSSDHFTPPSDENDHDHDDGLDHHPSASSSAASSPPDDDHHNDDDGDLVSLMESFVDYNEHVSLMDPSLYEFGHNEIFFTNGDPFDYSPQLHSSEATMDDFYDDVDIPLWSFS

SEQ ID NO: 90885 - protein, 136 aa, Arabidopsis thaliana
  peptide (1)..(136): Ceres Seq. ID no. 12725637
MNIDEKTLLSPKSIQKVAAQAANSSSDHFTPPSDENDHDHDDGLDHHPSASSSAASSPPDDDHHNDDDGDLVSLMESFVDYNEHVSLMDPSLYEFGHNEIFFTNGDPFDYSPQLHSSEATMDDFYDDVDIPLWSFS

SEQ ID NO: 90886 - DNA, 1636 bp, Arabidopsis thaliana
  misc_feature (1)..(1636): Ceres Seq. ID no. 12725642
  misc_feature (1)..(1636): Ortholog of  Ceres SEQ ID NO 13597269 as cited in SEQ ID NO 63932
gaaactgagagaagaagagaaaaatggcggcagagaaaatagagacagtggtcgcagggaattacttagaaatggagagggaagaagaaaacataagtggtaacaagaaatcttcaactaaaacaaaactctctaatttcttctggcatggtggttctgtctacgatgcttggtttagttgtgcttcaaatcaggtggcacaagttctgttgacattaccatactcgttctcacaacttgggatgatgtcgggaattttgtttcaactcttttatggattaatgggaagttggactgcttatctcattagtgttctttacgttgaatatcgaactcgtaaagaacgagaaaaattcgatttccgtaaccacgttattcagtggtttgaggtgttagatggattgttggggaaacattggaggaaccttggattgatctttaactgcacttttcttctctttggatctgttattcagctcattgcttgtgctagcaatatatattatattaatgacaaattggacaagaggacatggacatacatatttggggcgtgctgtgcaacaactgtttttattccttccttccacaattatagaatttggtcattcctcggactcgctatgaccacttacacttcttggtatctcaccattgcttcactccttcatggccaggctgaggatgtgaaacactctggtccaaccacaatggtgctttacttcaccggagccaccaacattctctacacctttggtggccacgccgtcacagtggagataatgcacgctatgtggaaaccgcaaaagttcaaggcgatatatctactagcgaccatatatgtactaacgctaacgctaccatccgcgtctgcggtttattgggcgtttggcgataagctactaactcattccaatgcgctctctcttctccctaagactggttttagagataccgcagtgatcctcatgctcattcatcaatttataacgttcggattcgcgtctacaccgttatattttgtgtgggagaaattgataggtgtgcatgagacgaagagcatgttcaaaagagccatggctagattacccgtggttgtacccatatggttcttagccattatcttcccctttttcggaccaatcaattccgcggtcggatctctcttagttagcttcactgtctacatcatccccgcattggctcatatgcttacctttgctcctgctccttcaagagagaatgcggtggagaggccaccgagagtggtaggaggatggatggggacttactgcataaacatatttgtggtggtttgggtattcgtagttgggttcgggtttggaggatgggcaagtatggtcaactttgttcgccagatcgacacttttggtctctttaccaaatgctaccaatgccctcctcacaagccatgatatacaaatttgccattcaagaccttctagaaagagagtttcatataagggggttttgatttcgagatctaatatatataagttactacatccaatttttttttagtatttattaaaaatcacatctctttgtaattgtttgacgacaataatcttttacctcgggtttgtttaatttgttatgttgagttatttttggt

SEQ ID NO: 90887 - protein, 470 aa, Arabidopsis thaliana
  peptide (1)..(470): Ceres Seq. ID no. 12725643
MAAEKIETVVAGNYLEMEREEENISGNKKSSTKTKLSNFFWHGGSVYDAWFSCASNQVAQVLLTLPYSFSQLGMMSGILFQLFYGLMGSWTAYLISVLYVEYRTRKEREKFDFRNHVIQWFEVLDGLLGKHWRNLGLIFNCTFLLFGSVIQLIACASNIYYINDKLDKRTWTYIFGACCATTVFIPSFHNYRIWSFLGLAMTTYTSWYLTIASLLHGQAEDVKHSGPTTMVLYFTGATNILYTFGGHAVTVEIMHAMWKPQKFKAIYLLATIYVLTLTLPSASAVYWAFGDKLLTHSNALSLLPKTGFRDTAVILMLIHQFITFGFASTPLYFVWEKLIGVHETKSMFKRAMARLPVVVPIWFLAIIFPFFGPINSAVGSLLVSFTVYIIPALAHMLTFAPAPSRENAVERPPRVVGGWMGTYCINIFVVVWVFVVGFGFGGWASMVNFVRQIDTFGLFTKCYQCPPHKP

SEQ ID NO: 90888 - protein, 454 aa, Arabidopsis thaliana
  peptide (1)..(454): Ceres Seq. ID no. 12725644
MEREEENISGNKKSSTKTKLSNFFWHGGSVYDAWFSCASNQVAQVLLTLPYSFSQLGMMSGILFQLFYGLMGSWTAYLISVLYVEYRTRKEREKFDFRNHVIQWFEVLDGLLGKHWRNLGLIFNCTFLLFGSVIQLIACASNIYYINDKLDKRTWTYIFGACCATTVFIPSFHNYRIWSFLGLAMTTYTSWYLTIASLLHGQAEDVKHSGPTTMVLYFTGATNILYTFGGHAVTVEIMHAMWKPQKFKAIYLLATIYVLTLTLPSASAVYWAFGDKLLTHSNALSLLPKTGFRDTAVILMLIHQFITFGFASTPLYFVWEKLIGVHETKSMFKRAMARLPVVVPIWFLAIIFPFFGPINSAVGSLLVSFTVYIIPALAHMLTFAPAPSRENAVERPPRVVGGWMGTYCINIFVVVWVFVVGFGFGGWASMVNFVRQIDTFGLFTKCYQCPPHKP

SEQ ID NO: 90889 - protein, 397 aa, Arabidopsis thaliana
  peptide (1)..(397): Ceres Seq. ID no. 12725645
MMSGILFQLFYGLMGSWTAYLISVLYVEYRTRKEREKFDFRNHVIQWFEVLDGLLGKHWRNLGLIFNCTFLLFGSVIQLIACASNIYYINDKLDKRTWTYIFGACCATTVFIPSFHNYRIWSFLGLAMTTYTSWYLTIASLLHGQAEDVKHSGPTTMVLYFTGATNILYTFGGHAVTVEIMHAMWKPQKFKAIYLLATIYVLTLTLPSASAVYWAFGDKLLTHSNALSLLPKTGFRDTAVILMLIHQFITFGFASTPLYFVWEKLIGVHETKSMFKRAMARLPVVVPIWFLAIIFPFFGPINSAVGSLLVSFTVYIIPALAHMLTFAPAPSRENAVERPPRVVGGWMGTYCINIFVVVWVFVVGFGFGGWASMVNFVRQIDTFGLFTKCYQCPPHKP

SEQ ID NO: 90890 - DNA, 3033 bp, Arabidopsis thaliana
  misc_feature (1)..(3033): Ceres Seq. ID no. 12725655
  misc_feature (1)..(3033): Ortholog of  Ceres SEQ ID NO 14308209 as cited in SEQ ID NO 58800
accaaaaaatttcacaaaccaaaccaaaaccaaaaaaatagcttatctctctcttatcaccggttcaatcactaaaccatggcgacctccgtcgataaccgccattatcccaccatgaacggcgtcgctcacgccttcaaacctcctctcgttccttctcctcgctcattcgaccgccaccgtcaccaaaaccaaactctcgacgtcatcctcaccgaaactaaaatcgtcaaagaaaccgaagtcatcaccaccgtcgtagacagttacgacgactcctcaagcgacgacgaagacgagagccataaccgtaacgtcccttactacaaagagctggttaaaaaatcaaacagcgatttagaaccgtcgattttagatccgagagatgaatcaacggctgatagttggattcaacgtaactcatccatgctccgtctcaccggaaaacatccattcaacgccgaagcacctcttcctcgtcttatgcaccatggattcatcactccagttccactccattacgtccgcaaccacggtgcagttcccaaagcgaattggtcagactggtcaatcgaaattaccggactcgttaaacgtccggctaaattcaccatggaagagctaatctccgagttccccagccgcgaattcccggtgacactcgtctgcgccggtaatcgccgcaaggaacagaacatggtgaaacaaacgatcggattcaattggggatccgccggagtatctacttctctatggaaaggtattccgttaagcgaaatcctccgtcgatgcgggatctatagccggagaggaggcgcgttaaacgtttgcttcgaaggagcggaggatcttcccggcggcggcggatctaaatacggaacaagtattaagaaggagatggcgatggatccggctagagatattatcttagcttatatgcaaaacggcgagcttttaacgccggatcatgggtttccggttcgggtcattgtaccgggtttcatcggtggtcggatggttaaatggttaaagagaatcatcgtcacgcctcaagaatctgacagttactatcactataaagacaatcgagtccttccttctctcgttgatgctgagctggcaaattccgaagcttggtggtataagcctgaatacataatcaacgagcttaatataaactcggtgattacaacacctggtcacgcagagattttaccgattaatgcattcactactcagaagccgtacacattaaaaggctacgcttattctggaggaggtaagaaggtaacgagggttgaggtgactctagacggaggagacacgtggagtgtttgtgagcttgaccaccaggagaaaccgaacaagtacggtaaattctggtgctggtgtttctggtcacttgacgttgaggttcttgatctgctcagtgctaaagacgtcgcggttcgagcctgggacgagtctttcaatactcagcctgataaactcatctggaacctcatggggatgatgaacaattgctggttcaggattaggaccaacgtgtgcaagcctcatagaggagagatagggatagttttcgaacacccgaccagacccggaaaccagtcgggtgggtggatggcaaaggagcgtcagcttgagatttcctcagaatccaacaataccttgaagaaatctgtctcatctcctttcatgaacactgcctcgaagatgtattcaatctctgaagttagaaaacacaacactgctgactctgcatggatcatcgtccacggtcacatctatgactgtacacgtttcttgaaagatcatccaggaggcacagattctatcctgataaacgcaggtacagattgcaccgaagagtttgaagccattcactctgacaaagccaagaagcttttggaagattaccgtatcggtgaactcatcaccactggctacgactcttcccctaacgtctcagttcatggtgcctcaaactttggtcctttgttagctccaatcaaagagctaactcctcaaaagaacattgctttggtcaacccacgtgagaaaatcccggttaggctcattgagaagacttcgatctcgcacgacgttcgtaagttccgattcgcattaccatcagaagatcaacagcttggtttacccgtggggaagcacgttttcgtttgcgccaacataaacgacaaactctgtctcagagcttatactcccaccagcgccatcgacgcggttggtcatatcgacctcgtcgtcaaagtttacttcaaagacgttcatccaaggtttcccaatggtggactcatgtctcaacacttagactcgttaccaatcgggtcaatgatagatatcaaaggtccactagggcacatcgagtacaaaggcaaaggcaacttcctggtcagcggcaaacctaagtttgccaagaaactagcaatgctcgccggaggaacaggcatcactcctatctaccagatcattcaatctatattgagtgatccagaggacgaaaccgagatgtatgtggtttacgcaaacagaaccgaggatgacattcttgtgagggaagagctagaaggatgggctagtaagcataaggagaggctaaagatttggtacgtcgttgaaatcgcaaaggaaggttggagttacagtaccgggtttataactgaagctgtgcttagggaacatatccctgaaggtttggaaggcgaatcgctagcactcgcatgcggaccaccgcctatgattcagtttgcgttgcagccaaatctagagaagatgggttacaacgtgaaggaggatctcttaatcttctagatttgctcaagttctgtgctattggaaattcgaaagttgataacaagtatcgcttatgtgtgtatatacatggttatttgggcacttttgttatagttgttgtttatcagagctccaaattgtatattgtataaaattgtgtttaattatgatctatgttgttgatgatgatgatgataaatgatgaacttattgtaactc

SEQ ID NO: 90891 - protein, 917 aa, Arabidopsis thaliana
  peptide (1)..(917): Ceres Seq. ID no. 12725656
MATSVDNRHYPTMNGVAHAFKPPLVPSPRSFDRHRHQNQTLDVILTETKIVKETEVITTVVDSYDDSSSDDEDESHNRNVPYYKELVKKSNSDLEPSILDPRDESTADSWIQRNSSMLRLTGKHPFNAEAPLPRLMHHGFITPVPLHYVRNHGAVPKANWSDWSIEITGLVKRPAKFTMEELISEFPSREFPVTLVCAGNRRKEQNMVKQTIGFNWGSAGVSTSLWKGIPLSEILRRCGIYSRRGGALNVCFEGAEDLPGGGGSKYGTSIKKEMAMDPARDIILAYMQNGELLTPDHGFPVRVIVPGFIGGRMVKWLKRIIVTPQESDSYYHYKDNRVLPSLVDAELANSEAWWYKPEYIINELNINSVITTPGHAEILPINAFTTQKPYTLKGYAYSGGGKKVTRVEVTLDGGDTWSVCELDHQEKPNKYGKFWCWCFWSLDVEVLDLLSAKDVAVRAWDESFNTQPDKLIWNLMGMMNNCWFRIRTNVCKPHRGEIGIVFEHPTRPGNQSGGWMAKERQLEISSESNNTLKKSVSSPFMNTASKMYSISEVRKHNTADSAWIIVHGHIYDCTRFLKDHPGGTDSILINAGTDCTEEFEAIHSDKAKKLLEDYRIGELITTGYDSSPNVSVHGASNFGPLLAPIKELTPQKNIALVNPREKIPVRLIEKTSISHDVRKFRFALPSEDQQLGLPVGKHVFVCANINDKLCLRAYTPTSAIDAVGHIDLVVKVYFKDVHPRFPNGGLMSQHLDSLPIGSMIDIKGPLGHIEYKGKGNFLVSGKPKFAKKLAMLAGGTGITPIYQIIQSILSDPEDETEMYVVYANRTEDDILVREELEGWASKHKERLKIWYVVEIAKEGWSYSTGFITEAVLREHIPEGLEGESLALACGPPPMIQFALQPNLEKMGYNVKEDLLIF

SEQ ID NO: 90892 - protein, 905 aa, Arabidopsis thaliana
  peptide (1)..(905): Ceres Seq. ID no. 12725657
MNGVAHAFKPPLVPSPRSFDRHRHQNQTLDVILTETKIVKETEVITTVVDSYDDSSSDDEDESHNRNVPYYKELVKKSNSDLEPSILDPRDESTADSWIQRNSSMLRLTGKHPFNAEAPLPRLMHHGFITPVPLHYVRNHGAVPKANWSDWSIEITGLVKRPAKFTMEELISEFPSREFPVTLVCAGNRRKEQNMVKQTIGFNWGSAGVSTSLWKGIPLSEILRRCGIYSRRGGALNVCFEGAEDLPGGGGSKYGTSIKKEMAMDPARDIILAYMQNGELLTPDHGFPVRVIVPGFIGGRMVKWLKRIIVTPQESDSYYHYKDNRVLPSLVDAELANSEAWWYKPEYIINELNINSVITTPGHAEILPINAFTTQKPYTLKGYAYSGGGKKVTRVEVTLDGGDTWSVCELDHQEKPNKYGKFWCWCFWSLDVEVLDLLSAKDVAVRAWDESFNTQPDKLIWNLMGMMNNCWFRIRTNVCKPHRGEIGIVFEHPTRPGNQSGGWMAKERQLEISSESNNTLKKSVSSPFMNTASKMYSISEVRKHNTADSAWIIVHGHIYDCTRFLKDHPGGTDSILINAGTDCTEEFEAIHSDKAKKLLEDYRIGELITTGYDSSPNVSVHGASNFGPLLAPIKELTPQKNIALVNPREKIPVRLIEKTSISHDVRKFRFALPSEDQQLGLPVGKHVFVCANINDKLCLRAYTPTSAIDAVGHIDLVVKVYFKDVHPRFPNGGLMSQHLDSLPIGSMIDIKGPLGHIEYKGKGNFLVSGKPKFAKKLAMLAGGTGITPIYQIIQSILSDPEDETEMYVVYANRTEDDILVREELEGWASKHKERLKIWYVVEIAKEGWSYSTGFITEAVLREHIPEGLEGESLALACGPPPMIQFALQPNLEKMGYNVKEDLLIF

SEQ ID NO: 90893 - protein, 801 aa, Arabidopsis thaliana
  peptide (1)..(801): Ceres Seq. ID no. 12725658
MLRLTGKHPFNAEAPLPRLMHHGFITPVPLHYVRNHGAVPKANWSDWSIEITGLVKRPAKFTMEELISEFPSREFPVTLVCAGNRRKEQNMVKQTIGFNWGSAGVSTSLWKGIPLSEILRRCGIYSRRGGALNVCFEGAEDLPGGGGSKYGTSIKKEMAMDPARDIILAYMQNGELLTPDHGFPVRVIVPGFIGGRMVKWLKRIIVTPQESDSYYHYKDNRVLPSLVDAELANSEAWWYKPEYIINELNINSVITTPGHAEILPINAFTTQKPYTLKGYAYSGGGKKVTRVEVTLDGGDTWSVCELDHQEKPNKYGKFWCWCFWSLDVEVLDLLSAKDVAVRAWDESFNTQPDKLIWNLMGMMNNCWFRIRTNVCKPHRGEIGIVFEHPTRPGNQSGGWMAKERQLEISSESNNTLKKSVSSPFMNTASKMYSISEVRKHNTADSAWIIVHGHIYDCTRFLKDHPGGTDSILINAGTDCTEEFEAIHSDKAKKLLEDYRIGELITTGYDSSPNVSVHGASNFGPLLAPIKELTPQKNIALVNPREKIPVRLIEKTSISHDVRKFRFALPSEDQQLGLPVGKHVFVCANINDKLCLRAYTPTSAIDAVGHIDLVVKVYFKDVHPRFPNGGLMSQHLDSLPIGSMIDIKGPLGHIEYKGKGNFLVSGKPKFAKKLAMLAGGTGITPIYQIIQSILSDPEDETEMYVVYANRTEDDILVREELEGWASKHKERLKIWYVVEIAKEGWSYSTGFITEAVLREHIPEGLEGESLALACGPPPMIQFALQPNLEKMGYNVKEDLLIF

SEQ ID NO: 90894 - DNA, 1092 bp, Arabidopsis thaliana
  misc_feature (1)..(1092): Ceres Seq. ID no. 12725663
  misc_feature (1)..(1092): Ortholog of  Ceres SEQ ID NO 13596816 as cited in SEQ ID NO 62287
atgttcctcatagctacgcttctttttctttcagccagattaaccaccgccggaaatatgaattccttcgccggagtatgttatggaagaaatggagacaatctcccatctccagccaaaactgtgtctctatacaagaaaataaacgtcggtgggataagactctacgagcctttccctgacctcatcgtctcattacaaggaactggtcttcttgtagccatcggaccaagaaacgaagcaatcaaaacattagccgaagaataccaatttgccttaaattgggataaaacatttatagcaccatacaaaaacgtagctttcaattggataaccgtgggaaacgaagtgatagaaggagagatcggacgttacgtgccacaagccatgaaaaatataaaagctgcgttgaccgaaatcggaaactcaaagatccacgtcaccactgtcatatccacagccgcactcgctaactcttacccaccatcagccggagtatttaaaccggcaataaccgaacttataaccgaaatcgtatcgattcttagctctaccgattcaccgctcatggtcaacgtttacccttatttcgcttacgcatcagaccctagccacgtgtcactggaatacgcaacgttccgttcgacttcaccggtagtgaccgacggaaaataccaatacacaaatatattcgatgcaacgttggatgctttcaacgtggcattagagaagatcaaccacggaagcgtgaaggtctacgtagcggagaccggttggcctactagagggaatgatccatacacaagcgtggagaacgctcgtgcttataaccaggggttgcttaagaaactaaccacaggtaagggtacgccaaggcggcccaatgttccagtgataacttttttcttcgaaatgttcaatgaagatttgaaacaaggagcggttgaacaaagcttcggattcttcgatcctaatatggctcctgtctacgatatgtggaatatagctaggacaagtaacgctagtcctagttgggttatttggactaattgggttatttggactatgctcataactagattgttttattaa

SEQ ID NO: 90895 - protein, 363 aa, Arabidopsis thaliana
  peptide (1)..(363): Ceres Seq. ID no. 12725664
MFLIATLLFLSARLTTAGNMNSFAGVCYGRNGDNLPSPAKTVSLYKKINVGGIRLYEPFPDLIVSLQGTGLLVAIGPRNEAIKTLAEEYQFALNWDKTFIAPYKNVAFNWITVGNEVIEGEIGRYVPQAMKNIKAALTEIGNSKIHVTTVISTAALANSYPPSAGVFKPAITELITEIVSILSSTDSPLMVNVYPYFAYASDPSHVSLEYATFRSTSPVVTDGKYQYTNIFDATLDAFNVALEKINHGSVKVYVAETGWPTRGNDPYTSVENARAYNQGLLKKLTTGKGTPRRPNVPVITFFFEMFNEDLKQGAVEQSFGFFDPNMAPVYDMWNIARTSNASPSWVIWTNWVIWTMLITRLFY

SEQ ID NO: 90896 - protein, 344 aa, Arabidopsis thaliana
  peptide (1)..(344): Ceres Seq. ID no. 12725665
MNSFAGVCYGRNGDNLPSPAKTVSLYKKINVGGIRLYEPFPDLIVSLQGTGLLVAIGPRNEAIKTLAEEYQFALNWDKTFIAPYKNVAFNWITVGNEVIEGEIGRYVPQAMKNIKAALTEIGNSKIHVTTVISTAALANSYPPSAGVFKPAITELITEIVSILSSTDSPLMVNVYPYFAYASDPSHVSLEYATFRSTSPVVTDGKYQYTNIFDATLDAFNVALEKINHGSVKVYVAETGWPTRGNDPYTSVENARAYNQGLLKKLTTGKGTPRRPNVPVITFFFEMFNEDLKQGAVEQSFGFFDPNMAPVYDMWNIARTSNASPSWVIWTNWVIWTMLITRLFY

SEQ ID NO: 90897 - protein, 234 aa, Arabidopsis thaliana
  peptide (1)..(234): Ceres Seq. ID no. 12725666
MKNIKAALTEIGNSKIHVTTVISTAALANSYPPSAGVFKPAITELITEIVSILSSTDSPLMVNVYPYFAYASDPSHVSLEYATFRSTSPVVTDGKYQYTNIFDATLDAFNVALEKINHGSVKVYVAETGWPTRGNDPYTSVENARAYNQGLLKKLTTGKGTPRRPNVPVITFFFEMFNEDLKQGAVEQSFGFFDPNMAPVYDMWNIARTSNASPSWVIWTNWVIWTMLITRLFY

SEQ ID NO: 90898 - DNA, 954 bp, Arabidopsis thaliana
  misc_feature (1)..(954): Ceres Seq. ID no. 12725679
  misc_feature (1)..(954): Ortholog of  Ceres SEQ ID NO 14311493 as cited in SEQ ID NO 51440
  misc_feature (1)..(954): Ortholog of  Ceres SEQ ID NO 15177312 as cited in SEQ ID NO 52762
atggatcagtcttgttcaaactcagtaaacggattctactcgtttctaaacagatcaatggaagatctcgaaagggtttatatctccaacaacttcatgtccttacagttcctacagagagtcatctgtcttctaagaacctctcactctcatctcacacttcttgtccagaaacttaacctccctgtcggtgacaagtggcttgacgactacatggacgaaacttccaagctttgggacgtctgccacgtcatcaaatccgctatctccaccatcgaaagcttttgctcctccgctatctccatcacctccaccctcgacggccactaccaccaccgtcgtctcctctcccctcagatttcccggcaggtgatacgagcgatatctggatgtaggagagaagcggtggggatagaagaagaaaacagagcattaatggagaatcgtattcaaaggtttcctttttggtcggagcaagttactacgacggggatggagtcttccaagatacagaacggtttcagcggtttcagaggagtgatgaacactatgaagaacataaactcgttacttctcgtgatcttgatgcaaggtcttgtttattacattcccggagacacgacggttccgacggggacgatgatgaggttaaagcagagagtggcggcggaaatggagaggataggggtgaggaaaggaatgatgatgtacgagtataggagaagcaagacggcgatggaggagcttaaggtggagctggaacggcggtgttgcggcggcggaggagaggaggaggcggtggagaaggggttgagagagagaattgagaatttgaaaggaagtgttgggagtttgaggaatggaacagagagtattgttgctcagattgatgatttctttgatgatattgttgatggtaggaaaatgcttttggattattgtagccacaggtga

SEQ ID NO: 90899 - protein, 317 aa, Arabidopsis thaliana
  peptide (1)..(317): Ceres Seq. ID no. 12725680
MDQSCSNSVNGFYSFLNRSMEDLERVYISNNFMSLQFLQRVICLLRTSHSHLTLLVQKLNLPVGDKWLDDYMDETSKLWDVCHVIKSAISTIESFCSSAISITSTLDGHYHHRRLLSPQISRQVIRAISGCRREAVGIEEENRALMENRIQRFPFWSEQVTTTGMESSKIQNGFSGFRGVMNTMKNINSLLLVILMQGLVYYIPGDTTVPTGTMMRLKQRVAAEMERIGVRKGMMMYEYRRSKTAMEELKVELERRCCGGGGEEEAVEKGLRERIENLKGSVGSLRNGTESIVAQIDDFFDDIVDGRKMLLDYCSHR

SEQ ID NO: 90900 - protein, 298 aa, Arabidopsis thaliana
  peptide (1)..(298): Ceres Seq. ID no. 12725681
MEDLERVYISNNFMSLQFLQRVICLLRTSHSHLTLLVQKLNLPVGDKWLDDYMDETSKLWDVCHVIKSAISTIESFCSSAISITSTLDGHYHHRRLLSPQISRQVIRAISGCRREAVGIEEENRALMENRIQRFPFWSEQVTTTGMESSKIQNGFSGFRGVMNTMKNINSLLLVILMQGLVYYIPGDTTVPTGTMMRLKQRVAAEMERIGVRKGMMMYEYRRSKTAMEELKVELERRCCGGGGEEEAVEKGLRERIENLKGSVGSLRNGTESIVAQIDDFFDDIVDGRKMLLDYCSHR

SEQ ID NO: 90901 - protein, 285 aa, Arabidopsis thaliana
  peptide (1)..(285): Ceres Seq. ID no. 12725682
MSLQFLQRVICLLRTSHSHLTLLVQKLNLPVGDKWLDDYMDETSKLWDVCHVIKSAISTIESFCSSAISITSTLDGHYHHRRLLSPQISRQVIRAISGCRREAVGIEEENRALMENRIQRFPFWSEQVTTTGMESSKIQNGFSGFRGVMNTMKNINSLLLVILMQGLVYYIPGDTTVPTGTMMRLKQRVAAEMERIGVRKGMMMYEYRRSKTAMEELKVELERRCCGGGGEEEAVEKGLRERIENLKGSVGSLRNGTESIVAQIDDFFDDIVDGRKMLLDYCSHR

SEQ ID NO: 90902 - DNA, 2091 bp, Arabidopsis thaliana
  misc_feature (1)..(2091): Ceres Seq. ID no. 12725687
  misc_feature (1)..(2091): Ortholog of  Ceres SEQ ID NO 13586013 as cited in SEQ ID NO 1182
agttccctatcacacacttcaataacccacaaagataaaaaaaaaaaaatgggcatagagcttcagaatcaccagagccaccatgaagaagccagtcctgcagaagagcccatgtcacggtggctgataaatacgccggaaccaccaagcatgtggcaagagcttattgggtacataagaacaaatgtcttggccaagaagaaacataagaggaacaagacgaagaactcatcatcaaaccttgtttactcttgtcttaaatcggctttccctatacttagttggggaagacaatacaaactcaacttgttcaagaaagatttgatggcaggtctcactctcgctagtctttgcattcctcagagtataggatatgctaatttggctggacttgatccagagtacggtctatatacaagtgtggtaccacctctgatatattcgacgatgggaacttcgagagagttagccattggtcctgtggctgtagtttcgcttcttctgtcgtcaatggttcgtgaccttcaagatccagtcaccgacccaattgcttaccgaaaaattgtcttcactgtcacgtttttcgctggcgcgtttcaagccatctttggactcttcaggttagggtttttggtggactttttgtcacatgctgcacttgttgggttcatggctggtgctgcaattgtcattggtttacaacaacttaaaggtttatttggtttgactcattttaccaataaaaccgatgtagtttcggttttatcttcggttttccactcgcttcaccatccgtggcaacctctgaactttgtcatcggtagctcattcctcatcttcatcctcctagctagatttatcggaaaaagaaacaataagttgttttggattccagcgatggcaccgctaatatcagttgtattagcaacactaatagtgtatttatccaatgctgagtcacgaggggttaagattgttaaacacattaaaccagggtttaaccagctttcagttaaccaattacaattcaaaagtccacatcttggtcaaatcgccaaaattggtcttatttctgcaatcatcgccctaacggaagcaatcgcagtgggaagatcgtttgcgacgatcaaaggatatcgtttggatgggaacaaagagatgatggctatgggatttatgaatatcgctggttctttatcttcttgctatgtagctaccgggtctttctcaagaacggcggtgaatttcagtgctggttgcgagacggtggtttcaaacattgtaatggcgattacagtgatgatttcactagaagttttgacgaggtttctctacttcacaccaacggcgattcttgcctccataatcctctcggcgcttccaggtctcattgatgtctctggtgctttacacatttggaaactcgataaactcgattttctcgtcctcattgccgccttcttcggcgtcctctttgcctccgtcgagatcggtcttcttctcgccgtggggatatcgtttgcaagaataatgttgagttcgataagaccaagcattgaggccttagggaggttatcaaaaacagatatcttcggtgacataaatcagtatccaatggcaaataagactgcaggattattgactcttcgaatcagttctcctttgctatgctttgctaatgccaattttataagagacagaatattgaattcagttcaagaaatagaaggagaggagaatgaacaagaagttctaaaagaaaatggtcttcaagtagtaattctcgacatgtcttgcgtgatgggcgtagatacatcaggagtatttgcacttgaagaactacatcaagagctagcttctaatgacatccggttagtcatcgctagtcccagatggagggtacttcacaaattgaagcgagcaaaattggacgagaaaataaagacagaaaatatatatatgacagtaggagaagccgtagatatttatgtaagagcaagatctacgtcccacgagttgtgttgatatatatatgtaagaaacagtacaactcaaacatataacctagtgataattttattgttttctcat

SEQ ID NO: 90903 - protein, 674 aa, Arabidopsis thaliana
  peptide (1)..(674): Ceres Seq. ID no. 12725688
SSLSHTSITHKDKKKKMGIELQNHQSHHEEASPAEEPMSRWLINTPEPPSMWQELIGYIRTNVLAKKKHKRNKTKNSSSNLVYSCLKSAFPILSWGRQYKLNLFKKDLMAGLTLASLCIPQSIGYANLAGLDPEYGLYTSVVPPLIYSTMGTSRELAIGPVAVVSLLLSSMVRDLQDPVTDPIAYRKIVFTVTFFAGAFQAIFGLFRLGFLVDFLSHAALVGFMAGAAIVIGLQQLKGLFGLTHFTNKTDVVSVLSSVFHSLHHPWQPLNFVIGSSFLIFILLARFIGKRNNKLFWIPAMAPLISVVLATLIVYLSNAESRGVKIVKHIKPGFNQLSVNQLQFKSPHLGQIAKIGLISAIIALTEAIAVGRSFATIKGYRLDGNKEMMAMGFMNIAGSLSSCYVATGSFSRTAVNFSAGCETVVSNIVMAITVMISLEVLTRFLYFTPTAILASIILSALPGLIDVSGALHIWKLDKLDFLVLIAAFFGVLFASVEIGLLLAVGISFARIMLSSIRPSIEALGRLSKTDIFGDINQYPMANKTAGLLTLRISSPLLCFANANFIRDRILNSVQEIEGEENEQEVLKENGLQVVILDMSCVMGVDTSGVFALEELHQELASNDIRLVIASPRWRVLHKLKRAKLDEKIKTENIYMTVGEAVDIYVRARSTSHELC

SEQ ID NO: 90904 - protein, 658 aa, Arabidopsis thaliana
  peptide (1)..(658): Ceres Seq. ID no. 12725689
MGIELQNHQSHHEEASPAEEPMSRWLINTPEPPSMWQELIGYIRTNVLAKKKHKRNKTKNSSSNLVYSCLKSAFPILSWGRQYKLNLFKKDLMAGLTLASLCIPQSIGYANLAGLDPEYGLYTSVVPPLIYSTMGTSRELAIGPVAVVSLLLSSMVRDLQDPVTDPIAYRKIVFTVTFFAGAFQAIFGLFRLGFLVDFLSHAALVGFMAGAAIVIGLQQLKGLFGLTHFTNKTDVVSVLSSVFHSLHHPWQPLNFVIGSSFLIFILLARFIGKRNNKLFWIPAMAPLISVVLATLIVYLSNAESRGVKIVKHIKPGFNQLSVNQLQFKSPHLGQIAKIGLISAIIALTEAIAVGRSFATIKGYRLDGNKEMMAMGFMNIAGSLSSCYVATGSFSRTAVNFSAGCETVVSNIVMAITVMISLEVLTRFLYFTPTAILASIILSALPGLIDVSGALHIWKLDKLDFLVLIAAFFGVLFASVEIGLLLAVGISFARIMLSSIRPSIEALGRLSKTDIFGDINQYPMANKTAGLLTLRISSPLLCFANANFIRDRILNSVQEIEGEENEQEVLKENGLQVVILDMSCVMGVDTSGVFALEELHQELASNDIRLVIASPRWRVLHKLKRAKLDEKIKTENIYMTVGEAVDIYVRARSTSHELC

SEQ ID NO: 90905 - protein, 637 aa, Arabidopsis thaliana
  peptide (1)..(637): Ceres Seq. ID no. 12725690
MSRWLINTPEPPSMWQELIGYIRTNVLAKKKHKRNKTKNSSSNLVYSCLKSAFPILSWGRQYKLNLFKKDLMAGLTLASLCIPQSIGYANLAGLDPEYGLYTSVVPPLIYSTMGTSRELAIGPVAVVSLLLSSMVRDLQDPVTDPIAYRKIVFTVTFFAGAFQAIFGLFRLGFLVDFLSHAALVGFMAGAAIVIGLQQLKGLFGLTHFTNKTDVVSVLSSVFHSLHHPWQPLNFVIGSSFLIFILLARFIGKRNNKLFWIPAMAPLISVVLATLIVYLSNAESRGVKIVKHIKPGFNQLSVNQLQFKSPHLGQIAKIGLISAIIALTEAIAVGRSFATIKGYRLDGNKEMMAMGFMNIAGSLSSCYVATGSFSRTAVNFSAGCETVVSNIVMAITVMISLEVLTRFLYFTPTAILASIILSALPGLIDVSGALHIWKLDKLDFLVLIAAFFGVLFASVEIGLLLAVGISFARIMLSSIRPSIEALGRLSKTDIFGDINQYPMANKTAGLLTLRISSPLLCFANANFIRDRILNSVQEIEGEENEQEVLKENGLQVVILDMSCVMGVDTSGVFALEELHQELASNDIRLVIASPRWRVLHKLKRAKLDEKIKTENIYMTVGEAVDIYVRARSTSHELC

SEQ ID NO: 90906 - DNA, 2158 bp, Arabidopsis thaliana
  misc_feature (1)..(2158): Ceres Seq. ID no. 12725691
  misc_feature (1)..(2158): Ortholog of  Ceres SEQ ID NO 13586013 as cited in SEQ ID NO 1182
acacttaaaagtcatctttcaacccaattatctctatcctttctcctgagttacatagctatgtcgtcaagagctcaccctgtggacggaagtccggcgacggacggtggacatgttccgatgaaaccttcacccactcggcataaagttggaatcccaccaaagcaaaacatgttcaaggatttcatgtacacattcaaagaaactttctttcatgatgatcctcttagggattttaaggatcagcctaagtctaagcagtttatgctcggtctccaatccgtcttcccggtcttcgattggggacgtaactacactttcaagaagttccgaggtgatctcatctccggtttaaccattgcaagtctctgcattcctcaggatattggatacgctaagttggcgaatcttgatcccaaatacggtttatattcgagttttgttcctccattggtgtatgcttgtatgggaagttctagggatatagcaataggacctgtcgctgtggtttcgctgttgctaggcacattgcttcgagctgagattgatccaaacacaagtccagatgaatatctccgccttgccttcactgctacgtttttcgccggtataaccgaagcagcccttggattcttcagattaggattcttgatcgatttcctttcccacgcggctgtggttggcttcatgggcggcgcagccatcactatcgctcttcagcagcttaaaggcttcctcgggatcaagaaattcaccaagaaaactgatattatttctgttcttgaatccgttttcaaagcagctcatcacggctggaattggcagactatactcattggtgcatcattcttgaccttccttctcacgtctaagatcattgggaagaagagcaagaaactattctgggtaccagctattgcgccattgatatcagttatcgtttccaccttctttgtctacataacccgagccgacaaacaaggagtccaaatcgtgaaacaccttgaccaaggaatcaacccttcctcgttccatctaatctacttcactggtgataaccttgctaagggcatccgcatcggtgtagtcgctggcatggtcgctttaacagaagctgtagcgattggaagaacctttgctgcaatgaaagactaccaaatcgacggtaacaaagagatggtagcattaggtatgatgaacgtagttggatcgatgtcttcttgctacgtagctaccggatctttctcaagatcagctgtcaatttcatggctggatgtcaaacagcggtttcaaacatcataatgtcaattgttgttctcttgacattgctcttccttactcctctcttcaagtacactccaaacgccatcctcgcagctatcatcatcaacgctgtgattcctttgatcgatatccaagctgctattttgatcttcaaggttgataagctcgatttcatcgcctgtattggagcattctttggcgtcatctttgtttctgttgagatcggacttcttattgccgtctcgatctcgtttgctaagatcctcttgcaagtaacaagacctagaactgcagttctcggaaatattccaagaacttcggtttacagaaatattcaacagtatcctgaagccactatggttccaggggttcttactattcgtgttgactccgccatttacttctccaactcaaattatgttagagaaaggatccagagatggctacatgaggaagaagaaaaggtaaaagcagcaagcctacctaggattcagtttctcatcatcgaaatgtcacctgttacggacatcgatacaagtggtattcacgcattagaagacttatacaagtctctccagaaaagagacattcagttgattctggcgaatcctggaccgttggtgataggcaagctacacttgtcgcactttgccgacatgttaggacaagacaatatctatctaacggtggctgatgccgtcgaggcttgctgtccaaaactctccaacgaggtctgaaatttacaagaaagaagaagaagaagaaaatgaagataatgacgaagaagaagaaagatatgctcttttaaatgttgtaacagtagagttaagaaagtgattgtatttctttggaccctttctttatgattcttct

SEQ ID NO: 90907 - protein, 673 aa, Arabidopsis thaliana
  peptide (1)..(673): Ceres Seq. ID no. 12725692
TLKSHLSTQLSLSFLLSYIAMSSRAHPVDGSPATDGGHVPMKPSPTRHKVGIPPKQNMFKDFMYTFKETFFHDDPLRDFKDQPKSKQFMLGLQSVFPVFDWGRNYTFKKFRGDLISGLTIASLCIPQDIGYAKLANLDPKYGLYSSFVPPLVYACMGSSRDIAIGPVAVVSLLLGTLLRAEIDPNTSPDEYLRLAFTATFFAGITEAALGFFRLGFLIDFLSHAAVVGFMGGAAITIALQQLKGFLGIKKFTKKTDIISVLESVFKAAHHGWNWQTILIGASFLTFLLTSKIIGKKSKKLFWVPAIAPLISVIVSTFFVYITRADKQGVQIVKHLDQGINPSSFHLIYFTGDNLAKGIRIGVVAGMVALTEAVAIGRTFAAMKDYQIDGNKEMVALGMMNVVGSMSSCYVATGSFSRSAVNFMAGCQTAVSNIIMSIVVLLTLLFLTPLFKYTPNAILAAIIINAVIPLIDIQAAILIFKVDKLDFIACIGAFFGVIFVSVEIGLLIAVSISFAKILLQVTRPRTAVLGNIPRTSVYRNIQQYPEATMVPGVLTIRVDSAIYFSNSNYVRERIQRWLHEEEEKVKAASLPRIQFLIIEMSPVTDIDTSGIHALEDLYKSLQKRDIQLILANPGPLVIGKLHLSHFADMLGQDNIYLTVADAVEACCPKLSNEV

SEQ ID NO: 90908 - protein, 653 aa, Arabidopsis thaliana
  peptide (1)..(653): Ceres Seq. ID no. 12725693
MSSRAHPVDGSPATDGGHVPMKPSPTRHKVGIPPKQNMFKDFMYTFKETFFHDDPLRDFKDQPKSKQFMLGLQSVFPVFDWGRNYTFKKFRGDLISGLTIASLCIPQDIGYAKLANLDPKYGLYSSFVPPLVYACMGSSRDIAIGPVAVVSLLLGTLLRAEIDPNTSPDEYLRLAFTATFFAGITEAALGFFRLGFLIDFLSHAAVVGFMGGAAITIALQQLKGFLGIKKFTKKTDIISVLESVFKAAHHGWNWQTILIGASFLTFLLTSKIIGKKSKKLFWVPAIAPLISVIVSTFFVYITRADKQGVQIVKHLDQGINPSSFHLIYFTGDNLAKGIRIGVVAGMVALTEAVAIGRTFAAMKDYQIDGNKEMVALGMMNVVGSMSSCYVATGSFSRSAVNFMAGCQTAVSNIIMSIVVLLTLLFLTPLFKYTPNAILAAIIINAVIPLIDIQAAILIFKVDKLDFIACIGAFFGVIFVSVEIGLLIAVSISFAKILLQVTRPRTAVLGNIPRTSVYRNIQQYPEATMVPGVLTIRVDSAIYFSNSNYVRERIQRWLHEEEEKVKAASLPRIQFLIIEMSPVTDIDTSGIHALEDLYKSLQKRDIQLILANPGPLVIGKLHLSHFADMLGQDNIYLTVADAVEACCPKLSNEV

SEQ ID NO: 90909 - protein, 633 aa, Arabidopsis thaliana
  peptide (1)..(633): Ceres Seq. ID no. 12725694
MKPSPTRHKVGIPPKQNMFKDFMYTFKETFFHDDPLRDFKDQPKSKQFMLGLQSVFPVFDWGRNYTFKKFRGDLISGLTIASLCIPQDIGYAKLANLDPKYGLYSSFVPPLVYACMGSSRDIAIGPVAVVSLLLGTLLRAEIDPNTSPDEYLRLAFTATFFAGITEAALGFFRLGFLIDFLSHAAVVGFMGGAAITIALQQLKGFLGIKKFTKKTDIISVLESVFKAAHHGWNWQTILIGASFLTFLLTSKIIGKKSKKLFWVPAIAPLISVIVSTFFVYITRADKQGVQIVKHLDQGINPSSFHLIYFTGDNLAKGIRIGVVAGMVALTEAVAIGRTFAAMKDYQIDGNKEMVALGMMNVVGSMSSCYVATGSFSRSAVNFMAGCQTAVSNIIMSIVVLLTLLFLTPLFKYTPNAILAAIIINAVIPLIDIQAAILIFKVDKLDFIACIGAFFGVIFVSVEIGLLIAVSISFAKILLQVTRPRTAVLGNIPRTSVYRNIQQYPEATMVPGVLTIRVDSAIYFSNSNYVRERIQRWLHEEEEKVKAASLPRIQFLIIEMSPVTDIDTSGIHALEDLYKSLQKRDIQLILANPGPLVIGKLHLSHFADMLGQDNIYLTVADAVEACCPKLSNEV

SEQ ID NO: 90910 - DNA, 1588 bp, Arabidopsis thaliana
  misc_feature (1)..(1588): Ceres Seq. ID no. 12725707
  misc_feature (1)..(1588): Ortholog of  Ceres SEQ ID NO 13587235 as cited in SEQ ID NO 0
aaccacacaaagcttgttcttctccttccttctccaatttcgtaagctcaaagatttcgatttcgattttgattattgccaaaggtttaaagatggatattttcgacaactctgatcttgaataccttgttgatgaatttcacgctgatttcgatgatgatgagccctttggagaggttgatgtcaccagtgagtctgattccgatttcatggactccgattttgatttcgagctgagtgagagtaagacgaacaatgaaacatcagcgttagaagctaggaatggaaaagatattcaagggattccatgggagagcttgaattacacgagggatagataccgtgagaatagattgctgcactataaaaactttgagagtctgtttcgatccagagaagagcttgataaggaatgcttgcaagtagagaaaggaaagaacttttatgactttcagttcaatacaaggcttgtcaagtccacaatagcgcattttcagctgaggaacttggtatgggcaacatcaaagcacgatgtgtatttcatgaacaactactctctcatgcactggtcatctttgttgcaaaggggcaaagaagtacttaatgtggcaaagcccattgttccttcaatgaagcagcatggatcgttgtcacagtctgtatcaagagtccagataagcaccatggcagttaaagacgatttgaagttgcgggagggttccaaggagagcttatctgtaagaaaatcaacgaacctgaggttgctttctgcactaaactaacatcagctgataacgacatcaccaattcggttgacatctacaacgcacctagtggctcgttaagggttatgaccgcgaacaatgactgtactgtccggctatttgatgccacaaactttgccttgctcaacagatttgcctttcactggtctgtaaataacatctccaccagtccagatggtaagctagtggctgttctaggagacagtcctgagtgcttactagcagataccggatctggaaaagtgatccacggactcgaaggccatctcgactactcgttttcatcagcatggcacccaaacggtcaaatcttagccacgggtaaccaagacacaacctgtagactatgggacgtaaggaacctgtctcaatcactcaaagtcttgaaaggaaacatgggagctatcagagccttgaggttcacgtctgatggacggttcttagccatggctgagccagcggactttgtacacttgtttgacacggaagctggttacagtcagtgtcaagagattgatctgtttggagaaatagcgggaatctcgtttagccccgacacggaggcactgttcgtgggagtagctgatcgtacgtacggcagcttgttggagtttaacaggaagcgaaaccactcgtatgttgattccatattctgatctgactccaatcgttagaagcaaattaaggagctatatgtatgtgtgagattatggttgtagtggctgttggagggattaaaagtcgttgtttttgtgactttccctttgtcatgtttatgtggttttaggaattccatgtttggt

SEQ ID NO: 90911 - protein, 259 aa, Arabidopsis thaliana
  peptide (1)..(259): Ceres Seq. ID no. 12725708
PHKACSSPSFSNFVSSKISISILIIAKGLKMDIFDNSDLEYLVDEFHADFDDDEPFGEVDVTSESDSDFMDSDFDFELSESKTNNETSALEARNGKDIQGIPWESLNYTRDRYRENRLLHYKNFESLFRSREELDKECLQVEKGKNFYDFQFNTRLVKSTIAHFQLRNLVWATSKHDVYFMNNYSLMHWSSLLQRGKEVLNVAKPIVPSMKQHGSLSQSVSRVQISTMAVKDDLKLREGSKESLSVRKSTNLRLLSALN

SEQ ID NO: 90912 - protein, 229 aa, Arabidopsis thaliana
  peptide (1)..(229): Ceres Seq. ID no. 12725709
MDIFDNSDLEYLVDEFHADFDDDEPFGEVDVTSESDSDFMDSDFDFELSESKTNNETSALEARNGKDIQGIPWESLNYTRDRYRENRLLHYKNFESLFRSREELDKECLQVEKGKNFYDFQFNTRLVKSTIAHFQLRNLVWATSKHDVYFMNNYSLMHWSSLLQRGKEVLNVAKPIVPSMKQHGSLSQSVSRVQISTMAVKDDLKLREGSKESLSVRKSTNLRLLSALN

SEQ ID NO: 90913 - protein, 196 aa, Arabidopsis thaliana
  peptide (1)..(196): Ceres Seq. ID no. 12725710
MTANNDCTVRLFDATNFALLNRFAFHWSVNNISTSPDGKLVAVLGDSPECLLADTGSGKVIHGLEGHLDYSFSSAWHPNGQILATGNQDTTCRLWDVRNLSQSLKVLKGNMGAIRALRFTSDGRFLAMAEPADFVHLFDTEAGYSQCQEIDLFGEIAGISFSPDTEALFVGVADRTYGSLLEFNRKRNHSYVDSIF

SEQ ID NO: 90914 - DNA, 588 bp, Arabidopsis thaliana
  misc_feature (1)..(588): Ceres Seq. ID no. 12725711
  misc_feature (1)..(588): Ortholog of  Ceres SEQ ID NO 14310639 as cited in SEQ ID NO 53858
  misc_feature (1)..(588): Ortholog of  Ceres SEQ ID NO 14312851 as cited in SEQ ID NO 58364
atgactgcaatgcttgccatgactcagcatcgtcgcaagaaggttccaatcatcttgcacaacgagagtgtaaaggcgaaaacttggagtcatgttttcagcgaagaaactagaaaacaatctatcccggttatagcggcttggcaactgaatgagagaatgtatggagagttgcagggtttgaacaagaaagaaacagcggaaagatacgggacacaacaagttcacgaatggcgcaggagttacgaaattcctcctccgaaaggcgagagcttggagatgtgtgctgagagagcagtggcttattttgaagacaatatcaaaccagagcttgcatctggaaacaatgtaatgattgctgctcacgggaactcattgagatctatcattatgtatcttgacgatttaacttctcaggaggttacaactctagacctgtccacaggtgtaccattgctctacatcttcaaagaaggcaagttcatgaaacgaggaagccccgtcggttctactgaagctggtgtctatgcttatacaaagagattggcacaatacagagagaagcttgatgcggcggcgaccatttaa

SEQ ID NO: 90915 - protein, 195 aa, Arabidopsis thaliana
  peptide (1)..(195): Ceres Seq. ID no. 12725712
MTAMLAMTQHRRKKVPIILHNESVKAKTWSHVFSEETRKQSIPVIAAWQLNERMYGELQGLNKKETAERYGTQQVHEWRRSYEIPPPKGESLEMCAERAVAYFEDNIKPELASGNNVMIAAHGNSLRSIIMYLDDLTSQEVTTLDLSTGVPLLYIFKEGKFMKRGSPVGSTEAGVYAYTKRLAQYREKLDAAATI

SEQ ID NO: 90916 - protein, 192 aa, Arabidopsis thaliana
  peptide (1)..(192): Ceres Seq. ID no. 12725713
MLAMTQHRRKKVPIILHNESVKAKTWSHVFSEETRKQSIPVIAAWQLNERMYGELQGLNKKETAERYGTQQVHEWRRSYEIPPPKGESLEMCAERAVAYFEDNIKPELASGNNVMIAAHGNSLRSIIMYLDDLTSQEVTTLDLSTGVPLLYIFKEGKFMKRGSPVGSTEAGVYAYTKRLAQYREKLDAAATI

SEQ ID NO: 90917 - protein, 189 aa, Arabidopsis thaliana
  peptide (1)..(189): Ceres Seq. ID no. 12725714
MTQHRRKKVPIILHNESVKAKTWSHVFSEETRKQSIPVIAAWQLNERMYGELQGLNKKETAERYGTQQVHEWRRSYEIPPPKGESLEMCAERAVAYFEDNIKPELASGNNVMIAAHGNSLRSIIMYLDDLTSQEVTTLDLSTGVPLLYIFKEGKFMKRGSPVGSTEAGVYAYTKRLAQYREKLDAAATI

SEQ ID NO: 90918 - DNA, 1823 bp, Arabidopsis thaliana
  misc_feature (1)..(1823): Ceres Seq. ID no. 12725715
  misc_feature (1)..(1823): Ortholog of  Ceres SEQ ID NO 15227289 as cited in SEQ ID NO 58851
  misc_feature (1)..(1823): Ortholog of  Ceres SEQ ID NO 13584416 as cited in SEQ ID NO 63441
atcggtgaggttgagagtaattcactacacacacacaaaaaataaattgagtgcctcccccaaaaacaaaattggtagataacgagcaattgttttttttcagatttgatcctgaatttttacatttttttttttgcaatctccccctaatctgttgtttctcgcttcttcttctgttaatcatctgtctttcaaaaagaaagaaaaaagaaaaattcgatttctgggtttgtttttgtcatacagaaaaaaatcaagcttatgaatttgtgtttaattttttgttttaatttgaaaggcaggttttttcagaacgagatcgttttttcaaatttcttctgattttacctctttttttcttcttagattttagtgaatcgagggtgaaatttttgattccctcttttcggatctacacagaggttgcttatttcaaaccttttagatccatttttttttaattttctcggaaaaatccctgtttctttacttttttataagtctcaggttcaattttttcggattcaaatttttattttaaatggcagctgctatgaatttgtacacttgtagcagatcgtttcaagactctggtggtgaactcatggacgcgcttgtaccttttatcaaaagcgtttccgattctccttcttcttcttctgcagcgtctgcgtctgcgtttcttcacccctctgcgttttctctccctcctctccccggttattacccggattcaacgttcttgacccaaccgttttcatacgggtcggatcttcaacaaaccgggtcattaatcggactcaacaacctctcttcttctcagatccaccagatccagtctcagatccatcatcctcttcctccgacgcatcacaacaacaacaactctttctcgaatcttctcagcccaaagccgttactgatgaagcaatctggagtcgctggatcttgtttcgcttacggttcaggtgttccttcgaagccgacgaagctttacagaggtgtgaggcaacgtcactggggaaaatgggtggctgagatccgtttgccgagaaatcggactcgtctctggcttgggacttttgacacggcggaggaagctgcgttggcctatgataaggcggcgtacaagctgcgcggcgatttcgcccggcttaacttccctaacctacgtcataacggatctcacatcggaggcgatttcggtgaatataaacctcttcactcctcagtcgacgctaagcttgaagctatttgtaaaagcatggcggagactcagaaacaggacaaatcgacgaaatcatcgaagaaacgtgagaagaaggtttcgtcgccagatctatcggagaaagtgaaggcggaggagaattcggtttcgatcggtggatctccaccggtgacggagtttgaagagtccaccgctggatcttcgccgttgtcggacttgacgttcgctgacccggaggagccgccgcagtggaacgagacgttctcgttggagaagtatccgtcgtacgagatcgattgggattcgattctagcttaggggcaaaataggaaattcagccgcttgcaatggagtttttgtgaaattgcatgactggcccaagagtaattaattaaatatggattagtgttaaatttcgtatgttaatatttgtattatggtttgtattagtctctctgtgtcggtccagcttgcggttttttgtcaggctcgaccatgccacagttttcattttatgtaatctttttttcttttgtcttatgtaatttgtagcttcagtttcttcatctataatgcaattttattatgattatgt

SEQ ID NO: 90919 - protein, 334 aa, Arabidopsis thaliana
  peptide (1)..(334): Ceres Seq. ID no. 12725716
MAAAMNLYTCSRSFQDSGGELMDALVPFIKSVSDSPSSSSAASASAFLHPSAFSLPPLPGYYPDSTFLTQPFSYGSDLQQTGSLIGLNNLSSSQIHQIQSQIHHPLPPTHHNNNNSFSNLLSPKPLLMKQSGVAGSCFAYGSGVPSKPTKLYRGVRQRHWGKWVAEIRLPRNRTRLWLGTFDTAEEAALAYDKAAYKLRGDFARLNFPNLRHNGSHIGGDFGEYKPLHSSVDAKLEAICKSMAETQKQDKSTKSSKKREKKVSSPDLSEKVKAEENSVSIGGSPPVTEFEESTAGSSPLSDLTFADPEEPPQWNETFSLEKYPSYEIDWDSILA

SEQ ID NO: 90920 - protein, 330 aa, Arabidopsis thaliana
  peptide (1)..(330): Ceres Seq. ID no. 12725717
MNLYTCSRSFQDSGGELMDALVPFIKSVSDSPSSSSAASASAFLHPSAFSLPPLPGYYPDSTFLTQPFSYGSDLQQTGSLIGLNNLSSSQIHQIQSQIHHPLPPTHHNNNNSFSNLLSPKPLLMKQSGVAGSCFAYGSGVPSKPTKLYRGVRQRHWGKWVAEIRLPRNRTRLWLGTFDTAEEAALAYDKAAYKLRGDFARLNFPNLRHNGSHIGGDFGEYKPLHSSVDAKLEAICKSMAETQKQDKSTKSSKKREKKVSSPDLSEKVKAEENSVSIGGSPPVTEFEESTAGSSPLSDLTFADPEEPPQWNETFSLEKYPSYEIDWDSILA

SEQ ID NO: 90921 - protein, 313 aa, Arabidopsis thaliana
  peptide (1)..(313): Ceres Seq. ID no. 12725718
MDALVPFIKSVSDSPSSSSAASASAFLHPSAFSLPPLPGYYPDSTFLTQPFSYGSDLQQTGSLIGLNNLSSSQIHQIQSQIHHPLPPTHHNNNNSFSNLLSPKPLLMKQSGVAGSCFAYGSGVPSKPTKLYRGVRQRHWGKWVAEIRLPRNRTRLWLGTFDTAEEAALAYDKAAYKLRGDFARLNFPNLRHNGSHIGGDFGEYKPLHSSVDAKLEAICKSMAETQKQDKSTKSSKKREKKVSSPDLSEKVKAEENSVSIGGSPPVTEFEESTAGSSPLSDLTFADPEEPPQWNETFSLEKYPSYEIDWDSILA

SEQ ID NO: 90922 - DNA, 2816 bp, Arabidopsis thaliana
  misc_feature (1)..(2816): Ceres Seq. ID no. 12725735
  misc_feature (1)..(2816): Ortholog of  Ceres SEQ ID NO 15174591 as cited in SEQ ID NO 53383
aattcattttttgtttgttttggtttaaataattcagtgtctcacgagctgtgtcgagattggatccatacaaaatctgcacgacgcctgcttcttcactctctcccactgttccagcttcaactctcttgatatacagagagagatagagataaagagagagagagtgagagtgatagctctcggagaaattgaagaagacacaatctgattagtattctccaatattccatcaactttttgctgagggaaatctccagatttataatcgtttgtatatatatatatacagagcagcgtagaaaaggatcttagatttatagcagcaacaaaaaaatgtcaatgccactacaacgtggcatctctggagtacgagtttctgatagcagtgatgatttgagagactctcaaatgaaagacaaaactgaaagagctcgttctactgagaacaacaacttaaccttaaggtttccttttggtttcctctttagtaatcaatcttcttccaaacacggtggtggtggcgaaaacggtttttctgctgatccatatagtgcaagaagcaggcatagattgatgttgttgtttctcaagatcagtttggttcttattgtggttattgctcttgctggttctttctggtggactatttccatttcgacttcttccagaggtcatgtatatcacaattataggaggttacaggagcagcttgtttcagacttatgggatattggggagatttctcttggtcctaataggtggaaggagcttgaatattgtaatatagaatctgagaattttgtcccttgctttaatgtttctgagaatcttgctctgggttactccaatggtgatgaaaatgatcggttttgtgggcctggatcaaagcaagaatgtttagagttgccaccggtgaaatatcgagtccctcttaggtggccgactggtaaagatataatctggcattctaatgttaagattactgctcaagaagttgtgtcttctggtagcataaccaagaggatgatgatgatggaagatgatcagatatctttcaggtcagcatctcctatgtctgatgaggttgaagactattcccatcagatcgctgaaatgatcgggattaagaaggataacttcatagaagctggtgtgagaactatcttggatattggatgtggttatggtagctttggggcacatctattgtccaaacagattttaactatgtgcatagcaaactacgaagcttcgggtagccaagttcagctaacactcgaaaggggtcttcctgcaatgattggctcttttatatcaaagcaattgccatatccttctctttcctttgatatgttgcattgcttaagatgtggcattgattgggaccagaaaggtaacagtttaatgacaccccagaatgatttttttcatgtccttaacccgatggaagatccaactttactgtttcaatctgctgtgtagatgggcttctccttgtagaaattgacagggttctcaagcccggtggttactttgtatggacatctccgctcacaaaccctcgtaacaaggatcatcttaaaagatggaactttgttcatgattttgctgaaagcatctgttggactcttttaaatcagcaagatgagacagttgtctggaaaaagactatcaacaccaaatgttatagttcccggaaacctggagtgggcccttctgtgtgtaccaaagggcacgatgttgagtctccttattacaggccgcttcagatgtgtataggtggaacacgtagccggaggtggattcccattgaaggcaggacaagatggcctagccggtctaacatgaacaagactgaactttcattatatggtcttcaccccgaggtgcttggagaggatgctgagaactggaagataacagtgagagaatactggtctctcttgtctcctctgatattctctgatcatccaaaaagacccggcgatgaagatccatcaccgccttataacatgctcagaaacgtactggatatgaatgctcaattcggtggtctcaattccgccttgttggaagcaagaaaatcagtctgggtcatgaatgtggtccctacagctggacctaaccacctccccatgatacttgaccgtggctttgtcggagttttgcacaactggtgtgaaccattcccgacttacccgagaacatatgacctggtacatgcagacaatctcttgtcgcttcagacaagtcagccccgaaaaacatgtctacttattgatatattcacagagattgaccgattgcttcgtccagagggatgggtgataatccgtgacacggcacagctggtggaaaaggcgagagagacgataacgcagttgaagtgggaagctcgagtaatagaggttgaaagcagcagtgaacaaagacttctcatctgccaaaaaccattcaccaagcgacaatcaatctgaagaagaagaagaacatagacacaggtttttctccacttttttaatttttttgttccaatgcctcacattttggaatcaaatcatccaacttgtgttggcgatacggggaagaaaggaggaagagatgaaatatatatcccgccggggacgtaagaccgccggtgaaatttctttatctggttccgtgagttcccattttacagaatctagattttttttttctttacaactttggttctataacaactcttattatacagcgaaaaaagaatatgattcaatatttgtgaagatgtttatgaaataagttcaaagctttttagtaaattttcactg

SEQ ID NO: 90923 - protein, 382 aa, Arabidopsis thaliana
  peptide (1)..(382): Ceres Seq. ID no. 12725736
MSMPLQRGISGVRVSDSSDDLRDSQMKDKTERARSTENNNLTLRFPFGFLFSNQSSSKHGGGGENGFSADPYSARSRHRLMLLFLKISLVLIVVIALAGSFWWTISISTSSRGHVYHNYRRLQEQLVSDLWDIGEISLGPNRWKELEYCNIESENFVPCFNVSENLALGYSNGDENDRFCGPGSKQECLELPPVKYRVPLRWPTGKDIIWHSNVKITAQEVVSSGSITKRMMMMEDDQISFRSASPMSDEVEDYSHQIAEMIGIKKDNFIEAGVRTILDIGCGYGSFGAHLLSKQILTMCIANYEASGSQVQLTLERGLPAMIGSFISKQLPYPSLSFDMLHCLRCGIDWDQKGNSLMTPQNDFFHVLNPMEDPTLLFQSAV

SEQ ID NO: 90924 - protein, 380 aa, Arabidopsis thaliana
  peptide (1)..(380): Ceres Seq. ID no. 12725737
MPLQRGISGVRVSDSSDDLRDSQMKDKTERARSTENNNLTLRFPFGFLFSNQSSSKHGGGGENGFSADPYSARSRHRLMLLFLKISLVLIVVIALAGSFWWTISISTSSRGHVYHNYRRLQEQLVSDLWDIGEISLGPNRWKELEYCNIESENFVPCFNVSENLALGYSNGDENDRFCGPGSKQECLELPPVKYRVPLRWPTGKDIIWHSNVKITAQEVVSSGSITKRMMMMEDDQISFRSASPMSDEVEDYSHQIAEMIGIKKDNFIEAGVRTILDIGCGYGSFGAHLLSKQILTMCIANYEASGSQVQLTLERGLPAMIGSFISKQLPYPSLSFDMLHCLRCGIDWDQKGNSLMTPQNDFFHVLNPMEDPTLLFQSAV

SEQ ID NO: 90925 - protein, 357 aa, Arabidopsis thaliana
  peptide (1)..(357): Ceres Seq. ID no. 12725738
MKDKTERARSTENNNLTLRFPFGFLFSNQSSSKHGGGGENGFSADPYSARSRHRLMLLFLKISLVLIVVIALAGSFWWTISISTSSRGHVYHNYRRLQEQLVSDLWDIGEISLGPNRWKELEYCNIESENFVPCFNVSENLALGYSNGDENDRFCGPGSKQECLELPPVKYRVPLRWPTGKDIIWHSNVKITAQEVVSSGSITKRMMMMEDDQISFRSASPMSDEVEDYSHQIAEMIGIKKDNFIEAGVRTILDIGCGYGSFGAHLLSKQILTMCIANYEASGSQVQLTLERGLPAMIGSFISKQLPYPSLSFDMLHCLRCGIDWDQKGNSLMTPQNDFFHVLNPMEDPTLLFQSAV

SEQ ID NO: 90926 - DNA, 669 bp, Arabidopsis thaliana
  misc_feature (1)..(669): Ceres Seq. ID no. 12725743
  misc_feature (1)..(669): Ortholog of  Ceres SEQ ID NO 14304209 as cited in SEQ ID NO 56460
  misc_feature (1)..(669): Ortholog of  Ceres SEQ ID NO 15177482 as cited in SEQ ID NO 0
atggcagccgaagtgatccttctcggtttctggccgagcatgttcggaatgaggacgatgatcgcgttagaggagaaaggagtgaagtatgagtatagagaagaggatgtgatcaataacaagagtcccttgctactagagatgaatccgattcacaagacaatcccggttctcatccacaatggtaaaccggttcttgaatcccttatccaaatccaatatatagacgaggtttggtctgacaacaactcatttctcccttctgatccttaccatagagctcaagctttattttgggccgatttcatcgacaagaaggaacagttgtatgtttgtgggaggaagacttgggcaacgaaaggtgaggagctagaagcagccaataaagagtttattgaaatactcaagactcttcaatgtgagctcggagaaaaaccttactttggcggcgataaattcgggtttgtagacattgtcctgattggattctatagttggtttccagcataccagaagtttggtaacttcagcatcgaaccagagtgtttgaagctgattgcttggggaaaaagatgtatgcaaagagagagtgtggctaaagctttgcctgattctgagaaagttgttggatacgttttacagcttaagaagttatatggaattgagtaa

SEQ ID NO: 90927 - protein, 222 aa, Arabidopsis thaliana
  peptide (1)..(222): Ceres Seq. ID no. 12725744
MAAEVILLGFWPSMFGMRTMIALEEKGVKYEYREEDVINNKSPLLLEMNPIHKTIPVLIHNGKPVLESLIQIQYIDEVWSDNNSFLPSDPYHRAQALFWADFIDKKEQLYVCGRKTWATKGEELEAANKEFIEILKTLQCELGEKPYFGGDKFGFVDIVLIGFYSWFPAYQKFGNFSIEPECLKLIAWGKRCMQRESVAKALPDSEKVVGYVLQLKKLYGIE

SEQ ID NO: 90928 - protein, 209 aa, Arabidopsis thaliana
  peptide (1)..(209): Ceres Seq. ID no. 12725745
MFGMRTMIALEEKGVKYEYREEDVINNKSPLLLEMNPIHKTIPVLIHNGKPVLESLIQIQYIDEVWSDNNSFLPSDPYHRAQALFWADFIDKKEQLYVCGRKTWATKGEELEAANKEFIEILKTLQCELGEKPYFGGDKFGFVDIVLIGFYSWFPAYQKFGNFSIEPECLKLIAWGKRCMQRESVAKALPDSEKVVGYVLQLKKLYGIE

SEQ ID NO: 90929 - protein, 206 aa, Arabidopsis thaliana
  peptide (1)..(206): Ceres Seq. ID no. 12725746
MRTMIALEEKGVKYEYREEDVINNKSPLLLEMNPIHKTIPVLIHNGKPVLESLIQIQYIDEVWSDNNSFLPSDPYHRAQALFWADFIDKKEQLYVCGRKTWATKGEELEAANKEFIEILKTLQCELGEKPYFGGDKFGFVDIVLIGFYSWFPAYQKFGNFSIEPECLKLIAWGKRCMQRESVAKALPDSEKVVGYVLQLKKLYGIE

SEQ ID NO: 90930 - DNA, 1200 bp, Arabidopsis thaliana
  misc_feature (1)..(1200): Ceres Seq. ID no. 12725773
  misc_feature (1)..(1200): Ortholog of  Ceres SEQ ID NO 12636774 as cited in SEQ ID NO 372
  misc_feature (1)..(1200): Ortholog of  Ceres SEQ ID NO 14311866 as cited in SEQ ID NO 51178
  misc_feature (1)..(1200): Ortholog of  Ceres SEQ ID NO 12582113 as cited in SEQ ID NO 58349
  misc_feature (1)..(1200): Ortholog of  Ceres SEQ ID NO 15175861 as cited in SEQ ID NO 59381
  misc_feature (1)..(1200): Ortholog of  Ceres SEQ ID NO 12615466 as cited in SEQ ID NO 62761
  misc_feature (1)..(1200): Ortholog of  Ceres SEQ ID NO 13597295 as cited in SEQ ID NO 63743
  misc_feature (1)..(1200): Ortholog of  Ceres SEQ ID NO 12617090 as cited in SEQ ID NO 64005
  misc_feature (1)..(1200): Ortholog of  Ceres SEQ ID NO 13597439 as cited in SEQ ID NO 64081
  misc_feature (1)..(1200): Ortholog of  Ceres SEQ ID NO 13597233 as cited in SEQ ID NO 64370
  misc_feature (1)..(1200): Ortholog of  Ceres SEQ ID NO 13598327 as cited in SEQ ID NO 68040
  misc_feature (1)..(1200): Ortholog of  Ceres SEQ ID NO 13599438 as cited in SEQ ID NO 0
gattttctttcacctttctctctgatttcaatttcaatttttgttcgtttttttcttccggaaaattggttgttgggtggatcaaagcttacgagatttgtacttttgttctggtgctacaagtccaatggaggcggaaggagaaaaacagtggagttctctcatagtaccttttgttctagagatagtgaaagagaagaacttcacaactattcctccgaggtatgttcgggttgatcaagaaaaaactgagatcttaaatgattctagtcttagttctgagattccagtcatcgacatgacacggttgtgttctgtttccgccatggattccgagctcaagaagctggatttcgcttgccaagattggggattttttcaattggtaaaccatggaatagactcgtctttcttggaaaaactagagacagaagttcaagaattcttcaatctccctatgaaagagaagcagaagttgtggcagagaagtggtgaatttgaaggatttggacaagtgaacattgtctcggagaatcagaaactcgattggggagacatgtttatcctcaccactgaaccaattcgatcacgtaaatctcacttgttctccaaattacctcctcctttcagagaaactttagagacttactcctctgaagtgaagagcatagctaagattctgtttgcgaaaatggcgagtgttctagagatcaaacacgaagaaatggaagatttgtttgatgatgtttggcaatctatcaagattaattactacccgccatgtccacagccagatcaagttatgggtttgactcaacattcagacgctgcaggtctcacaatactcttacaggtgaatcaagtggaaggacttcagatcaagaaagacggcaagtgggttgtcgtaaaacctcttcgagatgctttagttgttaatgttggcgaaatcttagagatcataacaaacgggagatatcgaagcatcgagcatagagcggtggtgaattcagagaaagagaggttatcggttgcgatgtttcatagtcccggaaaggagacaatcattcgtcctgcgaaaagccttgtagataggcagaagcaatgtttgttcaaaagtatgagcacacaagagtactttgatgccttctttactcaaaaactcaatgggaaatctcaccttgatcttatgcgtatttaagg

SEQ ID NO: 90931 - protein, 356 aa, Arabidopsis thaliana
  peptide (1)..(356): Ceres Seq. ID no. 12725774
MEAEGEKQWSSLIVPFVLEIVKEKNFTTIPPRYVRVDQEKTEILNDSSLSSEIPVIDMTRLCSVSAMDSELKKLDFACQDWGFFQLVNHGIDSSFLEKLETEVQEFFNLPMKEKQKLWQRSGEFEGFGQVNIVSENQKLDWGDMFILTTEPIRSRKSHLFSKLPPPFRETLETYSSEVKSIAKILFAKMASVLEIKHEEMEDLFDDVWQSIKINYYPPCPQPDQVMGLTQHSDAAGLTILLQVNQVEGLQIKKDGKWVVVKPLRDALVVNVGEILEIITNGRYRSIEHRAVVNSEKERLSVAMFHSPGKETIIRPAKSLVDRQKQCLFKSMSTQEYFDAFFTQKLNGKSHLDLMRI

SEQ ID NO: 90932 - protein, 299 aa, Arabidopsis thaliana
  peptide (1)..(299): Ceres Seq. ID no. 12725775
MTRLCSVSAMDSELKKLDFACQDWGFFQLVNHGIDSSFLEKLETEVQEFFNLPMKEKQKLWQRSGEFEGFGQVNIVSENQKLDWGDMFILTTEPIRSRKSHLFSKLPPPFRETLETYSSEVKSIAKILFAKMASVLEIKHEEMEDLFDDVWQSIKINYYPPCPQPDQVMGLTQHSDAAGLTILLQVNQVEGLQIKKDGKWVVVKPLRDALVVNVGEILEIITNGRYRSIEHRAVVNSEKERLSVAMFHSPGKETIIRPAKSLVDRQKQCLFKSMSTQEYFDAFFTQKLNGKSHLDLMRI

SEQ ID NO: 90933 - protein, 290 aa, Arabidopsis thaliana
  peptide (1)..(290): Ceres Seq. ID no. 12725776
MDSELKKLDFACQDWGFFQLVNHGIDSSFLEKLETEVQEFFNLPMKEKQKLWQRSGEFEGFGQVNIVSENQKLDWGDMFILTTEPIRSRKSHLFSKLPPPFRETLETYSSEVKSIAKILFAKMASVLEIKHEEMEDLFDDVWQSIKINYYPPCPQPDQVMGLTQHSDAAGLTILLQVNQVEGLQIKKDGKWVVVKPLRDALVVNVGEILEIITNGRYRSIEHRAVVNSEKERLSVAMFHSPGKETIIRPAKSLVDRQKQCLFKSMSTQEYFDAFFTQKLNGKSHLDLMRI

SEQ ID NO: 90934 - DNA, 2571 bp, Arabidopsis thaliana
  misc_feature (1)..(2571): Ceres Seq. ID no. 12725777
  misc_feature (1)..(2571): Ortholog of  Ceres SEQ ID NO 13593911 as cited in SEQ ID NO 52935
atggccgttgatgcggctgaccggcgagaagttatcgtcaaaatcgacggtgaaaacggaaacaacaatggagtctccggagagactgtaggaaagatatggagagacggaagctacgatttttggactgatggtgaaggtaacctcaacaaaggtcataatgctgcggcggttgattctgatagatccgccgccacgacgggggagcaacaaaaagatgagggttttgagtttcgtcgcggcgaagatcctcccacgaagctgattggtcagtttctccataaacagcaagcttccggtgagatttgtttagatatggacttaggtatggacgagcttcaatctagaggtttaactccggtatcggaatctccgagagtttctacaaaacgtgaccccgtgggaagacgagacagtcgcagtaataccaacaataacgatgatggagaagttgtcaagtgtagtggtaataatgctccgattcagagaagctctagcactttacttaagatgagaactaggtcacgtctttcggatccgccaacgcctcagttgccgccgcaaacggcggatatgaagtcgggtcggattccgaaatccgggcagatgaaatcaggtttttttggaaaaagccctaagactcaaggtgaggaagaagaagatgatccatttgcagcagaggatttaccagaagagtataggaaagataaacttagtctatggattgtgttggaatggttgagtttgattttgattatagctgggtttgtttgcactcttgcgataccttccttgcgtaagaagaaactctgggaacttcagctatggaaatgggagtcaatggttttagtgttgatctgtggtaggttagtctcgagctggattgtgaagattgttgtcttctttatcgaaaggaactttcttttgaggaaaagagttttgtatttcgtttatggtgtccgaaaagcggtgcagaattgcttatggttaggacttgttttactggcttggcatttcttgtttgatgagaaagtggctaaagcagcaaacactaaggcgcttcgtgttgtgactaagatctttgtgtgtttgttggttgggttcttgttgtggctcgtgaagacactgttggtcaaagttcttgcttcatcgtttcatatgagcacttacttcgataggattcaagagtctttgtttactcagtatgtgattgagacgctctcgggtcctcctttgattgagatccaaaaaaatgaggaagaggaagagagaatcagtgttgaggttaagaagtttcaaaatccagggggtgttgagattcagtcaggagctcagaaaagtccaatgaagaccgggaaaagcccgtttctctctcatgttctatctaatggaggagggggaggaggagaaaacaaagggattacgatcgatagccttcataagctgaatcctaagaatgtttccgcatggaaaatgaagaggctgatgaatataatccggaatggatcacttaccactttggatgaacagcttcaggatccaagcttggatgatgataaaggaaaccaaattagaagtgagtttgaggcaaagctcgctgcaagaaagatctttcataatgttgctaagccaggatcaaagttcatctatgcaaacgacataatgcggtttctgccagatgacgaagctttgaagactttaagtctctttgaaggagcatctgagacgaacaggatcagcaagtcatctcttaaaaactgggtggtgaatgcttttagagagagaagagctcttgcattgaccctaaacgacaccaaaacagcagtaaacaggcttcacaagatggtgaatatcgtggttgggatcatcatacttgttatctggcttatcatacttggaatcacttccaccaaattcctcgtcgtcatgagctcgcaagtcgtggttgtagcattcatatttggaaacatgtgcaagatagtatttgaatctatcatctacttgtttgtgatacatccgtttgatgtaggcgatcgatgtgaaattgatggagtccagatggttgtggaagagatgaacatattgacaacagttttcttgagatttgataaccagaaagtcgtgtacccgaacagtcttctctggactaaatccatcggaaattattaccgtagtcctgatatgggagatggtatcgaattctccatccacattactactccagctgagaaaatcatactcatcaaacagagaatcacaagttacattgagggcaagaaggatcattggtatccagcgccaatgatagtattcaaagacatggagtcattaaacagcgtgagaattgcggtttggccaacacatcgaatgaatcatcaagatatgggagagaaatgggctcgaaggtctcaacttgttgaagagattgccaaaatttgcagagagcttgacattgagtatagattgtatcctcttgatatcaatgtccgaaacttgcccacttctacggctttgcctgtttccgaccgtcttccaccaaactggagtgctccagcttctggcagcaactga

SEQ ID NO: 90935 - protein, 856 aa, Arabidopsis thaliana
  peptide (1)..(856): Ceres Seq. ID no. 12725778
MAVDAADRREVIVKIDGENGNNNGVSGETVGKIWRDGSYDFWTDGEGNLNKGHNAAAVDSDRSAATTGEQQKDEGFEFRRGEDPPTKLIGQFLHKQQASGEICLDMDLGMDELQSRGLTPVSESPRVSTKRDPVGRRDSRSNTNNNDDGEVVKCSGNNAPIQRSSSTLLKMRTRSRLSDPPTPQLPPQTADMKSGRIPKSGQMKSGFFGKSPKTQGEEEEDDPFAAEDLPEEYRKDKLSLWIVLEWLSLILIIAGFVCTLAIPSLRKKKLWELQLWKWESMVLVLICGRLVSSWIVKIVVFFIERNFLLRKRVLYFVYGVRKAVQNCLWLGLVLLAWHFLFDEKVAKAANTKALRVVTKIFVCLLVGFLLWLVKTLLVKVLASSFHMSTYFDRIQESLFTQYVIETLSGPPLIEIQKNEEEEERISVEVKKFQNPGGVEIQSGAQKSPMKTGKSPFLSHVLSNGGGGGGENKGITIDSLHKLNPKNVSAWKMKRLMNIIRNGSLTTLDEQLQDPSLDDDKGNQIRSEFEAKLAARKIFHNVAKPGSKFIYANDIMRFLPDDEALKTLSLFEGASETNRISKSSLKNWVVNAFRERRALALTLNDTKTAVNRLHKMVNIVVGIIILVIWLIILGITSTKFLVVMSSQVVVVAFIFGNMCKIVFESIIYLFVIHPFDVGDRCEIDGVQMVVEEMNILTTVFLRFDNQKVVYPNSLLWTKSIGNYYRSPDMGDGIEFSIHITTPAEKIILIKQRITSYIEGKKDHWYPAPMIVFKDMESLNSVRIAVWPTHRMNHQDMGEKWARRSQLVEEIAKICRELDIEYRLYPLDINVRNLPTSTALPVSDRLPPNWSAPASGSN

SEQ ID NO: 90936 - protein, 751 aa, Arabidopsis thaliana
  peptide (1)..(751): Ceres Seq. ID no. 12725779
MDLGMDELQSRGLTPVSESPRVSTKRDPVGRRDSRSNTNNNDDGEVVKCSGNNAPIQRSSSTLLKMRTRSRLSDPPTPQLPPQTADMKSGRIPKSGQMKSGFFGKSPKTQGEEEEDDPFAAEDLPEEYRKDKLSLWIVLEWLSLILIIAGFVCTLAIPSLRKKKLWELQLWKWESMVLVLICGRLVSSWIVKIVVFFIERNFLLRKRVLYFVYGVRKAVQNCLWLGLVLLAWHFLFDEKVAKAANTKALRVVTKIFVCLLVGFLLWLVKTLLVKVLASSFHMSTYFDRIQESLFTQYVIETLSGPPLIEIQKNEEEEERISVEVKKFQNPGGVEIQSGAQKSPMKTGKSPFLSHVLSNGGGGGGENKGITIDSLHKLNPKNVSAWKMKRLMNIIRNGSLTTLDEQLQDPSLDDDKGNQIRSEFEAKLAARKIFHNVAKPGSKFIYANDIMRFLPDDEALKTLSLFEGASETNRISKSSLKNWVVNAFRERRALALTLNDTKTAVNRLHKMVNIVVGIIILVIWLIILGITSTKFLVVMSSQVVVVAFIFGNMCKIVFESIIYLFVIHPFDVGDRCEIDGVQMVVEEMNILTTVFLRFDNQKVVYPNSLLWTKSIGNYYRSPDMGDGIEFSIHITTPAEKIILIKQRITSYIEGKKDHWYPAPMIVFKDMESLNSVRIAVWPTHRMNHQDMGEKWARRSQLVEEIAKICRELDIEYRLYPLDINVRNLPTSTALPVSDRLPPNWSAPASGSN

SEQ ID NO: 90937 - protein, 747 aa, Arabidopsis thaliana
  peptide (1)..(747): Ceres Seq. ID no. 12725780
MDELQSRGLTPVSESPRVSTKRDPVGRRDSRSNTNNNDDGEVVKCSGNNAPIQRSSSTLLKMRTRSRLSDPPTPQLPPQTADMKSGRIPKSGQMKSGFFGKSPKTQGEEEEDDPFAAEDLPEEYRKDKLSLWIVLEWLSLILIIAGFVCTLAIPSLRKKKLWELQLWKWESMVLVLICGRLVSSWIVKIVVFFIERNFLLRKRVLYFVYGVRKAVQNCLWLGLVLLAWHFLFDEKVAKAANTKALRVVTKIFVCLLVGFLLWLVKTLLVKVLASSFHMSTYFDRIQESLFTQYVIETLSGPPLIEIQKNEEEEERISVEVKKFQNPGGVEIQSGAQKSPMKTGKSPFLSHVLSNGGGGGGENKGITIDSLHKLNPKNVSAWKMKRLMNIIRNGSLTTLDEQLQDPSLDDDKGNQIRSEFEAKLAARKIFHNVAKPGSKFIYANDIMRFLPDDEALKTLSLFEGASETNRISKSSLKNWVVNAFRERRALALTLNDTKTAVNRLHKMVNIVVGIIILVIWLIILGITSTKFLVVMSSQVVVVAFIFGNMCKIVFESIIYLFVIHPFDVGDRCEIDGVQMVVEEMNILTTVFLRFDNQKVVYPNSLLWTKSIGNYYRSPDMGDGIEFSIHITTPAEKIILIKQRITSYIEGKKDHWYPAPMIVFKDMESLNSVRIAVWPTHRMNHQDMGEKWARRSQLVEEIAKICRELDIEYRLYPLDINVRNLPTSTALPVSDRLPPNWSAPASGSN

SEQ ID NO: 90938 - DNA, 1080 bp, Arabidopsis thaliana
  misc_feature (1)..(1080): Ceres Seq. ID no. 12725789
  misc_feature (1)..(1080): Ortholog of  Ceres SEQ ID NO 15171556 as cited in SEQ ID NO 59687
  misc_feature (1)..(1080): Ortholog of  Ceres SEQ ID NO 13659033 as cited in SEQ ID NO 66372
  misc_feature (1)..(1080): Ortholog of  Ceres SEQ ID NO 12625899 as cited in SEQ ID NO 69079
atgaatttccatcaggtcctctttctccttcttcttatttttcttgttgatttatcagattatggtgtcttagcagataagaccaatgatggttacaagaacgcaacaaagtgtaacatttaccaaggacgttggatttatgacaattcttctaatcctctttatggaacatcaacttgtccgttcattggattggattgccagaagtttggtcggccggacaagaactaccttcattaccgatggcaacccaccggatgtgacatcccaagattcaacggacgagatttcttaacaagattcaaagggaaaaaaatactgtttgtgggagattcactaagcaacaatatgtgggtgtcactaagttgcatgcttcacgcggccgttcctaacgctaagtataccttccaactcaacaagggcctctcaactttcaccattccagaatatggaatatctgtaaatttcctgaaaaatgggttcctggtggatttggtatcggacaaaacaagaggattgattctgaaattagattcgatcagtaggggaaatcaatggttgggatctgatgtcgccatctttaacacattccactggtggtctcacactggccgtgccaaaacatgggattattttcaaacgggagataaaatagtgaaagagatgaatagaatggaggctttcaagattgctttgacaacttggtctaaatggattgatcacaatatcgatccttcaaaaactagggttttctatcaaggcgtctctcccgttcacttaaatggtggtgaatggggtaaaccggggaagacttgcttgggtgagacggtaccagtgcaaggaccaagttaccccggacgacctaatgaaggtgaagctatagtgaaaagtgtgatcggaaggatggctaaaccagtggagctccttgatgtgacggctatgacggagatgaggaaggacggtcacccttccatctatgccggtggaggcgatcgcttaaacgactgcagccattggtgcctccctggagtcccagacgcttggaaccagctcctttatacagctcttctcagccactag

SEQ ID NO: 90939 - protein, 359 aa, Arabidopsis thaliana
  peptide (1)..(359): Ceres Seq. ID no. 12725790
MNFHQVLFLLLLIFLVDLSDYGVLADKTNDGYKNATKCNIYQGRWIYDNSSNPLYGTSTCPFIGLDCQKFGRPDKNYLHYRWQPTGCDIPRFNGRDFLTRFKGKKILFVGDSLSNNMWVSLSCMLHAAVPNAKYTFQLNKGLSTFTIPEYGISVNFLKNGFLVDLVSDKTRGLILKLDSISRGNQWLGSDVAIFNTFHWWSHTGRAKTWDYFQTGDKIVKEMNRMEAFKIALTTWSKWIDHNIDPSKTRVFYQGVSPVHLNGGEWGKPGKTCLGETVPVQGPSYPGRPNEGEAIVKSVIGRMAKPVELLDVTAMTEMRKDGHPSIYAGGGDRLNDCSHWCLPGVPDAWNQLLYTALLSH

SEQ ID NO: 90940 - protein, 243 aa, Arabidopsis thaliana
  peptide (1)..(243): Ceres Seq. ID no. 12725791
MWVSLSCMLHAAVPNAKYTFQLNKGLSTFTIPEYGISVNFLKNGFLVDLVSDKTRGLILKLDSISRGNQWLGSDVAIFNTFHWWSHTGRAKTWDYFQTGDKIVKEMNRMEAFKIALTTWSKWIDHNIDPSKTRVFYQGVSPVHLNGGEWGKPGKTCLGETVPVQGPSYPGRPNEGEAIVKSVIGRMAKPVELLDVTAMTEMRKDGHPSIYAGGGDRLNDCSHWCLPGVPDAWNQLLYTALLSH

SEQ ID NO: 90941 - protein, 236 aa, Arabidopsis thaliana
  peptide (1)..(236): Ceres Seq. ID no. 12725792
MLHAAVPNAKYTFQLNKGLSTFTIPEYGISVNFLKNGFLVDLVSDKTRGLILKLDSISRGNQWLGSDVAIFNTFHWWSHTGRAKTWDYFQTGDKIVKEMNRMEAFKIALTTWSKWIDHNIDPSKTRVFYQGVSPVHLNGGEWGKPGKTCLGETVPVQGPSYPGRPNEGEAIVKSVIGRMAKPVELLDVTAMTEMRKDGHPSIYAGGGDRLNDCSHWCLPGVPDAWNQLLYTALLSH

SEQ ID NO: 90942 - DNA, 1368 bp, Arabidopsis thaliana
  misc_feature (1)..(1368): Ceres Seq. ID no. 12725820
  misc_feature (1)..(1368): Ortholog of  Ceres SEQ ID NO 15227139 as cited in SEQ ID NO 0
atgggagaagcggcggagcaagcacgtggcttccacgtgaccaccaccaggaagcaagtcatcacggcggctcttcccctccaggaccactggctcccactctcgaacctcgacctcctccttcctcctctcaacgttcacgtttgcttttgctacaagaaaccacttcactttaccaacacagtggcttatgaaaccctcaagactgctttggcagagactctcgtctcctactacgcctttgccggcgagctcgtcaccaatcctaccggagaaccggagatcctctgcaacaaccgtggcgtagatttcgtggaagccggtgctgacgtggagctccgagagcttaacctgtatgatcctgatgaaagtattgccaagctagtccccatcaagaaacatggagtcatagcgatacaggtgactcaactgaaatgtgggagcatagttgtaggctgcacatttgatcatcgtgtagcggacgcgtattccatgaacatgttcctcttatcgtgggccgagatctcacgatcagatgtaccaatctcttgtgtaccatcttttcgaagatctttgctaaacccacgacgaccattggtcatggatccatctatagaccagatttatatgcctgtcacgtccttgccccctccacaggaaaccaccaatccagaaaatctccttgctagccgtatctattacatcaaagcaaacgcattacaagagctccaaactctagccagcagttcgaagaacggtaaaaggacaaaacttgaatcattcagcgcgtttctatggaaactcgtggcagaacacgctgcaaaagatccagtcccgatcaagacctcgaaactcgggatcgttgtggatggaaggaggagacttatggagaaagaaaacaatacttacttcggaaacgttctctcagtcccatttggtgggcagagaatcgatgacttgatcagcaagccactatcttgggtgaccgaagaggttcacagattcttgaagaaatcagtgaccaaagaacatttcttgaatttgatcgattgggttgagacttgccgaccaacacctgcggtttcaagaatctacagcgtcggatccgacgatggacctgcgtttgtggtttcttccggaaggagttttccagtgaaccaagtggatttcgggtggggctcaccggttttcggatcttaccatttcccatggggaggcagcgccggatacgttatgccgatgcccagttcagtggacgacagagattggatggtttacttgcaccttacgaaaggacagttgaggttcattgaggaagaggcttctcatgtgcttaaacctattgacaatgattatctcaagatttga

SEQ ID NO: 90943 - protein, 455 aa, Arabidopsis thaliana
  peptide (1)..(455): Ceres Seq. ID no. 12725821
MGEAAEQARGFHVTTTRKQVITAALPLQDHWLPLSNLDLLLPPLNVHVCFCYKKPLHFTNTVAYETLKTALAETLVSYYAFAGELVTNPTGEPEILCNNRGVDFVEAGADVELRELNLYDPDESIAKLVPIKKHGVIAIQVTQLKCGSIVVGCTFDHRVADAYSMNMFLLSWAEISRSDVPISCVPSFRRSLLNPRRPLVMDPSIDQIYMPVTSLPPPQETTNPENLLASRIYYIKANALQELQTLASSSKNGKRTKLESFSAFLWKLVAEHAAKDPVPIKTSKLGIVVDGRRRLMEKENNTYFGNVLSVPFGGQRIDDLISKPLSWVTEEVHRFLKKSVTKEHFLNLIDWVETCRPTPAVSRIYSVGSDDGPAFVVSSGRSFPVNQVDFGWGSPVFGSYHFPWGGSAGYVMPMPSSVDDRDWMVYLHLTKGQLRFIEEEASHVLKPIDNDYLKI

SEQ ID NO: 90944 - protein, 291 aa, Arabidopsis thaliana
  peptide (1)..(291): Ceres Seq. ID no. 12725822
MNMFLLSWAEISRSDVPISCVPSFRRSLLNPRRPLVMDPSIDQIYMPVTSLPPPQETTNPENLLASRIYYIKANALQELQTLASSSKNGKRTKLESFSAFLWKLVAEHAAKDPVPIKTSKLGIVVDGRRRLMEKENNTYFGNVLSVPFGGQRIDDLISKPLSWVTEEVHRFLKKSVTKEHFLNLIDWVETCRPTPAVSRIYSVGSDDGPAFVVSSGRSFPVNQVDFGWGSPVFGSYHFPWGGSAGYVMPMPSSVDDRDWMVYLHLTKGQLRFIEEEASHVLKPIDNDYLKI

SEQ ID NO: 90945 - protein, 289 aa, Arabidopsis thaliana
  peptide (1)..(289): Ceres Seq. ID no. 12725823
MFLLSWAEISRSDVPISCVPSFRRSLLNPRRPLVMDPSIDQIYMPVTSLPPPQETTNPENLLASRIYYIKANALQELQTLASSSKNGKRTKLESFSAFLWKLVAEHAAKDPVPIKTSKLGIVVDGRRRLMEKENNTYFGNVLSVPFGGQRIDDLISKPLSWVTEEVHRFLKKSVTKEHFLNLIDWVETCRPTPAVSRIYSVGSDDGPAFVVSSGRSFPVNQVDFGWGSPVFGSYHFPWGGSAGYVMPMPSSVDDRDWMVYLHLTKGQLRFIEEEASHVLKPIDNDYLKI

SEQ ID NO: 90946 - DNA, 1701 bp, Arabidopsis thaliana
  misc_feature (1)..(1701): Ceres Seq. ID no. 12725828
  misc_feature (1)..(1701): Ortholog of  Ceres SEQ ID NO 13657677 as cited in SEQ ID NO 66119
atggcgtcaccggaatcatcgccgagaaaagccgtaggttttgtttcccacatcccttctggtttccttcatttctcctccgtcagtaaaggtgttgctagggttttagcttcgacccagataacattatcccctaaagactccgcctttaccattactggatccagttggaaacccgatttggattccgggtcgttttctgatgacccgagaagcgacgagccgaatttgagcgatagtttctctcatctagaaagtttagtcacgggagggcataaacccaatgtagctcattctactcagctcttgtacgatctctgcaaagccaatagattgaagaaagccattcgtgtgattgagcttatggttagctccgggattatacccgatgcatctgcttacacgtatttggttaatcagctttgtaaaagaggtaacgttggttatgcgatgcagcttgttgagaaaatggaagatcatggttatccttctaataccgttacttacaatgccttggttcgaggtctttgtatgcttggtagcttaaatcaaagcttacagtttgttgagaggttgatgcagaaaggcttagctccaaatgctttcacttattctttcttgcttgaagcagcttataaagaacgaggaaccgacgaagctgtgaagctcttagatgagatcattgtgaaaggcggtgaacccaatttggttagctataatgtgctgttgactggtttctgtaaagaagggagaacagacgatgccatggcgctgtttagggaattacctgcaaaagggtttaaggcaaatgttgtgagctataacattttgttgaggtgtttgtgctgtgatgggaggtgggaggaagcgaattcgctcttggctgagatggacggtggagatcgagctccttcagttgttacctataacatattgatcaattcgttagcttttcatggaagaacagagcaggcactgcaggttttaaaggagatgagcaaaggaaatcatcagtttagagtcactgccacgagctataatccggtgatcgcccgtctgtgcaaggaaggaaaagttgatcttgttgtgaaatgtctagacgagatgatataccggcgttgtaaaccaaacgaaggaacgtacaatgcaataggttcgttatgcgagcataacagcaaggtgcaggaagcgttttacataatacagagcttaagcaacaagcagaaatgctgcacgcatgatttctacaaaagcgtaatcacgagtctctgcaggaaaggtaacacctttgcagcgttccagctcttgtacgagatgactaggtgcgggtttgatcccgatgcgcacacctactcggctttgatcagagggctgtgtctggaagggatgtttacaggagccatggaggttttgtcgataatggaagagagtgagaattgtaaacctacagtggataactttaacgccatgatcctagggttgtgcaagataaggaggacagatttggcaatggaggtgtttgagatgatggttgagaagaagagaatgccgaatgagacaacatatgcgatactcgttgaagggatagctcatgaggatgaattggagctggctaaagaagttcttgatgagctacgattgcgtaaggttataggacagaacgcagtagataggattgtaatgcagttcaatttagattga

SEQ ID NO: 90947 - protein, 566 aa, Arabidopsis thaliana
  peptide (1)..(566): Ceres Seq. ID no. 12725829
MASPESSPRKAVGFVSHIPSGFLHFSSVSKGVARVLASTQITLSPKDSAFTITGSSWKPDLDSGSFSDDPRSDEPNLSDSFSHLESLVTGGHKPNVAHSTQLLYDLCKANRLKKAIRVIELMVSSGIIPDASAYTYLVNQLCKRGNVGYAMQLVEKMEDHGYPSNTVTYNALVRGLCMLGSLNQSLQFVERLMQKGLAPNAFTYSFLLEAAYKERGTDEAVKLLDEIIVKGGEPNLVSYNVLLTGFCKEGRTDDAMALFRELPAKGFKANVVSYNILLRCLCCDGRWEEANSLLAEMDGGDRAPSVVTYNILINSLAFHGRTEQALQVLKEMSKGNHQFRVTATSYNPVIARLCKEGKVDLVVKCLDEMIYRRCKPNEGTYNAIGSLCEHNSKVQEAFYIIQSLSNKQKCCTHDFYKSVITSLCRKGNTFAAFQLLYEMTRCGFDPDAHTYSALIRGLCLEGMFTGAMEVLSIMEESENCKPTVDNFNAMILGLCKIRRTDLAMEVFEMMVEKKRMPNETTYAILVEGIAHEDELELAKEVLDELRLRKVIGQNAVDRIVMQFNLD

SEQ ID NO: 90948 - protein, 445 aa, Arabidopsis thaliana
  peptide (1)..(445): Ceres Seq. ID no. 12725830
MVSSGIIPDASAYTYLVNQLCKRGNVGYAMQLVEKMEDHGYPSNTVTYNALVRGLCMLGSLNQSLQFVERLMQKGLAPNAFTYSFLLEAAYKERGTDEAVKLLDEIIVKGGEPNLVSYNVLLTGFCKEGRTDDAMALFRELPAKGFKANVVSYNILLRCLCCDGRWEEANSLLAEMDGGDRAPSVVTYNILINSLAFHGRTEQALQVLKEMSKGNHQFRVTATSYNPVIARLCKEGKVDLVVKCLDEMIYRRCKPNEGTYNAIGSLCEHNSKVQEAFYIIQSLSNKQKCCTHDFYKSVITSLCRKGNTFAAFQLLYEMTRCGFDPDAHTYSALIRGLCLEGMFTGAMEVLSIMEESENCKPTVDNFNAMILGLCKIRRTDLAMEVFEMMVEKKRMPNETTYAILVEGIAHEDELELAKEVLDELRLRKVIGQNAVDRIVMQFNLD

SEQ ID NO: 90949 - protein, 416 aa, Arabidopsis thaliana
  peptide (1)..(416): Ceres Seq. ID no. 12725831
MQLVEKMEDHGYPSNTVTYNALVRGLCMLGSLNQSLQFVERLMQKGLAPNAFTYSFLLEAAYKERGTDEAVKLLDEIIVKGGEPNLVSYNVLLTGFCKEGRTDDAMALFRELPAKGFKANVVSYNILLRCLCCDGRWEEANSLLAEMDGGDRAPSVVTYNILINSLAFHGRTEQALQVLKEMSKGNHQFRVTATSYNPVIARLCKEGKVDLVVKCLDEMIYRRCKPNEGTYNAIGSLCEHNSKVQEAFYIIQSLSNKQKCCTHDFYKSVITSLCRKGNTFAAFQLLYEMTRCGFDPDAHTYSALIRGLCLEGMFTGAMEVLSIMEESENCKPTVDNFNAMILGLCKIRRTDLAMEVFEMMVEKKRMPNETTYAILVEGIAHEDELELAKEVLDELRLRKVIGQNAVDRIVMQFNLD

SEQ ID NO: 90950 - DNA, 936 bp, Arabidopsis thaliana
  misc_feature (1)..(936): Ceres Seq. ID no. 12725836
  misc_feature (1)..(936): Ortholog of  Ceres SEQ ID NO 12607540 as cited in SEQ ID NO 55336
atgggagatctaatgaactatctcaagaagcttgcttctagcagtagcagcgtctccaacaacacaaagcagaaaaactcaaaactgttgacagtatctgaacgccttaggtgttgccttgtcgccttcaaagtcatgaggagcaacttaaatgccttgaatgttgacttgcaagacttctttgtccaactttacaacctcattctcgagtaccgccctggaagagattcaggtgtaatcttggctgagtctctgaagataatgttgtgcgacgacagacatcaagacatgcaaaaagcagctgcatttgtaaaacgtttagccacattcgcgctatgctttggatgtgccgaatctatgtctgcgctagtcactttgaaaactctgcttcagaagaacgtgaaatgcagaaaccttctagagaacgatgctggaggcggctctgtttccggttcaattgcaaaatatcagccgtatgcaacagatcctaacctaagcggggctttagcaacagtgctttgggaactcagtctcttgagtaaacattatcatcctgcgatctcaacaatggccacaacagtctccaacatgaacacttctcagagccaaacatttctttctgcagtgactccacaacaggcttttgcagatttctctcttgtaaaggaatcgtttgagccgaagaacgagtctcggaaattgaacaacaaacggaaacgggagagtttgcctgaagaagctaagaatgttccggaaatagacatggttaagctcagcaagaaattgaaagagaactttactattcttcgggatataaaagaggacgagagagtgagaatggagttgttgcagtctgaagagaaaaaaccattgaagaaacagaacaacgtggtgaagaagaaacttaagaaccctaaatccaaaaagcaaatttga

SEQ ID NO: 90951 - protein, 311 aa, Arabidopsis thaliana
  peptide (1)..(311): Ceres Seq. ID no. 12725837
MGDLMNYLKKLASSSSSVSNNTKQKNSKLLTVSERLRCCLVAFKVMRSNLNALNVDLQDFFVQLYNLILEYRPGRDSGVILAESLKIMLCDDRHQDMQKAAAFVKRLATFALCFGCAESMSALVTLKTLLQKNVKCRNLLENDAGGGSVSGSIAKYQPYATDPNLSGALATVLWELSLLSKHYHPAISTMATTVSNMNTSQSQTFLSAVTPQQAFADFSLVKESFEPKNESRKLNNKRKRESLPEEAKNVPEIDMVKLSKKLKENFTILRDIKEDERVRMELLQSEEKKPLKKQNNVVKKKLKNPKSKKQI

SEQ ID NO: 90952 - protein, 307 aa, Arabidopsis thaliana
  peptide (1)..(307): Ceres Seq. ID no. 12725838
MNYLKKLASSSSSVSNNTKQKNSKLLTVSERLRCCLVAFKVMRSNLNALNVDLQDFFVQLYNLILEYRPGRDSGVILAESLKIMLCDDRHQDMQKAAAFVKRLATFALCFGCAESMSALVTLKTLLQKNVKCRNLLENDAGGGSVSGSIAKYQPYATDPNLSGALATVLWELSLLSKHYHPAISTMATTVSNMNTSQSQTFLSAVTPQQAFADFSLVKESFEPKNESRKLNNKRKRESLPEEAKNVPEIDMVKLSKKLKENFTILRDIKEDERVRMELLQSEEKKPLKKQNNVVKKKLKNPKSKKQI

SEQ ID NO: 90953 - protein, 266 aa, Arabidopsis thaliana
  peptide (1)..(266): Ceres Seq. ID no. 12725839
MRSNLNALNVDLQDFFVQLYNLILEYRPGRDSGVILAESLKIMLCDDRHQDMQKAAAFVKRLATFALCFGCAESMSALVTLKTLLQKNVKCRNLLENDAGGGSVSGSIAKYQPYATDPNLSGALATVLWELSLLSKHYHPAISTMATTVSNMNTSQSQTFLSAVTPQQAFADFSLVKESFEPKNESRKLNNKRKRESLPEEAKNVPEIDMVKLSKKLKENFTILRDIKEDERVRMELLQSEEKKPLKKQNNVVKKKLKNPKSKKQI

SEQ ID NO: 90954 - DNA, 1143 bp, Arabidopsis thaliana
  misc_feature (1)..(1143): Ceres Seq. ID no. 12725850
  misc_feature (1)..(1143): Ortholog of  Ceres SEQ ID NO 13594037 as cited in SEQ ID NO 55666
  misc_feature (1)..(1143): Ortholog of  Ceres SEQ ID NO 15171501 as cited in SEQ ID NO 58322
atgaaagtcgaagcttttattcccgccgttttattgctctgttttggggtaatgttatgtttaaaaagctcgtgtgcgttgcagataggtaacaataatgagttgaagaattacataagttgggaagatttgagagttgtggaagatggaagaatagagagaagttttagcattaaggagaatagtaattgggtaaccacaaacgctaacgctaacgcgaacgctactaacgtgagaagagtgattgtggttgataaaaacggaggaggagattctgttacagttcaaggagctgttgatatggttcctgattccaattcacagagagttaaaatcttcattcttcctgggatttacagggagaaggtgattgtgccgaaatcaaaaccgtatatttcgttcataggtaatgagagctatgcgggagatacagtgattagttggagcgataaagcttcagaccttggctgcgatggtaaagaactcggcacttatagaaccgcctctgtttccattgaatctgatttcttctgtgctactgccatcacttttgagaacacggtggttgcagaggcaggggaacaggggaggcaagcggtggcgttgagaataattggggacaaagctgtgttctatagagttagggttttgggatcacaagacactctttttgatgacaatggatctcactacttttaccaatgctatatccaaggcaatgtagatttcatctttggcaatgcgaaatcactttaccaggactgtgatatccactcaaccgcaaagagatatggcgcgatcgcggctcatcatagagactcggagactgaagataccgggttctcctttgtgaactgtgatatcagtggtactgggcagatttacttaggaagggcttggggaaactactcaagaactgtttattcaaactgtttcatagctgatattatcactcctgtgggctggagtgactggaaacaccctgagaggcaaaggaaagtgatgttcggggagtacaattgcaggggaagaggagcagagagaggaggccgagtaccgtggtcgaaaactcttaccagagatgaagtgaagccttttctgggaagagagttcatatatggagatcaatggctgagactctaa

SEQ ID NO: 90955 - protein, 380 aa, Arabidopsis thaliana
  peptide (1)..(380): Ceres Seq. ID no. 12725851
MKVEAFIPAVLLLCFGVMLCLKSSCALQIGNNNELKNYISWEDLRVVEDGRIERSFSIKENSNWVTTNANANANATNVRRVIVVDKNGGGDSVTVQGAVDMVPDSNSQRVKIFILPGIYREKVIVPKSKPYISFIGNESYAGDTVISWSDKASDLGCDGKELGTYRTASVSIESDFFCATAITFENTVVAEAGEQGRQAVALRIIGDKAVFYRVRVLGSQDTLFDDNGSHYFYQCYIQGNVDFIFGNAKSLYQDCDIHSTAKRYGAIAAHHRDSETEDTGFSFVNCDISGTGQIYLGRAWGNYSRTVYSNCFIADIITPVGWSDWKHPERQRKVMFGEYNCRGRGAERGGRVPWSKTLTRDEVKPFLGREFIYGDQWLRL

SEQ ID NO: 90956 - protein, 363 aa, Arabidopsis thaliana
  peptide (1)..(363): Ceres Seq. ID no. 12725852
MLCLKSSCALQIGNNNELKNYISWEDLRVVEDGRIERSFSIKENSNWVTTNANANANATNVRRVIVVDKNGGGDSVTVQGAVDMVPDSNSQRVKIFILPGIYREKVIVPKSKPYISFIGNESYAGDTVISWSDKASDLGCDGKELGTYRTASVSIESDFFCATAITFENTVVAEAGEQGRQAVALRIIGDKAVFYRVRVLGSQDTLFDDNGSHYFYQCYIQGNVDFIFGNAKSLYQDCDIHSTAKRYGAIAAHHRDSETEDTGFSFVNCDISGTGQIYLGRAWGNYSRTVYSNCFIADIITPVGWSDWKHPERQRKVMFGEYNCRGRGAERGGRVPWSKTLTRDEVKPFLGREFIYGDQWLRL

SEQ ID NO: 90957 - protein, 280 aa, Arabidopsis thaliana
  peptide (1)..(280): Ceres Seq. ID no. 12725853
MVPDSNSQRVKIFILPGIYREKVIVPKSKPYISFIGNESYAGDTVISWSDKASDLGCDGKELGTYRTASVSIESDFFCATAITFENTVVAEAGEQGRQAVALRIIGDKAVFYRVRVLGSQDTLFDDNGSHYFYQCYIQGNVDFIFGNAKSLYQDCDIHSTAKRYGAIAAHHRDSETEDTGFSFVNCDISGTGQIYLGRAWGNYSRTVYSNCFIADIITPVGWSDWKHPERQRKVMFGEYNCRGRGAERGGRVPWSKTLTRDEVKPFLGREFIYGDQWLRL

SEQ ID NO: 90958 - DNA, 944 bp, Arabidopsis thaliana
  misc_feature (1)..(944): Ceres Seq. ID no. 12725866
  misc_feature (1)..(944): Ortholog of  Ceres SEQ ID NO 13585433 as cited in SEQ ID NO 65192
ctgatcattcgccggagctaccattaagagactgagattcaatcatcagagttcaatggatgtcccgttaccagtcgagaaattatcttatggatcaaacactgaggacaaaacttgtgtagtgcttgtggcaactgggagtttcaatcctcctactttcatgcatttacgcatgtttgagctggcgagagatgaattacgctcaaaaggatttcatgttcttggaggatatatgtctcctgttaatgatgcatataagaagaagattatgtgtagggccttttatctgcagaacatcgtttagagatgtgtaatgtatcatgtcaaagctctgactttgtaatggttgatccgtgggaggcatctcaaagcaactaccaacgaactttgacggttttatcaagggtcaagactttcttaacaacaaatcgacatgtacccgaggaatctctcaaagtcatgctactatgtggctcggatttactgctatctttctgcactcccggtgtttggatccctgaacagttaagaactatttgcaaagattatggcattgtgtgcatccgtagagaaggacaagatgttgaaaatatgatctctggtgacgaaatcttaaacgaaaactgtgctaacgtcaaaatcgttgacaatactgttcctaatcaaatcagttcgagtagattaaggcaatgcatttcgcgagggttatcggttaaatacttgactgaagatggagtaatagattatatcagacaacatcaactatacactgagctcacatgacaaacgctgagaggattattatacttcatcagatcaaatattacaacacaactcatcaaataatggtgtgataaacagatcagatatatttgttgagtctctgtattttaaggttcttatttatcaactctttgtatcatattcatatgtacaacaaatgt

SEQ ID NO: 90959 - protein, 158 aa, Arabidopsis thaliana
  peptide (1)..(158): Ceres Seq. ID no. 12725867
MCNVSCQSSDFVMVDPWEASQSNYQRTLTVLSRVKTFLTTNRHVPEESLKVMLLCGSDLLLSFCTPGVWIPEQLRTICKDYGIVCIRREGQDVENMISGDEILNENCANVKIVDNTVPNQISSSRLRQCISRGLSVKYLTEDGVIDYIRQHQLYTELT

SEQ ID NO: 90960 - protein, 146 aa, Arabidopsis thaliana
  peptide (1)..(146): Ceres Seq. ID no. 12725868
MVDPWEASQSNYQRTLTVLSRVKTFLTTNRHVPEESLKVMLLCGSDLLLSFCTPGVWIPEQLRTICKDYGIVCIRREGQDVENMISGDEILNENCANVKIVDNTVPNQISSSRLRQCISRGLSVKYLTEDGVIDYIRQHQLYTELT

SEQ ID NO: 90961 - protein, 107 aa, Arabidopsis thaliana
  peptide (1)..(107): Ceres Seq. ID no. 12725869
MLLCGSDLLLSFCTPGVWIPEQLRTICKDYGIVCIRREGQDVENMISGDEILNENCANVKIVDNTVPNQISSSRLRQCISRGLSVKYLTEDGVIDYIRQHQLYTELT

SEQ ID NO: 90962 - DNA, 2046 bp, Arabidopsis thaliana
  misc_feature (1)..(2046): Ceres Seq. ID no. 12725870
  misc_feature (1)..(2046): Ortholog of  Ceres SEQ ID NO 13654989 as cited in SEQ ID NO 63117
  misc_feature (1)..(2046): Ortholog of  Ceres SEQ ID NO 13655640 as cited in SEQ ID NO 63844
atgtctctatcaagaaagcttcttgttatcttcttcacatggataacagctctatccatgtcgaaaccaatcttcgtatcatccgataacatgaatttcacattcaaatccttcacaatccgtaacctcacattcctcggagattcacatctccgaaacggtgtcgttgggctcacaagagagctaggtgttcccgatacaagctccggtacagtaatctacaacaatccgatccgtttctacgatccggattcaaacaccacggcgtctttctccactcacttctccttcaccgttcaaaacttaaacccagatccaacctccgccggtgacggactcgctttcttcctctctcacgacaacgatactttaggaagtcccggtggttacttaggtctcgtcaattcctctcagccgatgaagaatcgattcgtcgctatcgaattcgatacgaaattggatcctcatttcaacgatccaaatggtaatcacattggtttagatgttgatagtttgaactcaatctcaacttcagatcctttgctttcgtctcagattgatctcaaatctggtaaatcgataacttcttggatcgattacaagaacgatttacgtttattgaacgtgttcttgagttatacagatccagtcactacaacgaagaagccagagaagcctcttttatcggttaacatcgatctttctccgttcttgaacggtgaaatgtatgtaggattctcaggttcaacagaaggaagcacagagattcatctgatcgagaattggagtttcaagacttctggatttcttccggtgagatcgaaatctaatcatcttcacaatgtttcagatagttctgtggtgaatgatgatcctgttgtgataccgagtaagaagcggaggcatcgacacaatcttgctattggacttggtatttcttgtccggtgttaatctgtttagctctctttgtgtttgggtactttactttgaagaaatggaaaagtgtgaaagcagagaaggagcttaagactgagctaatcactggtttaagagagtttagctataaagagctttacacagctactaaagggtttcattcaagtagagtcattggaagaggagcgtttgggaatgtttacagagctatgtttgtttcctctgggacgatctctgctgtgaaaagatcgaggcataattcaaccgaaggtaaaacagagtttttggcagagttatcgattattgcttgcttgcggcacaagaatcttgttcagttgcagggttggtgtaacgagaaaggtgaattgcttcttgtctatgagttcatgcctaatggaagtcttgataagattctgtatcaagaatcacaaacaggagctgtggcgcttgactggtctcataggctgaatatagcgattggtttagcatcagctttgtcttatcttcaccatgagtgtgagcagcaagtggttcacagagatattaagacgagcaacataatgcttgacataaacttcaacgcaaggctgggagattttggtctagctagactcacggagcatgataagagccctgtctcaactttaaccgctggtacaatgggttacctcgcaccagagtatctccaatacggcacagcgactgagaaaacagatgcttttagctacggagtggtgatcctagaagttgcttgtgggagaaggccaatagataaagaaccagagagtcaaaagacagtgaatctagtggattgggtttggagattgcacagtgaaggaagagttcttgaagctgtggatgagagattgaaaggtgagtttgatgaagaaatgatgaagaaacttttgcttgtgggtcttaaatgtgcccatccagatagtaatgagagaccatctatgagacgtgttcttcagatacttaacaatgagattgagccaagtccggttccgaagatgaaacctacattgtctttctcttgtgggttaagtcttgatgacattgtttcggaagatgaagaaggagacagcatcgtgtacgttgtatcttag

SEQ ID NO: 90963 - protein, 681 aa, Arabidopsis thaliana
  peptide (1)..(681): Ceres Seq. ID no. 12725871
MSLSRKLLVIFFTWITALSMSKPIFVSSDNMNFTFKSFTIRNLTFLGDSHLRNGVVGLTRELGVPDTSSGTVIYNNPIRFYDPDSNTTASFSTHFSFTVQNLNPDPTSAGDGLAFFLSHDNDTLGSPGGYLGLVNSSQPMKNRFVAIEFDTKLDPHFNDPNGNHIGLDVDSLNSISTSDPLLSSQIDLKSGKSITSWIDYKNDLRLLNVFLSYTDPVTTTKKPEKPLLSVNIDLSPFLNGEMYVGFSGSTEGSTEIHLIENWSFKTSGFLPVRSKSNHLHNVSDSSVVNDDPVVIPSKKRRHRHNLAIGLGISCPVLICLALFVFGYFTLKKWKSVKAEKELKTELITGLREFSYKELYTATKGFHSSRVIGRGAFGNVYRAMFVSSGTISAVKRSRHNSTEGKTEFLAELSIIACLRHKNLVQLQGWCNEKGELLLVYEFMPNGSLDKILYQESQTGAVALDWSHRLNIAIGLASALSYLHHECEQQVVHRDIKTSNIMLDINFNARLGDFGLARLTEHDKSPVSTLTAGTMGYLAPEYLQYGTATEKTDAFSYGVVILEVACGRRPIDKEPESQKTVNLVDWVWRLHSEGRVLEAVDERLKGEFDEEMMKKLLLVGLKCAHPDSNERPSMRRVLQILNNEIEPSPVPKMKPTLSFSCGLSLDDIVSEDEEGDSIVYVVS

SEQ ID NO: 90964 - protein, 662 aa, Arabidopsis thaliana
  peptide (1)..(662): Ceres Seq. ID no. 12725872
MSKPIFVSSDNMNFTFKSFTIRNLTFLGDSHLRNGVVGLTRELGVPDTSSGTVIYNNPIRFYDPDSNTTASFSTHFSFTVQNLNPDPTSAGDGLAFFLSHDNDTLGSPGGYLGLVNSSQPMKNRFVAIEFDTKLDPHFNDPNGNHIGLDVDSLNSISTSDPLLSSQIDLKSGKSITSWIDYKNDLRLLNVFLSYTDPVTTTKKPEKPLLSVNIDLSPFLNGEMYVGFSGSTEGSTEIHLIENWSFKTSGFLPVRSKSNHLHNVSDSSVVNDDPVVIPSKKRRHRHNLAIGLGISCPVLICLALFVFGYFTLKKWKSVKAEKELKTELITGLREFSYKELYTATKGFHSSRVIGRGAFGNVYRAMFVSSGTISAVKRSRHNSTEGKTEFLAELSIIACLRHKNLVQLQGWCNEKGELLLVYEFMPNGSLDKILYQESQTGAVALDWSHRLNIAIGLASALSYLHHECEQQVVHRDIKTSNIMLDINFNARLGDFGLARLTEHDKSPVSTLTAGTMGYLAPEYLQYGTATEKTDAFSYGVVILEVACGRRPIDKEPESQKTVNLVDWVWRLHSEGRVLEAVDERLKGEFDEEMMKKLLLVGLKCAHPDSNERPSMRRVLQILNNEIEPSPVPKMKPTLSFSCGLSLDDIVSEDEEGDSIVYVVS

SEQ ID NO: 90965 - protein, 651 aa, Arabidopsis thaliana
  peptide (1)..(651): Ceres Seq. ID no. 12725873
MNFTFKSFTIRNLTFLGDSHLRNGVVGLTRELGVPDTSSGTVIYNNPIRFYDPDSNTTASFSTHFSFTVQNLNPDPTSAGDGLAFFLSHDNDTLGSPGGYLGLVNSSQPMKNRFVAIEFDTKLDPHFNDPNGNHIGLDVDSLNSISTSDPLLSSQIDLKSGKSITSWIDYKNDLRLLNVFLSYTDPVTTTKKPEKPLLSVNIDLSPFLNGEMYVGFSGSTEGSTEIHLIENWSFKTSGFLPVRSKSNHLHNVSDSSVVNDDPVVIPSKKRRHRHNLAIGLGISCPVLICLALFVFGYFTLKKWKSVKAEKELKTELITGLREFSYKELYTATKGFHSSRVIGRGAFGNVYRAMFVSSGTISAVKRSRHNSTEGKTEFLAELSIIACLRHKNLVQLQGWCNEKGELLLVYEFMPNGSLDKILYQESQTGAVALDWSHRLNIAIGLASALSYLHHECEQQVVHRDIKTSNIMLDINFNARLGDFGLARLTEHDKSPVSTLTAGTMGYLAPEYLQYGTATEKTDAFSYGVVILEVACGRRPIDKEPESQKTVNLVDWVWRLHSEGRVLEAVDERLKGEFDEEMMKKLLLVGLKCAHPDSNERPSMRRVLQILNNEIEPSPVPKMKPTLSFSCGLSLDDIVSEDEEGDSIVYVVS

SEQ ID NO: 90966 - DNA, 963 bp, Arabidopsis thaliana
  misc_feature (1)..(963): Ceres Seq. ID no. 12725903
  misc_feature (1)..(963): Ortholog of  Ceres SEQ ID NO 14302306 as cited in SEQ ID NO 62834
  misc_feature (1)..(963): Ortholog of  Ceres SEQ ID NO 14303305 as cited in SEQ ID NO 0
atggcttgcgaaaacaacctcgttgtgaagcaaatcatggacttatacaaccaaatctcaaacctcgagagcttaaaaccatccaagaatgtcgacactttgttcagacaacttgtgtccacgtgcttaccaacggacacgaacatcgatgtcacagagatacacgatgaaaaagtcaaagacatgagatctcatctcatcaagctttgtggtgaagccgaaggttatttagagcaacacttttcagcaatcttaggctcttttgaagacaaccctctaaaccatttacacatcttcccctattacaacaactatctcaaactaggcaaactcgaattcgatctcctatctcaacacacaacccatgtcccgaccaaagtcgcctttattggttccggtccgatgccacttacttccatcgtcttggccaagttccacctccccaacacaacgttccacaacttcgacatcgactcacacgccaacacactcgcttcaaacctcgtttctcgtgattctgacctttccaaacgcatgattttccacacaactgatgtattaaacgctaaggaggggttagaccaatacgatgttgttttcttggcagctcttgttgggatggataaagagtcaaaggtcaaagctattgagcatttagagaagcatatggctcctggagctgtggtgatgctaagaagtgctcatggtcttagagctttcttgtatccaatcgttgactcttgtgatcttaaagggtttgaggtgttaaccatttatcatccgtctgacgacgtggttaattcggtggtcatcgcacgtaagcttggtggttcaaatggagctcgaggcagccagatcggacggtgtgtggttatgccttgtaattgctctaaggtccacgcgatcttgaacaatcgtggtatggagaagaatttgatcgaggagtatagtgccatcgagtaa

SEQ ID NO: 90967 - protein, 320 aa, Arabidopsis thaliana
  peptide (1)..(320): Ceres Seq. ID no. 12725904
MACENNLVVKQIMDLYNQISNLESLKPSKNVDTLFRQLVSTCLPTDTNIDVTEIHDEKVKDMRSHLIKLCGEAEGYLEQHFSAILGSFEDNPLNHLHIFPYYNNYLKLGKLEFDLLSQHTTHVPTKVAFIGSGPMPLTSIVLAKFHLPNTTFHNFDIDSHANTLASNLVSRDSDLSKRMIFHTTDVLNAKEGLDQYDVVFLAALVGMDKESKVKAIEHLEKHMAPGAVVMLRSAHGLRAFLYPIVDSCDLKGFEVLTIYHPSDDVVNSVVIARKLGGSNGARGSQIGRCVVMPCNCSKVHAILNNRGMEKNLIEEYSAIE

SEQ ID NO: 90968 - protein, 308 aa, Arabidopsis thaliana
  peptide (1)..(308): Ceres Seq. ID no. 12725905
MDLYNQISNLESLKPSKNVDTLFRQLVSTCLPTDTNIDVTEIHDEKVKDMRSHLIKLCGEAEGYLEQHFSAILGSFEDNPLNHLHIFPYYNNYLKLGKLEFDLLSQHTTHVPTKVAFIGSGPMPLTSIVLAKFHLPNTTFHNFDIDSHANTLASNLVSRDSDLSKRMIFHTTDVLNAKEGLDQYDVVFLAALVGMDKESKVKAIEHLEKHMAPGAVVMLRSAHGLRAFLYPIVDSCDLKGFEVLTIYHPSDDVVNSVVIARKLGGSNGARGSQIGRCVVMPCNCSKVHAILNNRGMEKNLIEEYSAIE

SEQ ID NO: 90969 - protein, 259 aa, Arabidopsis thaliana
  peptide (1)..(259): Ceres Seq. ID no. 12725906
MRSHLIKLCGEAEGYLEQHFSAILGSFEDNPLNHLHIFPYYNNYLKLGKLEFDLLSQHTTHVPTKVAFIGSGPMPLTSIVLAKFHLPNTTFHNFDIDSHANTLASNLVSRDSDLSKRMIFHTTDVLNAKEGLDQYDVVFLAALVGMDKESKVKAIEHLEKHMAPGAVVMLRSAHGLRAFLYPIVDSCDLKGFEVLTIYHPSDDVVNSVVIARKLGGSNGARGSQIGRCVVMPCNCSKVHAILNNRGMEKNLIEEYSAIE

SEQ ID NO: 90970 - DNA, 2723 bp, Arabidopsis thaliana
  misc_feature (1)..(2723): Ceres Seq. ID no. 12725923
  misc_feature (1)..(2723): Ortholog of  Ceres SEQ ID NO 14304855 as cited in SEQ ID NO 53974
accatttctcctgcaaaaacttttttattccttcttcctctttagtaaacaaatcgatcaaaaatggtctcataattctctctatatcttttatcactttcgaagattcctcttctcgcccacaaatcaaaatcatttcttttgccgactaattgaatttcttagaattcaacatacgcaatgaaaatgttctcgtcacaaagattagactaatccgactgtgtttttaatcaatcatcattttatttaggggagagaagttgtaaagttttgatttttttttctgggttttttctgtgagacccagaagaagaacagagagaggaagaaggagaagaaaaaaatatctctttctctccggctttcaacaaaatctctcttttttccttcatcagtgttaaattcggatccgggtcgggtgggttttcggtttttggtgttcggatcagagcacagttggatgttagcgacggaactgaggatttcagtttgcggctgcggcggctgtgacggtgtttgtgtgtcgtcttcttttatcaatcaggagtttcatcacagtttgatcagagattcagccaaattcttggatactaaatggctggttttgatgaaaatgttgctgtgatgggagaatgggtgcctcgtagtcctagtcccgggacacttttctcctctgctattggagaagagaagagctcgaaacgtgttcttgaaagagagttatctttgaatcatggtcaagttattggtttagaagaagacactagtagtaatcataacaaggattcttcacaaagcaatgtttttcgaggtggtctcagtgaaagaattgctgcaagagctggatttaatgctccaaggttgaacactgagaatatccgcaccaacaccgacttttccattgactctaaccttcgatctccttgcttaaccatctcttctcctggccttagccctgcaacactcttggaatctcctgttttcctttctaacccattggctcaaccttctccaactaccgggaaatttccatttcttcctggtgttaatggtaatgcattgtcttctgagaaagcgaaagacgagttctttgatgatattggagcatcattcagcttccatcctgtttcaagatcatcttcctctttcttccaaggcacaacagagatgatgtcagttgattatggtaactacaacaatagatcttcttctcatcaatccgcagaagaagtaaaacctggctctgaaaacatagaaagctccaatctttatgggattgaaactgacaatcaaaacgggcagaacaagacatctgatgtcactacaaacaccagtcttgaaaccgtggatcatcaagaggaagaagaagagcaaagacgcggtgattcgatggctggtggtgcgcctgcagaggatggatataactggaggaaatacggacaaaagttggtcaaaggaagtgagtatccgcgaagctattacaagtgcacaaacccgaattgtcaggtgaagaagaaagttgagagatcaagggaaggtcacatcacagagattatatacaaaggagctcataatcatcttaaacctccacctaatcgccgctcagggatgcaagtagatggaactgaacaagttgaacaacaacaacaacagagagattctgctgcaacgtgggttagttgtaataacactcaacaacaaggtggaagcaatgagaacaatgtcgaagagggatctacgagattcgagtatggaaaccaatctggatcaattcaagctcaaaccggaggtcaatacgagtcaggtgatcctgtggttgtggttgatgcttcttcaacattctctaatgatgaagatgaagatgatcgagggacacatggaagtgtttctttgggttacgatggaggaggaggaggtgggggaggagaaggagatgaatcagagtcgaaaagaaggaaactagaagcttttgcagcagagatgagtggatcaacaagagccatacgtgagccaagagttgttgtgcagacaacgagtgatgttgacattcttgatgatggttatcgctggcgaaaatatggtcagaaagttgtcaaaggcaatccaaatccaaggagttattacaaatgcacagctccaggatgtacagtgaggaaacatgttgaaagagcttctcatgatctcaaatccgttataacaacttacgaaggcaaacataaccatgacgtccccgctgcacgcaacagcagccacggaggcggtggtgatagtggtaacggtaacagcggcggttcagccgcagtttctcaccattaccacaacggtcatcactcagagccgccacgtgggagattcgacagacaagtcacaactaacaatcagtctccttttagccgtccctttagctttcagccacatttgggtcctccttctggtttctccttcggtttaggacaaaccggtttggttaatctttcaatgcctggtttagcgtatggtcaagggaaaatgccgggtttgcctcacccgtatatgacacaaccggttgggatgagtgaagcaatgatgcagagagggatggaaccaaaggttgaaccggtttcagattcaggacaatcggtatataaccagatcatgagtagattacctcagatttgaaatttactcttcttcttcttcttctgcatttggtcactccttataataacttttaatttctgctt

SEQ ID NO: 90971 - protein, 687 aa, Arabidopsis thaliana
  peptide (1)..(687): Ceres Seq. ID no. 12725924
MAGFDENVAVMGEWVPRSPSPGTLFSSAIGEEKSSKRVLERELSLNHGQVIGLEEDTSSNHNKDSSQSNVFRGGLSERIAARAGFNAPRLNTENIRTNTDFSIDSNLRSPCLTISSPGLSPATLLESPVFLSNPLAQPSPTTGKFPFLPGVNGNALSSEKAKDEFFDDIGASFSFHPVSRSSSSFFQGTTEMMSVDYGNYNNRSSSHQSAEEVKPGSENIESSNLYGIETDNQNGQNKTSDVTTNTSLETVDHQEEEEEQRRGDSMAGGAPAEDGYNWRKYGQKLVKGSEYPRSYYKCTNPNCQVKKKVERSREGHITEIIYKGAHNHLKPPPNRRSGMQVDGTEQVEQQQQQRDSAATWVSCNNTQQQGGSNENNVEEGSTRFEYGNQSGSIQAQTGGQYESGDPVVVVDASSTFSNDEDEDDRGTHGSVSLGYDGGGGGGGGEGDESESKRRKLEAFAAEMSGSTRAIREPRVVVQTTSDVDILDDGYRWRKYGQKVVKGNPNPRSYYKCTAPGCTVRKHVERASHDLKSVITTYEGKHNHDVPAARNSSHGGGGDSGNGNSGGSAAVSHHYHNGHHSEPPRGRFDRQVTTNNQSPFSRPFSFQPHLGPPSGFSFGLGQTGLVNLSMPGLAYGQGKMPGLPHPYMTQPVGMSEAMMQRGMEPKVEPVSDSGQSVYNQIMSRLPQI

SEQ ID NO: 90972 - protein, 677 aa, Arabidopsis thaliana
  peptide (1)..(677): Ceres Seq. ID no. 12725925
MGEWVPRSPSPGTLFSSAIGEEKSSKRVLERELSLNHGQVIGLEEDTSSNHNKDSSQSNVFRGGLSERIAARAGFNAPRLNTENIRTNTDFSIDSNLRSPCLTISSPGLSPATLLESPVFLSNPLAQPSPTTGKFPFLPGVNGNALSSEKAKDEFFDDIGASFSFHPVSRSSSSFFQGTTEMMSVDYGNYNNRSSSHQSAEEVKPGSENIESSNLYGIETDNQNGQNKTSDVTTNTSLETVDHQEEEEEQRRGDSMAGGAPAEDGYNWRKYGQKLVKGSEYPRSYYKCTNPNCQVKKKVERSREGHITEIIYKGAHNHLKPPPNRRSGMQVDGTEQVEQQQQQRDSAATWVSCNNTQQQGGSNENNVEEGSTRFEYGNQSGSIQAQTGGQYESGDPVVVVDASSTFSNDEDEDDRGTHGSVSLGYDGGGGGGGGEGDESESKRRKLEAFAAEMSGSTRAIREPRVVVQTTSDVDILDDGYRWRKYGQKVVKGNPNPRSYYKCTAPGCTVRKHVERASHDLKSVITTYEGKHNHDVPAARNSSHGGGGDSGNGNSGGSAAVSHHYHNGHHSEPPRGRFDRQVTTNNQSPFSRPFSFQPHLGPPSGFSFGLGQTGLVNLSMPGLAYGQGKMPGLPHPYMTQPVGMSEAMMQRGMEPKVEPVSDSGQSVYNQIMSRLPQI

SEQ ID NO: 90973 - protein, 496 aa, Arabidopsis thaliana
  peptide (1)..(496): Ceres Seq. ID no. 12725926
MMSVDYGNYNNRSSSHQSAEEVKPGSENIESSNLYGIETDNQNGQNKTSDVTTNTSLETVDHQEEEEEQRRGDSMAGGAPAEDGYNWRKYGQKLVKGSEYPRSYYKCTNPNCQVKKKVERSREGHITEIIYKGAHNHLKPPPNRRSGMQVDGTEQVEQQQQQRDSAATWVSCNNTQQQGGSNENNVEEGSTRFEYGNQSGSIQAQTGGQYESGDPVVVVDASSTFSNDEDEDDRGTHGSVSLGYDGGGGGGGGEGDESESKRRKLEAFAAEMSGSTRAIREPRVVVQTTSDVDILDDGYRWRKYGQKVVKGNPNPRSYYKCTAPGCTVRKHVERASHDLKSVITTYEGKHNHDVPAARNSSHGGGGDSGNGNSGGSAAVSHHYHNGHHSEPPRGRFDRQVTTNNQSPFSRPFSFQPHLGPPSGFSFGLGQTGLVNLSMPGLAYGQGKMPGLPHPYMTQPVGMSEAMMQRGMEPKVEPVSDSGQSVYNQIMSRLPQI

SEQ ID NO: 90974 - DNA, 1593 bp, Arabidopsis thaliana
  misc_feature (1)..(1593): Ceres Seq. ID no. 12725931
  misc_feature (1)..(1593): Ortholog of  Ceres SEQ ID NO 12586556 as cited in SEQ ID NO 64667
atgattcagagaatcaatgccttgagcttaagctctggtctaaattggttcgttacctcattgaaaatccatggaaataacctcaaaacattaaagcaatctcattgttacatgatcataaccggtttaaacagagacaacctcaacgttgccaaattcatcgaagcatgttcaaatgcaggacatctccgatatgcttactctgtattcacccaccagccatgtcccaatacttatctccacaacaccatgattagagctttgtctctcctcgacgaacccaatgcgcattcgattgcgatcacggtttatagaaagttatgggctttgtgtgctaagcctgacacgtttactttcccgtttgtgttgaagattgctgttagggtttctgatgtttggtttgggagacagattcatggacaagttgtggtttttgggtttgattcgagcgttcatgttgtaacaggtttgattcagatgtatttttcgtgtggtggtttgggagatgcacgtaagatgttcgatgaaatgcttgtcaaggatgtgaatgtttggaatgcgttgttagcagggtatgggaaagttggtgagatggatgaagctaggagtttgcttgagatgatgccttgttgggtaaggaatgaggtttcttggacttgtgtgatctctggatatgcgaaaagtggacgagctagcgaagctattgaagtgtttcagagaatgctgatggagaatgttgagcctgatgaagttacgcttttggctgtgctctcagcttgtgctgatcttggttcacttgaattgggtgaaagaatatgtagctatgttgatcaccgagggatgaacagagcggtttcattgaacaatgcggtcattgatatgtatgcgaaatcagggaatataacaaaggcgttggatgtgtttgagtgtgttaatgagagaaatgttgttacttggacgactataatcgcagggctagctacgcacgggcacggagctgaagccttagcgatgtttaaccgtatggttaaagctggcgtgagaccgaacgatgttactttcattgcaatcctttcagcttgcagtcatgtcggttgggttgatcttggaaaacgtttgtttaactcaatgagatcgaaatacgggattcatccaaacattgagcattacggatgcatgattgatttgctaggacgagcaggtaaactccgagaggcggatgaagttattaaaagcatgccctttaaggccaatgctgcaatatggggatctcttcttgctgcttcaaatgttcatcatgatcttgagcttggagaaagagctttgagtgagctgattaagttagaaccgaataacagcggtaactatatgcttttagctaatttatactcgaatttaggaaggtgggatgagtcgaggatgatgaggaacatgatgaaagggattggtgtgaagaagatggctggtgaaagctccatagaagttgaaaacagagtatacaaattcatttcaggggatcttacgcatcctcaagtcgaaaggattcatgaaattctacaagagatggatttgcaaatacagagcaaagtttga

SEQ ID NO: 90975 - protein, 530 aa, Arabidopsis thaliana
  peptide (1)..(530): Ceres Seq. ID no. 12725932
MIQRINALSLSSGLNWFVTSLKIHGNNLKTLKQSHCYMIITGLNRDNLNVAKFIEACSNAGHLRYAYSVFTHQPCPNTYLHNTMIRALSLLDEPNAHSIAITVYRKLWALCAKPDTFTFPFVLKIAVRVSDVWFGRQIHGQVVVFGFDSSVHVVTGLIQMYFSCGGLGDARKMFDEMLVKDVNVWNALLAGYGKVGEMDEARSLLEMMPCWVRNEVSWTCVISGYAKSGRASEAIEVFQRMLMENVEPDEVTLLAVLSACADLGSLELGERICSYVDHRGMNRAVSLNNAVIDMYAKSGNITKALDVFECVNERNVVTWTTIIAGLATHGHGAEALAMFNRMVKAGVRPNDVTFIAILSACSHVGWVDLGKRLFNSMRSKYGIHPNIEHYGCMIDLLGRAGKLREADEVIKSMPFKANAAIWGSLLAASNVHHDLELGERALSELIKLEPNNSGNYMLLANLYSNLGRWDESRMMRNMMKGIGVKKMAGESSIEVENRVYKFISGDLTHPQVERIHEILQEMDLQIQSKV

SEQ ID NO: 90976 - protein, 493 aa, Arabidopsis thaliana
  peptide (1)..(493): Ceres Seq. ID no. 12725933
MIITGLNRDNLNVAKFIEACSNAGHLRYAYSVFTHQPCPNTYLHNTMIRALSLLDEPNAHSIAITVYRKLWALCAKPDTFTFPFVLKIAVRVSDVWFGRQIHGQVVVFGFDSSVHVVTGLIQMYFSCGGLGDARKMFDEMLVKDVNVWNALLAGYGKVGEMDEARSLLEMMPCWVRNEVSWTCVISGYAKSGRASEAIEVFQRMLMENVEPDEVTLLAVLSACADLGSLELGERICSYVDHRGMNRAVSLNNAVIDMYAKSGNITKALDVFECVNERNVVTWTTIIAGLATHGHGAEALAMFNRMVKAGVRPNDVTFIAILSACSHVGWVDLGKRLFNSMRSKYGIHPNIEHYGCMIDLLGRAGKLREADEVIKSMPFKANAAIWGSLLAASNVHHDLELGERALSELIKLEPNNSGNYMLLANLYSNLGRWDESRMMRNMMKGIGVKKMAGESSIEVENRVYKFISGDLTHPQVERIHEILQEMDLQIQSKV

SEQ ID NO: 90977 - protein, 447 aa, Arabidopsis thaliana
  peptide (1)..(447): Ceres Seq. ID no. 12725934
MIRALSLLDEPNAHSIAITVYRKLWALCAKPDTFTFPFVLKIAVRVSDVWFGRQIHGQVVVFGFDSSVHVVTGLIQMYFSCGGLGDARKMFDEMLVKDVNVWNALLAGYGKVGEMDEARSLLEMMPCWVRNEVSWTCVISGYAKSGRASEAIEVFQRMLMENVEPDEVTLLAVLSACADLGSLELGERICSYVDHRGMNRAVSLNNAVIDMYAKSGNITKALDVFECVNERNVVTWTTIIAGLATHGHGAEALAMFNRMVKAGVRPNDVTFIAILSACSHVGWVDLGKRLFNSMRSKYGIHPNIEHYGCMIDLLGRAGKLREADEVIKSMPFKANAAIWGSLLAASNVHHDLELGERALSELIKLEPNNSGNYMLLANLYSNLGRWDESRMMRNMMKGIGVKKMAGESSIEVENRVYKFISGDLTHPQVERIHEILQEMDLQIQSKV

SEQ ID NO: 90978 - DNA, 1455 bp, Arabidopsis thaliana
  misc_feature (1)..(1455): Ceres Seq. ID no. 12725939
  misc_feature (1)..(1455): Ortholog of  Ceres SEQ ID NO 14312208 as cited in SEQ ID NO 54845
  misc_feature (1)..(1455): Ortholog of  Ceres SEQ ID NO 15171755 as cited in SEQ ID NO 57047
  misc_feature (1)..(1455): Ortholog of  Ceres SEQ ID NO 13597613 as cited in SEQ ID NO 65334
  misc_feature (1)..(1455): Ortholog of  Ceres SEQ ID NO 14303664 as cited in SEQ ID NO 65892
  misc_feature (1)..(1455): Ortholog of  Ceres SEQ ID NO 15178832 as cited in SEQ ID NO 0
aaaaaaaaaatcttgggttttcaagaaaaagtagagacattttaaagaatcaatagatttgtgggggtgaagtaaggaacatggaggaaacaatggcagctaggtattggtgtcacatgtgttcacaaatggtgaatccagtaatggaatctgagatcaaatgtcccttttgccaaagcggattcatcgaagaaatgagcggtaatggcggtggaggtggtggcagaggcataagagatgttcaagattcagaaaccgattttggaacagaccgtgcattgtctctatgggcaccaatcttgcttggaatgatgagtagtcctcgaagacgaagaaggtttagaagatcagagtttggtgaagagaatgatgataatggtgatgacttgactactaatgctgatgggaatgggaatgatagtaacaacagtaataataacgtgtatcgtcatcatcgagctaggagacatggtggagagattgatttagatagagagtttgaatctatcttgaggagaagacgaagaagctcagggaatatattgcagttgcttcaagggattcgtgcagggattgcttctgagtatgaaagctctgataacaattgggataattctcgagagagggatagagttataatgattaatccgtataaccaatcgctagttgttccttcggatcagaatcagaatcatccttcattgacttcacttggagattacttcattggacctggtttagatcttttgcttcagcatttggctgagaatgatcctaataggcaagggactccacctgctcgtaaagaagctgttgaagctttaccaacggttaagataatggaacctttgcaatgttctgtttgtttggatgattttgagaaaggtacggaagctaaagagatgccttgtaagcataagtttcatgttcggtgtattgttccctggcttgagcttcatagttcttgtcctgtgtgtcgttttgagcttccttctagtgctgatgatgatgatgagactaagactgattccgagagagtgctgagaacaagaaatgttcgggaaacgagtaacggaaacgttgttgagaatgtgggaaatgcggatagaggaagagaggatgaggtgaggagtggaaatgggagacggttttcgtttccatggccgtttagtggattgttctcgtcttcttcttcttcgtcttcttcaacctctggatctcaatctggtgagaacaatttcttctcaagatcttctggttcttctcgctgagagcaaaacaatcaaaaactaaaacatcttggattttgttattgttcttcatcttttgttgttctctcatttttctagctattgaacttgttatttcctctgcatttcattctctgctttactgtacatagaaatgatgttctttcactcagactgttgaaaaacaaatatccattgttggtgt

SEQ ID NO: 90979 - protein, 396 aa, Arabidopsis thaliana
  peptide (1)..(396): Ceres Seq. ID no. 12725940
MEETMAARYWCHMCSQMVNPVMESEIKCPFCQSGFIEEMSGNGGGGGGRGIRDVQDSETDFGTDRALSLWAPILLGMMSSPRRRRRFRRSEFGEENDDNGDDLTTNADGNGNDSNNSNNNVYRHHRARRHGGEIDLDREFESILRRRRRSSGNILQLLQGIRAGIASEYESSDNNWDNSRERDRVIMINPYNQSLVVPSDQNQNHPSLTSLGDYFIGPGLDLLLQHLAENDPNRQGTPPARKEAVEALPTVKIMEPLQCSVCLDDFEKGTEAKEMPCKHKFHVRCIVPWLELHSSCPVCRFELPSSADDDDETKTDSERVLRTRNVRETSNGNVVENVGNADRGREDEVRSGNGRRFSFPWPFSGLFSSSSSSSSSTSGSQSGENNFFSRSSGSSR

SEQ ID NO: 90980 - protein, 392 aa, Arabidopsis thaliana
  peptide (1)..(392): Ceres Seq. ID no. 12725941
MAARYWCHMCSQMVNPVMESEIKCPFCQSGFIEEMSGNGGGGGGRGIRDVQDSETDFGTDRALSLWAPILLGMMSSPRRRRRFRRSEFGEENDDNGDDLTTNADGNGNDSNNSNNNVYRHHRARRHGGEIDLDREFESILRRRRRSSGNILQLLQGIRAGIASEYESSDNNWDNSRERDRVIMINPYNQSLVVPSDQNQNHPSLTSLGDYFIGPGLDLLLQHLAENDPNRQGTPPARKEAVEALPTVKIMEPLQCSVCLDDFEKGTEAKEMPCKHKFHVRCIVPWLELHSSCPVCRFELPSSADDDDETKTDSERVLRTRNVRETSNGNVVENVGNADRGREDEVRSGNGRRFSFPWPFSGLFSSSSSSSSSTSGSQSGENNFFSRSSGSSR

SEQ ID NO: 90981 - protein, 384 aa, Arabidopsis thaliana
  peptide (1)..(384): Ceres Seq. ID no. 12725942
MCSQMVNPVMESEIKCPFCQSGFIEEMSGNGGGGGGRGIRDVQDSETDFGTDRALSLWAPILLGMMSSPRRRRRFRRSEFGEENDDNGDDLTTNADGNGNDSNNSNNNVYRHHRARRHGGEIDLDREFESILRRRRRSSGNILQLLQGIRAGIASEYESSDNNWDNSRERDRVIMINPYNQSLVVPSDQNQNHPSLTSLGDYFIGPGLDLLLQHLAENDPNRQGTPPARKEAVEALPTVKIMEPLQCSVCLDDFEKGTEAKEMPCKHKFHVRCIVPWLELHSSCPVCRFELPSSADDDDETKTDSERVLRTRNVRETSNGNVVENVGNADRGREDEVRSGNGRRFSFPWPFSGLFSSSSSSSSSTSGSQSGENNFFSRSSGSSR

SEQ ID NO: 90982 - DNA, 1791 bp, Arabidopsis thaliana
  misc_feature (1)..(1791): Ceres Seq. ID no. 12725975
  misc_feature (1)..(1791): Ortholog of  Ceres SEQ ID NO 12626078 as cited in SEQ ID NO 69113
atggcatcaacctttagcgcaacgtcgtcaatgggttcatctttggctcctccttcgaatcgattgtcatcttttgtttcgatctcatcaagctcttttggaaggactcagagtattgctcagaggaaagcaaggtttcctaaaatatatgcggctaagcaattgcatttcaataaggacgggactgcgattaagaagcttcaagctggtgtgaataaacttgcggatttagttggggttactttaggtcctaaaggcaggaatgttgttctagagagcaaatacggttcccctagaatcgttaatgatggtgttacggtcgctagagaggttgagcttgaggatccagttgagaacattggtgctaagctagtgagacaagctgcttccaagactaatgacttagctggtgatggaacaacgacttctgttgttcttgctcaaggtcttattgctgaaggtgtaaaggtggtagctgctggtgcaaatcctgttttgattaccagaggtattgagaaaaccaccaaagctcttgtggctgagttgaagaaaatgtcaaaggaggttgaagacagtgaactagcagatgttgcagcagttagtgcaggaaacaattacgaagtaggcaatatgattgcagaagcaatggcaaaagttggtcgtaaaggtgttgtcactctagaggaaggcaaaagcgctgagaacagcctttacgttgttgaaggaatgcaatttgatcgtggttatatctctccttactttgtcaccgacagtgagaaaatgtgtgcagaatatgagaactgcaagttgtttcttgttgacaaaaagataacaaatgctagagatattattagcattctggaagatgcgattaaaggtggatacccgcttttgatcattgctgaagatattgagcaagagccattagcgactcttgttgttaacaagcttcgtgggacaataaaagttgctgctttgaaagctcctggatttggagagaggaaaagccagtaccttgatgacattgctgcgcttacaggagctactgtgattagggaagaagttggacttcagttggagaaagttggaccagaagttttgggtaatgctggtaaagtggttctcacaaaagatactacaacgatagttggtgatggaagtactgaagaagttgtgaagaagagagttgaacagatcaagaatcttatcgaggctgctgaacaagactatgaaaaggaaaagcttaatgagagaattgctaaattatcaggcggtgttgctgtaattcaggttggagcacaaactgagacagagcttaaggagaagaaattaagagttgaagatgctcttaatgctacaaaggctgctgtggaagaaggtattgttgttggcggaggatgtactctgctaagacttgcatcgaaagtggacgctattaaagagactctagcaaacgatgaagaaaaggttggagctgacattgttaagaaagcattgagctacccactgaagttaatcgccaagaacgctggtgtcaatggcagcgttgtcagtgagaaggttctttctagtgacaaccctaaacatggttacaatgctgcaactggcaaatacgaagatctcatggctgcaggaatcattgatccaaccaaagttgtgagatgttgcctagagcatgcttcatctgtggcaaagacattcttgatgtctgattgtgttgttgtggagatcaaggagcctgaatcagcagctcctgctggtaaccctatggacaattcaggtatctcttag

SEQ ID NO: 90983 - protein, 596 aa, Arabidopsis thaliana
  peptide (1)..(596): Ceres Seq. ID no. 12725976
MASTFSATSSMGSSLAPPSNRLSSFVSISSSSFGRTQSIAQRKARFPKIYAAKQLHFNKDGTAIKKLQAGVNKLADLVGVTLGPKGRNVVLESKYGSPRIVNDGVTVAREVELEDPVENIGAKLVRQAASKTNDLAGDGTTTSVVLAQGLIAEGVKVVAAGANPVLITRGIEKTTKALVAELKKMSKEVEDSELADVAAVSAGNNYEVGNMIAEAMAKVGRKGVVTLEEGKSAENSLYVVEGMQFDRGYISPYFVTDSEKMCAEYENCKLFLVDKKITNARDIISILEDAIKGGYPLLIIAEDIEQEPLATLVVNKLRGTIKVAALKAPGFGERKSQYLDDIAALTGATVIREEVGLQLEKVGPEVLGNAGKVVLTKDTTTIVGDGSTEEVVKKRVEQIKNLIEAAEQDYEKEKLNERIAKLSGGVAVIQVGAQTETELKEKKLRVEDALNATKAAVEEGIVVGGGCTLLRLASKVDAIKETLANDEEKVGADIVKKALSYPLKLIAKNAGVNGSVVSEKVLSSDNPKHGYNAATGKYEDLMAAGIIDPTKVVRCCLEHASSVAKTFLMSDCVVVEIKEPESAAPAGNPMDNSGIS

SEQ ID NO: 90984 - protein, 586 aa, Arabidopsis thaliana
  peptide (1)..(586): Ceres Seq. ID no. 12725977
MGSSLAPPSNRLSSFVSISSSSFGRTQSIAQRKARFPKIYAAKQLHFNKDGTAIKKLQAGVNKLADLVGVTLGPKGRNVVLESKYGSPRIVNDGVTVAREVELEDPVENIGAKLVRQAASKTNDLAGDGTTTSVVLAQGLIAEGVKVVAAGANPVLITRGIEKTTKALVAELKKMSKEVEDSELADVAAVSAGNNYEVGNMIAEAMAKVGRKGVVTLEEGKSAENSLYVVEGMQFDRGYISPYFVTDSEKMCAEYENCKLFLVDKKITNARDIISILEDAIKGGYPLLIIAEDIEQEPLATLVVNKLRGTIKVAALKAPGFGERKSQYLDDIAALTGATVIREEVGLQLEKVGPEVLGNAGKVVLTKDTTTIVGDGSTEEVVKKRVEQIKNLIEAAEQDYEKEKLNERIAKLSGGVAVIQVGAQTETELKEKKLRVEDALNATKAAVEEGIVVGGGCTLLRLASKVDAIKETLANDEEKVGADIVKKALSYPLKLIAKNAGVNGSVVSEKVLSSDNPKHGYNAATGKYEDLMAAGIIDPTKVVRCCLEHASSVAKTFLMSDCVVVEIKEPESAAPAGNPMDNSGIS

SEQ ID NO: 90985 - protein, 412 aa, Arabidopsis thaliana
  peptide (1)..(412): Ceres Seq. ID no. 12725978
MSKEVEDSELADVAAVSAGNNYEVGNMIAEAMAKVGRKGVVTLEEGKSAENSLYVVEGMQFDRGYISPYFVTDSEKMCAEYENCKLFLVDKKITNARDIISILEDAIKGGYPLLIIAEDIEQEPLATLVVNKLRGTIKVAALKAPGFGERKSQYLDDIAALTGATVIREEVGLQLEKVGPEVLGNAGKVVLTKDTTTIVGDGSTEEVVKKRVEQIKNLIEAAEQDYEKEKLNERIAKLSGGVAVIQVGAQTETELKEKKLRVEDALNATKAAVEEGIVVGGGCTLLRLASKVDAIKETLANDEEKVGADIVKKALSYPLKLIAKNAGVNGSVVSEKVLSSDNPKHGYNAATGKYEDLMAAGIIDPTKVVRCCLEHASSVAKTFLMSDCVVVEIKEPESAAPAGNPMDNSGIS

SEQ ID NO: 90986 - DNA, 1632 bp, Arabidopsis thaliana
  misc_feature (1)..(1632): Ceres Seq. ID no. 12725998
  misc_feature (1)..(1632): Ortholog of  Ceres SEQ ID NO 12593464 as cited in SEQ ID NO 69039
atcttcctccatggctctaaacaagctcctcagtttgactttccaactactcctttttctacttagtgtttcatcggaatctccatggatcgccgaagatacgtctcaaatccagacgaagctcctcgaattcgcgaagagtccggaggtcttcgattggatggtgaaaatcagaaggaaaatccacgagaatccggagcttggttacgaagaactcgagaccagtaaactcattaggtcggagctggaacttatcggaatcaagtataggtatcctgtagctatcaccggtgttatcggatatatcggcaccggagaaccgccattcgtcgccctgagagctgatatggatgctttgcctattcaggaaggtgttgagtgggagcacaagagcaaaatcgctggtaaaatgcatgcttgcggacatgatggtcatgttactatgcttcttggggctgcaaagatacttcatgaacatcgccaccatttgcagggaactgtggtgcttatctttcaaccagctgaggaaggtttgagtggagcaaagaagatgagagaagaaggagcgttgaagaacgtcgaagctattttcgggatacatctttctgcccggattccctttgggaaagccgcttcacgtgcaggttcatttttggctggagctggagtcttcgaggctgtaatcactgggaaaggaggtcatgctgccatccctcagcatactatagatcctgttgttgcagcctcaagcatcgtcctcagtcttcaacaattggtttcacgtgaaactgaccctttggattcaaaggtggtcacagtttctaaggttaatggaggcaatgcttttaatgtcatccctgattcaatcaccataggaggaactcttcgagcctttaccggatttactcagcttcaacagagagtcaaagaggtgattaccaagcaagcagccgttcaccgatgcaatgcgtccgttaatctaacaccaaacggtagagaaccaatgccaccaacagtgaacaacaaggacttgtacaagcaattcaagaaggtggttagagatttgttgggtcaagaagcttttgtggaagcagcacctgtaatgggatccgaagacttctcatactttgcagaaacaatcccgggccatttctctctactgggaatgcaagatgagaccaacgggtatgcatcgtctcattcaccactctatagaatcaacgaggatgtgcttccgtacggtgctgcaatccatgcatcgatggcagtacagtacctcaaagagaaggcttctaaaggttctgtctcaggctttcatgaagaactctaaaccttggttgtagacaggttgttcatcggttattggttcagattcagaagcacaaacctaacactccattgaattaatcaagtgttatcgtacaagatccttgcaagtgttatagaatgatgaaaatgtatttaatagctaattttcaattggcaaattatcaacttttaatagtctgtgtaaaagtattgacagaaacttagaacacgaattatgatcattggtcttgttgtaatgtattggcaaaaatcatatcttatgtttaattgaccaaaatcataagtgaaaaaacagtatttcat

SEQ ID NO: 90987 - protein, 442 aa, Arabidopsis thaliana
  peptide (1)..(442): Ceres Seq. ID no. 12725999
SSSMALNKLLSLTFQLLLFLLSVSSESPWIAEDTSQIQTKLLEFAKSPEVFDWMVKIRRKIHENPELGYEELETSKLIRSELELIGIKYRYPVAITGVIGYIGTGEPPFVALRADMDALPIQEGVEWEHKSKIAGKMHACGHDGHVTMLLGAAKILHEHRHHLQGTVVLIFQPAEEGLSGAKKMREEGALKNVEAIFGIHLSARIPFGKAASRAGSFLAGAGVFEAVITGKGGHAAIPQHTIDPVVAASSIVLSLQQLVSRETDPLDSKVVTVSKVNGGNAFNVIPDSITIGGTLRAFTGFTQLQQRVKEVITKQAAVHRCNASVNLTPNGREPMPPTVNNKDLYKQFKKVVRDLLGQEAFVEAAPVMGSEDFSYFAETIPGHFSLLGMQDETNGYASSHSPLYRINEDVLPYGAAIHASMAVQYLKEKASKGSVSGFHEEL

SEQ ID NO: 90988 - protein, 439 aa, Arabidopsis thaliana
  peptide (1)..(439): Ceres Seq. ID no. 12726000
MALNKLLSLTFQLLLFLLSVSSESPWIAEDTSQIQTKLLEFAKSPEVFDWMVKIRRKIHENPELGYEELETSKLIRSELELIGIKYRYPVAITGVIGYIGTGEPPFVALRADMDALPIQEGVEWEHKSKIAGKMHACGHDGHVTMLLGAAKILHEHRHHLQGTVVLIFQPAEEGLSGAKKMREEGALKNVEAIFGIHLSARIPFGKAASRAGSFLAGAGVFEAVITGKGGHAAIPQHTIDPVVAASSIVLSLQQLVSRETDPLDSKVVTVSKVNGGNAFNVIPDSITIGGTLRAFTGFTQLQQRVKEVITKQAAVHRCNASVNLTPNGREPMPPTVNNKDLYKQFKKVVRDLLGQEAFVEAAPVMGSEDFSYFAETIPGHFSLLGMQDETNGYASSHSPLYRINEDVLPYGAAIHASMAVQYLKEKASKGSVSGFHEEL

SEQ ID NO: 90989 - protein, 389 aa, Arabidopsis thaliana
  peptide (1)..(389): Ceres Seq. ID no. 12726001
MVKIRRKIHENPELGYEELETSKLIRSELELIGIKYRYPVAITGVIGYIGTGEPPFVALRADMDALPIQEGVEWEHKSKIAGKMHACGHDGHVTMLLGAAKILHEHRHHLQGTVVLIFQPAEEGLSGAKKMREEGALKNVEAIFGIHLSARIPFGKAASRAGSFLAGAGVFEAVITGKGGHAAIPQHTIDPVVAASSIVLSLQQLVSRETDPLDSKVVTVSKVNGGNAFNVIPDSITIGGTLRAFTGFTQLQQRVKEVITKQAAVHRCNASVNLTPNGREPMPPTVNNKDLYKQFKKVVRDLLGQEAFVEAAPVMGSEDFSYFAETIPGHFSLLGMQDETNGYASSHSPLYRINEDVLPYGAAIHASMAVQYLKEKASKGSVSGFHEEL

SEQ ID NO: 90990 - DNA, 1949 bp, Arabidopsis thaliana
  misc_feature (1)..(1949): Ceres Seq. ID no. 12726002
  misc_feature (1)..(1949): Ortholog of  Ceres SEQ ID NO 13597375 as cited in SEQ ID NO 63986
aatacgcagccaaatacactctctctgaaacctctcctcttttagggtttaatatcaacgcctccaaaatttccgtgcttttgttttcgtagataacgaacaatggctgatgagattgtgccgccggcgactcaattagccgccgtatccttagaaaacgatggatctacggtgcaaagagctcaattctctaaccgggttttgattcgaacgattttggatcgacctgacggcggagctggactcgccggtcaaacggttcgaatcggtggttgggtaaaatccggaagagatcaagggaaaagaacgttttctttccttgcggttaacgatggatcttgtccagcgaatcttcaggttatggtggatccgtctctctatgatgtctctaacttggttgctacgggaacttgtgtgactgttgatggagttttgaaggttccaccgaaaggtaaaggtacgcagcagcagattgagcttaacgttgtgaaggtgattgatgttggaacggtggatgcgtctaagtatccacttcctaagactaagttgactcttgagactttgagagatgtgcttcatcttcgttctagaactaactcgatctcagctgttgcaagaattcgtaatgctcttgcttttgcgactcacagtttctttcaagagcatagtttcctttacattcacactcctatcatcacgacaagtgattgtgaaggtgctggtgaaatgttccaagcaacaactttgatcaattacactgagaggttggagcaggatctcattgataaccctccgcctactgaggctgatgttgaagctgcgaggctcattgtcattgagagaggtaatgttgtagcggaactgaaagctgccaaagcaagcaaggaagcgatcactgctgctgttgctgaacttaaaatagcaaaggagacttttgctcatattgatgagaggtcgaggcttagacctggactacctaagaaagatggaaacattgattattccaaggatttctttggtcgtcaagctttcttgacagtttccggtcaattacaagtggagacctatgcttgtgctcttagcaatgtgtatacatttggcccgactttccgggcagagaactctcacacttcaaggcatcttgctgaattctggatggttgagcctgagattgcttttgcagatctagaggacgacatgaactgtgcagaggcgtatgtgaaatacatgtgcaactggttgcttgagaaatgttacgctgacatggaacttatggctaagaatttcgactcaggatgcattgacaggctaaaattggttgcctctactccgtttgggcgtataacatacactaaagcaatagagctacttgaggaagctgtggctaaaggaaaggaatttgataacaatgtggagtggggaatcgacttagcctcggagcatgaaagatacttgacagaggttctgtttcaaaagccacttattgtctataactacccgaaaggaatcaaagctttttacatgagacttaacgatgatgagaagacagttgctgccatggatgtcctcgttccaaaggttggagaactcattggtggaagccaaagggaagaacgatatgatgtcatcaaaaagaggattgaggagatgggtcttccaatagagccatatgagtggtacctagacttgcgccgttatggaacagtgaagcattgtgggtttggacttggcttcgaacgtatgattctcttcgctactggacttgataacatcagagacgttattcctttccctcgctatcctggaaaagctgatctttgattcctcttctttacaccatttacatacacaatttcgcttttattagctggtctggtttccataaccgacttggtttagtttactttttaagttggttaaaggaaaattgtattgacttttgatttttt

SEQ ID NO: 90991 - protein, 572 aa, Arabidopsis thaliana
  peptide (1)..(572): Ceres Seq. ID no. 12726003
MADEIVPPATQLAAVSLENDGSTVQRAQFSNRVLIRTILDRPDGGAGLAGQTVRIGGWVKSGRDQGKRTFSFLAVNDGSCPANLQVMVDPSLYDVSNLVATGTCVTVDGVLKVPPKGKGTQQQIELNVVKVIDVGTVDASKYPLPKTKLTLETLRDVLHLRSRTNSISAVARIRNALAFATHSFFQEHSFLYIHTPIITTSDCEGAGEMFQATTLINYTERLEQDLIDNPPPTEADVEAARLIVIERGNVVAELKAAKASKEAITAAVAELKIAKETFAHIDERSRLRPGLPKKDGNIDYSKDFFGRQAFLTVSGQLQVETYACALSNVYTFGPTFRAENSHTSRHLAEFWMVEPEIAFADLEDDMNCAEAYVKYMCNWLLEKCYADMELMAKNFDSGCIDRLKLVASTPFGRITYTKAIELLEEAVAKGKEFDNNVEWGIDLASEHERYLTEVLFQKPLIVYNYPKGIKAFYMRLNDDEKTVAAMDVLVPKVGELIGGSQREERYDVIKKRIEEMGLPIEPYEWYLDLRRYGTVKHCGFGLGFERMILFATGLDNIRDVIPFPRYPGKADL

SEQ ID NO: 90992 - protein, 486 aa, Arabidopsis thaliana
  peptide (1)..(486): Ceres Seq. ID no. 12726004
MVDPSLYDVSNLVATGTCVTVDGVLKVPPKGKGTQQQIELNVVKVIDVGTVDASKYPLPKTKLTLETLRDVLHLRSRTNSISAVARIRNALAFATHSFFQEHSFLYIHTPIITTSDCEGAGEMFQATTLINYTERLEQDLIDNPPPTEADVEAARLIVIERGNVVAELKAAKASKEAITAAVAELKIAKETFAHIDERSRLRPGLPKKDGNIDYSKDFFGRQAFLTVSGQLQVETYACALSNVYTFGPTFRAENSHTSRHLAEFWMVEPEIAFADLEDDMNCAEAYVKYMCNWLLEKCYADMELMAKNFDSGCIDRLKLVASTPFGRITYTKAIELLEEAVAKGKEFDNNVEWGIDLASEHERYLTEVLFQKPLIVYNYPKGIKAFYMRLNDDEKTVAAMDVLVPKVGELIGGSQREERYDVIKKRIEEMGLPIEPYEWYLDLRRYGTVKHCGFGLGFERMILFATGLDNIRDVIPFPRYPGKADL

SEQ ID NO: 90993 - protein, 364 aa, Arabidopsis thaliana
  peptide (1)..(364): Ceres Seq. ID no. 12726005
MFQATTLINYTERLEQDLIDNPPPTEADVEAARLIVIERGNVVAELKAAKASKEAITAAVAELKIAKETFAHIDERSRLRPGLPKKDGNIDYSKDFFGRQAFLTVSGQLQVETYACALSNVYTFGPTFRAENSHTSRHLAEFWMVEPEIAFADLEDDMNCAEAYVKYMCNWLLEKCYADMELMAKNFDSGCIDRLKLVASTPFGRITYTKAIELLEEAVAKGKEFDNNVEWGIDLASEHERYLTEVLFQKPLIVYNYPKGIKAFYMRLNDDEKTVAAMDVLVPKVGELIGGSQREERYDVIKKRIEEMGLPIEPYEWYLDLRRYGTVKHCGFGLGFERMILFATGLDNIRDVIPFPRYPGKADL

SEQ ID NO: 90994 - DNA, 1020 bp, Arabidopsis thaliana
  misc_feature (1)..(1020): Ceres Seq. ID no. 12726013
  misc_feature (1)..(1020): Ortholog of  Ceres SEQ ID NO 13590307 as cited in SEQ ID NO 67154
atgtgtaatttgttaaacattgagaaagatcctataagggttttgattaccggtgcagcaggaaacataggatatgcaattgctccaatgattgcaagaggtattatgctaggtccagatcaacccatgattctgcatttacttgatatagagccagcttcaagttcactagaagctgtgaaaatggagcttcaagattcagctttccctcttctcaaaggcgttatcgcgacaacaaatgttgttgaagcatgtaaagatgtgaatatcgtgataatgatcggcggattcccaaggatagcaggcatggaaagaaaagatgtgatgtcgaaaaatgttgtgatatataaagctcaagcttcggctttagagcgttatgcatcagatgattgcaaggttcttgttgtcgcaaaccctgcaaacactaatgctctgatcttaaaagagtttgcgccatcaatcccggaagaaaatatcacttgcctgacacgactcgaccataatcgagctctagctcagcttgcagataagctaagtgttcccgtgagcagtgtaaagaacgtgatcgtttggggtaaccattcttcaactcaatatcccgacaccaatcacgcaacagtctctacaaaaactggagacagaccgttaaaagaactagtcacagatcacaactggctgaagaacgagtttatcgtggaagttcagcaacgcggtgcagctgttttaagagcacggaaacagtcgagtgctttttccgctgctggtgcagcttgtgaccatatccgtgattggtttcttggaacccctaaaggaacttgggtttctatgggtgtttgttctgacggctcatatggtataccacctggtttggtttactcgtttccggttatctgtgagaaagggagttggaagatcgtacaaggactcagtatagacgagttttcgagggagaaaatggatgactctgcacgagagctagctgaagagaaggatttagcttattcctgtctcaatgtatag

SEQ ID NO: 90995 - protein, 339 aa, Arabidopsis thaliana
  peptide (1)..(339): Ceres Seq. ID no. 12726014
MCNLLNIEKDPIRVLITGAAGNIGYAIAPMIARGIMLGPDQPMILHLLDIEPASSSLEAVKMELQDSAFPLLKGVIATTNVVEACKDVNIVIMIGGFPRIAGMERKDVMSKNVVIYKAQASALERYASDDCKVLVVANPANTNALILKEFAPSIPEENITCLTRLDHNRALAQLADKLSVPVSSVKNVIVWGNHSSTQYPDTNHATVSTKTGDRPLKELVTDHNWLKNEFIVEVQQRGAAVLRARKQSSAFSAAGAACDHIRDWFLGTPKGTWVSMGVCSDGSYGIPPGLVYSFPVICEKGSWKIVQGLSIDEFSREKMDDSARELAEEKDLAYSCLNV

SEQ ID NO: 90996 - protein, 310 aa, Arabidopsis thaliana
  peptide (1)..(310): Ceres Seq. ID no. 12726015
MIARGIMLGPDQPMILHLLDIEPASSSLEAVKMELQDSAFPLLKGVIATTNVVEACKDVNIVIMIGGFPRIAGMERKDVMSKNVVIYKAQASALERYASDDCKVLVVANPANTNALILKEFAPSIPEENITCLTRLDHNRALAQLADKLSVPVSSVKNVIVWGNHSSTQYPDTNHATVSTKTGDRPLKELVTDHNWLKNEFIVEVQQRGAAVLRARKQSSAFSAAGAACDHIRDWFLGTPKGTWVSMGVCSDGSYGIPPGLVYSFPVICEKGSWKIVQGLSIDEFSREKMDDSARELAEEKDLAYSCLNV

SEQ ID NO: 90997 - protein, 304 aa, Arabidopsis thaliana
  peptide (1)..(304): Ceres Seq. ID no. 12726016
MLGPDQPMILHLLDIEPASSSLEAVKMELQDSAFPLLKGVIATTNVVEACKDVNIVIMIGGFPRIAGMERKDVMSKNVVIYKAQASALERYASDDCKVLVVANPANTNALILKEFAPSIPEENITCLTRLDHNRALAQLADKLSVPVSSVKNVIVWGNHSSTQYPDTNHATVSTKTGDRPLKELVTDHNWLKNEFIVEVQQRGAAVLRARKQSSAFSAAGAACDHIRDWFLGTPKGTWVSMGVCSDGSYGIPPGLVYSFPVICEKGSWKIVQGLSIDEFSREKMDDSARELAEEKDLAYSCLNV

SEQ ID NO: 90998 - DNA, 2818 bp, Arabidopsis thaliana
  misc_feature (1)..(2818): Ceres Seq. ID no. 12726025
  misc_feature (1)..(2818): Ortholog of  Ceres SEQ ID NO 13654989 as cited in SEQ ID NO 63117
  misc_feature (1)..(2818): Ortholog of  Ceres SEQ ID NO 13657138 as cited in SEQ ID NO 65923
  misc_feature (1)..(2818): Ortholog of  Ceres SEQ ID NO 13584744 as cited in SEQ ID NO 69137
agagctacaaatccaaaatacttcttatttgtcatctttctctgtttatattttaattgtttggatatttgcttttatcttctaccaaattcctctgattttgtcgaagaaattagtagctgaaaatccaaaaatcggacttacttcatcagctttttggccccactttacaaagtatgagcaagtttttcttgttttctacagcaaagcaatgctcacaccattttcgtggagcttaaagtcttcaaacccaaactaaaagctttgaaatttctctgcaagaaacagagagagagatctagggattggctattaagagagagagagtagagtactacactattggttcctgtgctgttgtgttttgtgcatctgttcttgtgtttctcagataaaatattagtttcagtctttcaaagacattgaatctcacacacttactaacacacactcacacacgcgttaatttctcaactttttttctatttatttcttttagcttctagggtcacttgagaaagcatcttggattgcgtgatacttccactttctcatttcagaagaaaaatgggtttagattgagtgaagtgttaaaagtatatgtaagcaagggttgaagaagaagttctttcaatttctgtatttgtgatttccttaatcttagctagagaatgaagcagaagggttttaaagagagaggtgttgtagtggggaagaaagtaatggttgctgttagagcttcaaaggagatcccaaaagcagctcttttatggactttaactcatgttgttcaacctggagatcgaattagacttcttgttgttgttccttctaattacacaagtaaaaagatttggggattttcgaggttcactagtgactgtgcatcaggttatggaagatttcttgctggaacgaattcggataggaaagatgatattcatgagtcatgttctcagatgatgtttcagttacacaatgtttatgatgcagagaagataaatgtcagaatcaaaattgtttttgcttcacttgatggagttattgctgctgaagctaagaaatccaactcaaactgggtgattttagacaggggactgaagtatgagaagaaatgctgtattgagcaattggagtgcaatcttgtagtaatcaagaagtcacagccaaaggttcttcgtctcaatttggtgaaaaatgcagatacagagcatccagaagctatatcaaggttagcttcaaagtctgtcgagtctcggagaagctcaagaactggaaaaaagttgagggaaccgtttgtgactccagctagcagtccagaccaagaagtttcttcacatactgatatagggacttcatcaatatctagctctgatgctggagcctcaccgtttttagcttctcgagtctttgagggtctcaagaaagagaatttgtgggtcaatgatggaagcaagagtttctttgaatccgattctgactcggatggtgaaaagtggagtcctttatcaatggcatcctcatcttctcatcctgtgacaacagctgatcttctgagtcctagtggggatttatcgaaagctcataccgaaactccgagaaaatcaagatttgcggttcttaggctcgctttatcgaggaaagaacctgaagcaggaaaggaaatacgtaaacctgattcatgcttaaacaaaagcgtgagggaagtggtttctttatctagaaagccagctcctggaccgcctccactatgtactatatgtcaacacaaggcacctaaatttggaaaccctccaagatggttcacttacagcgaactggagaccgcaacaaaaggtttttctaaagggagtttcttggctgaaggtggttttggttcggttcacctaggaactttaccagatggtcaaattattgctgtcaaacaatataaaattgctagtacacaaggagaccgagaattctgctctgaagttgaagtcttgagctgtgcacagcatcgaaatgttgttatgcttattgggctatgtgttgaggatgggaaaagattgcttgtttatgagtatatctgcaatggatcattgcattctcatctttatggtatggggagagagccattgggatggtcagcacgacaaaagattgcggtaggagcagctcgtgggttgagataccttcatgaagaatgcagagtcggttgcatcgtgcatagggatatgcgtcctaacaatattctcctcactcatgattttgagcctttggttggagatttcggactagcgagatggcaaccagaaggagataaaggagtggaaacccgagtgattggaactttcgggtacttggcacctgaatacgcacaaagcggacagattacagagaaagcagatgtttactcatttggggtagtcttagttgagcttatcacaggaagaaaagctatggacataaaacgtcctaaaggtcaacaatgtctcaccgaatgggcaagaccattgttgcagaaacaagccattaacgaacttcttgatccgcgtctaatgaattgctactgtgagcaagaagtttattgtatggcactatgtgcttacctctgcattcgccgtgaccctaactcaaggccacgaatgtctcaggtgttgcggatgttagaaggagacgttgtcatgaatccaatatagaagaagcttcacaaggaaaattcttcttagggagtttgtacactatttagggttactattacagctttttaaatgagttttgcttttgtatatgtaaaaatttgttaatgagacaaagattcaactaaagtttgttg

SEQ ID NO: 90999 - protein, 669 aa, Arabidopsis thaliana
  peptide (1)..(669): Ceres Seq. ID no. 12726026
MKQKGFKERGVVVGKKVMVAVRASKEIPKAALLWTLTHVVQPGDRIRLLVVVPSNYTSKKIWGFSRFTSDCASGYGRFLAGTNSDRKDDIHESCSQMMFQLHNVYDAEKINVRIKIVFASLDGVIAAEAKKSNSNWVILDRGLKYEKKCCIEQLECNLVVIKKSQPKVLRLNLVKNADTEHPEAISRLASKSVESRRSSRTGKKLREPFVTPASSPDQEVSSHTDIGTSSISSSDAGASPFLASRVFEGLKKENLWVNDGSKSFFESDSDSDGEKWSPLSMASSSSHPVTTADLLSPSGDLSKAHTETPRKSRFAVLRLALSRKEPEAGKEIRKPDSCLNKSVREVVSLSRKPAPGPPPLCTICQHKAPKFGNPPRWFTYSELETATKGFSKGSFLAEGGFGSVHLGTLPDGQIIAVKQYKIASTQGDREFCSEVEVLSCAQHRNVVMLIGLCVEDGKRLLVYEYICNGSLHSHLYGMGREPLGWSARQKIAVGAARGLRYLHEECRVGCIVHRDMRPNNILLTHDFEPLVGDFGLARWQPEGDKGVETRVIGTFGYLAPEYAQSGQITEKADVYSFGVVLVELITGRKAMDIKRPKGQQCLTEWARPLLQKQAINELLDPRLMNCYCEQEVYCMALCAYLCIRRDPNSRPRMSQVLRMLEGDVVMNPI

SEQ ID NO: 91000 - protein, 652 aa, Arabidopsis thaliana
  peptide (1)..(652): Ceres Seq. ID no. 12726027
MVAVRASKEIPKAALLWTLTHVVQPGDRIRLLVVVPSNYTSKKIWGFSRFTSDCASGYGRFLAGTNSDRKDDIHESCSQMMFQLHNVYDAEKINVRIKIVFASLDGVIAAEAKKSNSNWVILDRGLKYEKKCCIEQLECNLVVIKKSQPKVLRLNLVKNADTEHPEAISRLASKSVESRRSSRTGKKLREPFVTPASSPDQEVSSHTDIGTSSISSSDAGASPFLASRVFEGLKKENLWVNDGSKSFFESDSDSDGEKWSPLSMASSSSHPVTTADLLSPSGDLSKAHTETPRKSRFAVLRLALSRKEPEAGKEIRKPDSCLNKSVREVVSLSRKPAPGPPPLCTICQHKAPKFGNPPRWFTYSELETATKGFSKGSFLAEGGFGSVHLGTLPDGQIIAVKQYKIASTQGDREFCSEVEVLSCAQHRNVVMLIGLCVEDGKRLLVYEYICNGSLHSHLYGMGREPLGWSARQKIAVGAARGLRYLHEECRVGCIVHRDMRPNNILLTHDFEPLVGDFGLARWQPEGDKGVETRVIGTFGYLAPEYAQSGQITEKADVYSFGVVLVELITGRKAMDIKRPKGQQCLTEWARPLLQKQAINELLDPRLMNCYCEQEVYCMALCAYLCIRRDPNSRPRMSQVLRMLEGDVVMNPI

SEQ ID NO: 91001 - protein, 573 aa, Arabidopsis thaliana
  peptide (1)..(573): Ceres Seq. ID no. 12726028
MMFQLHNVYDAEKINVRIKIVFASLDGVIAAEAKKSNSNWVILDRGLKYEKKCCIEQLECNLVVIKKSQPKVLRLNLVKNADTEHPEAISRLASKSVESRRSSRTGKKLREPFVTPASSPDQEVSSHTDIGTSSISSSDAGASPFLASRVFEGLKKENLWVNDGSKSFFESDSDSDGEKWSPLSMASSSSHPVTTADLLSPSGDLSKAHTETPRKSRFAVLRLALSRKEPEAGKEIRKPDSCLNKSVREVVSLSRKPAPGPPPLCTICQHKAPKFGNPPRWFTYSELETATKGFSKGSFLAEGGFGSVHLGTLPDGQIIAVKQYKIASTQGDREFCSEVEVLSCAQHRNVVMLIGLCVEDGKRLLVYEYICNGSLHSHLYGMGREPLGWSARQKIAVGAARGLRYLHEECRVGCIVHRDMRPNNILLTHDFEPLVGDFGLARWQPEGDKGVETRVIGTFGYLAPEYAQSGQITEKADVYSFGVVLVELITGRKAMDIKRPKGQQCLTEWARPLLQKQAINELLDPRLMNCYCEQEVYCMALCAYLCIRRDPNSRPRMSQVLRMLEGDVVMNPI

SEQ ID NO: 91002 - DNA, 894 bp, Arabidopsis thaliana
  misc_feature (1)..(894): Ceres Seq. ID no. 12726064
  misc_feature (1)..(894): Ortholog of  Ceres SEQ ID NO 14303493 as cited in SEQ ID NO 54484
  misc_feature (1)..(894): Ortholog of  Ceres SEQ ID NO 14312258 as cited in SEQ ID NO 57251
atgaagatgaagcggactgcgtcatcgaactcggaagcacagagttacaacgaatcacctcactctcctcttcgatttcattctccgttatcagatgccggagatttacctgaaagccgttacgtttctcctgagggatctccgttcaaaatcgagaatccgaagtcgatcgtagctggtaataagctcacacagttttcgcctcttccctcgccgattccgcctcctcctcctcagtttccgccgccgcggcgtcagaggaatgcgagagttccgatgaattcttcttcggataagtctccgtcgtctatggtggtgcacaatagctgggtgagagaagacggtggacaaactacgacgagaaaagctggagctccgataaacggagaagaatcgacgaggacgacggtgaacagagcgagaggagacgatttagtaagtttgacggcgctagggtttagaattaccgaagtaattttgtgtgtgatttcgttttcaatcatggcggctgataaaactcaaggatggagtggcgattcttatgatcgctacaaagagtacaggtattgtttggctgtgaacgttatagcattcgtttactctgcatttgaagcttgtgacgctgcttgctacatcgcaaaagagagttatatgatcaactgtggatttcatgacttattcgttttctccatggatcaacttcttgcatatcttctaatgtcggcttcttcatgtgctgcgactcgagttgatgattgggtatctaattggggcaaagatgagtttactcaaatggcaaccgcttccatcgcggtttcctttttagcgtttggagcgttcgcggtcagcgcgttgatttcttcttacaggctcttcactcatgcttcctcctag

SEQ ID NO: 91003 - protein, 297 aa, Arabidopsis thaliana
  peptide (1)..(297): Ceres Seq. ID no. 12726065
MKMKRTASSNSEAQSYNESPHSPLRFHSPLSDAGDLPESRYVSPEGSPFKIENPKSIVAGNKLTQFSPLPSPIPPPPPQFPPPRRQRNARVPMNSSSDKSPSSMVVHNSWVREDGGQTTTRKAGAPINGEESTRTTVNRARGDDLVSLTALGFRITEVILCVISFSIMAADKTQGWSGDSYDRYKEYRYCLAVNVIAFVYSAFEACDAACYIAKESYMINCGFHDLFVFSMDQLLAYLLMSASSCAATRVDDWVSNWGKDEFTQMATASIAVSFLAFGAFAVSALISSYRLFTHASS

SEQ ID NO: 91004 - protein, 295 aa, Arabidopsis thaliana
  peptide (1)..(295): Ceres Seq. ID no. 12726066
MKRTASSNSEAQSYNESPHSPLRFHSPLSDAGDLPESRYVSPEGSPFKIENPKSIVAGNKLTQFSPLPSPIPPPPPQFPPPRRQRNARVPMNSSSDKSPSSMVVHNSWVREDGGQTTTRKAGAPINGEESTRTTVNRARGDDLVSLTALGFRITEVILCVISFSIMAADKTQGWSGDSYDRYKEYRYCLAVNVIAFVYSAFEACDAACYIAKESYMINCGFHDLFVFSMDQLLAYLLMSASSCAATRVDDWVSNWGKDEFTQMATASIAVSFLAFGAFAVSALISSYRLFTHASS

SEQ ID NO: 91005 - protein, 205 aa, Arabidopsis thaliana
  peptide (1)..(205): Ceres Seq. ID no. 12726067
MNSSSDKSPSSMVVHNSWVREDGGQTTTRKAGAPINGEESTRTTVNRARGDDLVSLTALGFRITEVILCVISFSIMAADKTQGWSGDSYDRYKEYRYCLAVNVIAFVYSAFEACDAACYIAKESYMINCGFHDLFVFSMDQLLAYLLMSASSCAATRVDDWVSNWGKDEFTQMATASIAVSFLAFGAFAVSALISSYRLFTHASS

SEQ ID NO: 91006 - DNA, 942 bp, Arabidopsis thaliana
  misc_feature (1)..(942): Ceres Seq. ID no. 12726068
  misc_feature (1)..(942): Ortholog of  Ceres SEQ ID NO 15178083 as cited in SEQ ID NO 56185
atcctccaacattcgttgatcaatggctgaagttatgctaccgaggaagatggagattctcaaccattcttcaaagtttggatcaccggatcctcttcatgttcttgccgtcgacgacagtcacgttgatcgtaaattcatcgagcgtttgctcagagtatcttcttgcaaagttactgttgttgatagtgcaacaagagctctccaataccttggtttggatgttgaggaaaaatcagtcggttttgaggatttgaaggttaatttaattatgactgattactcaatgcccggtatgactggatatgaactcttgaagaagatcaaagaatcctcagcttttagagaagtaccggtggtaattatgtcctccgagaacattttgcctcgtattgatagatgtcttgaagaaggggctgaagatttcttactgaagccggtaaaactctcggatgtaaaaagattaagagattctctaatgaaggttgaagatttgtctttcacaaagagtattcagaagagagagctagaaacagagaatgtctaccctgttcactcgcagctcaaacgcgcaaagatctgagctctccgatgcaaattccgtgactggatcttagaaaaagccttttcatatacagaagcttcaagactcaatgcacttgagcctacactgatgattctcgccagcttaatgacctatacaattttccaacccctatggcctttttcgctgattgaattcagtgggtttattcatatagtagtaatgtaaatggtatagagatgagcaaaagctatattatatattatattcattagaggggtcatagcttttttccttacaagagatttgtaagctggcttaatagaagttgttaagaagcctcactttatgtgaataaatgattttgttagctaatcataaacaatcagaagtttcct

SEQ ID NO: 91007 - protein, 186 aa, Arabidopsis thaliana
  peptide (1)..(186): Ceres Seq. ID no. 12726069
MAEVMLPRKMEILNHSSKFGSPDPLHVLAVDDSHVDRKFIERLLRVSSCKVTVVDSATRALQYLGLDVEEKSVGFEDLKVNLIMTDYSMPGMTGYELLKKIKESSAFREVPVVIMSSENILPRIDRCLEEGAEDFLLKPVKLSDVKRLRDSLMKVEDLSFTKSIQKRELETENVYPVHSQLKRAKI

SEQ ID NO: 91008 - protein, 182 aa, Arabidopsis thaliana
  peptide (1)..(182): Ceres Seq. ID no. 12726070
MLPRKMEILNHSSKFGSPDPLHVLAVDDSHVDRKFIERLLRVSSCKVTVVDSATRALQYLGLDVEEKSVGFEDLKVNLIMTDYSMPGMTGYELLKKIKESSAFREVPVVIMSSENILPRIDRCLEEGAEDFLLKPVKLSDVKRLRDSLMKVEDLSFTKSIQKRELETENVYPVHSQLKRAKI

SEQ ID NO: 91009 - protein, 177 aa, Arabidopsis thaliana
  peptide (1)..(177): Ceres Seq. ID no. 12726071
MEILNHSSKFGSPDPLHVLAVDDSHVDRKFIERLLRVSSCKVTVVDSATRALQYLGLDVEEKSVGFEDLKVNLIMTDYSMPGMTGYELLKKIKESSAFREVPVVIMSSENILPRIDRCLEEGAEDFLLKPVKLSDVKRLRDSLMKVEDLSFTKSIQKRELETENVYPVHSQLKRAKI

SEQ ID NO: 91010 - DNA, 985 bp, Arabidopsis thaliana
  misc_feature (1)..(985): Ceres Seq. ID no. 12726116
  misc_feature (1)..(985): Ortholog of  Ceres SEQ ID NO 13663517 as cited in SEQ ID NO 66850
aaagatccaatggacaataacaacaacaacaacaaccagcaaccaccaccaacctccgtctatccacctggctccgccgtcacaaccgtaatccctcctccaccatctggatctgcatcaatagtcaccggaggaggagcgacataccaccacctcctccagcaacaacagcaacagcttcaaatgttctggacataccagagacaagagatcgaacaggtaaacgatttcaaaaaccatcagctccctctagctcgtatcaaaaaaatcatgaaagctgatgaagatgtgcgtatgatctccgccgaagcaccgattctcttcgcgaaagcttgtgagcttttcattctcgaacttacgattagatcttggcttcacgctgaagagaacaaacgtcgtacgcttcagaaaaacgatatcgctgctgcgattactagaaccgatatcttcgatttccttgttgatattgttcctagggaagagatcaaggaagaggaagatgcagcatcggctcttggtggaggaggtatggttgctcccgccgcgagcggtgttccttattattatccaccgatgggacaaccggcggttcctggagggatgatgattggaagaccggcgatggatcctagcggtgtttatgctcagcctccttctcaggcatggcaaagcgtttggcagaattcagctggtggtggtgatgatgtgtcttatggaagtggaggaagtagcggccatggtaatctcgatagccaaggttgagctatggaaccagaagcttagagatttaatcatcatttcgaccctgcaagtgtctgattcttatatgtctatgattcgaatgacttactcgagagagagagagagatcaaacaaaacaaaacaaaaaagctctttttcatttttcctgttaacttataagttattgcagcaaaactgcagacttgcttaactatatattaatctaaatgtgcagattctaatc

SEQ ID NO: 91011 - protein, 253 aa, Arabidopsis thaliana
  peptide (1)..(253): Ceres Seq. ID no. 12726117
KDPMDNNNNNNNQQPPPTSVYPPGSAVTTVIPPPPSGSASIVTGGGATYHHLLQQQQQQLQMFWTYQRQEIEQVNDFKNHQLPLARIKKIMKADEDVRMISAEAPILFAKACELFILELTIRSWLHAEENKRRTLQKNDIAAAITRTDIFDFLVDIVPREEIKEEEDAASALGGGGMVAPAASGVPYYYPPMGQPAVPGGMMIGRPAMDPSGVYAQPPSQAWQSVWQNSAGGGDDVSYGSGGSSGHGNLDSQG

SEQ ID NO: 91012 - protein, 250 aa, Arabidopsis thaliana
  peptide (1)..(250): Ceres Seq. ID no. 12726118
MDNNNNNNNQQPPPTSVYPPGSAVTTVIPPPPSGSASIVTGGGATYHHLLQQQQQQLQMFWTYQRQEIEQVNDFKNHQLPLARIKKIMKADEDVRMISAEAPILFAKACELFILELTIRSWLHAEENKRRTLQKNDIAAAITRTDIFDFLVDIVPREEIKEEEDAASALGGGGMVAPAASGVPYYYPPMGQPAVPGGMMIGRPAMDPSGVYAQPPSQAWQSVWQNSAGGGDDVSYGSGGSSGHGNLDSQG

SEQ ID NO: 91013 - protein, 192 aa, Arabidopsis thaliana; identical to SEQ ID NO: 78253
  peptide (1)..(192): Ceres Seq. ID no. 12726119

SEQ ID NO: 91014 - DNA, 1533 bp, Arabidopsis thaliana
  misc_feature (1)..(1533): Ceres Seq. ID no. 12726138
  misc_feature (1)..(1533): Ortholog of  Ceres SEQ ID NO 14315146 as cited in SEQ ID NO 52929
  misc_feature (1)..(1533): Ortholog of  Ceres SEQ ID NO 14302263 as cited in SEQ ID NO 64701
  misc_feature (1)..(1533): Ortholog of  Ceres SEQ ID NO 13584538 as cited in SEQ ID NO 64739
  misc_feature (1)..(1533): Ortholog of  Ceres SEQ ID NO 15169643 as cited in SEQ ID NO 64826
  misc_feature (1)..(1533): Ortholog of  Ceres SEQ ID NO 15169647 as cited in SEQ ID NO 64930
atgtcgaacatagacatagaaggaatattgaaggagctacctaatgatgggaggactcctaagactaagatcgtttgtacattaggtcctgcgtctaggtctgtgacaatgattgagaagcttcttaaagcaggcatgaatgtagctcgattcaatttctctcacggaagccatgagtaccatcaggagactcttgacaatctccgcaccgctatgcagaataccggcattctcgctgctgttatgcttgatacaaaggggcctgagattcgtaccggtttcttgaaagatgggaaccctatacaactaaaggaaggccaagagatcacaattaccactgattatgacatcaagggcgatgagaaaacgatttccatgagctacaaaaagctcccagtggatgtgaagcccggaaataccatactatgtgcagatggaagcataagtcttgctgtcgtgtcatgtgatccaaacgctgggactgttatatgtcgatgtgaaaatacagccatgctaggtgaaagaaaaaatgtgaatctcccaggtgttgttgttgatctccccacattgactgacaaggatgtagaagatattcttaaatggggtgttccaaacaacatcgatatgattgctctttcatttgttcgcaaaggttcagatcttgttaatgtccggaaagtccttggatcacattccaagagtataatgttgatgtcgaaggttgagaaccaagaaggagtcctgaatttcgatgagattttgcgtgaaactgatgcattcatggttgctcgtggtgatcttgggatggagattccgatagagaagatcttcttggctcagaagatgatgatctacaagtgtaaccttgcaggtaaaccggtggtcacagccactcaaatgctcgagtcgatgatcaaatcaccacggccaacacgagcagaagccacagatgtagcaaacgcagttctcgatggcactgactgtgtgatgcttagcggagaaagtgctgcaggagcttaccctgaaatagcagtgaaaacaatggctaaaatctgcatcgaggcggaatcatcgcttgactacaacacaatcttcaaggagatgattagagcaactccacttccaatgagcactcttgagagtcttgcatcatcagctgtacgaacggcaaacaaagccaaagccaaactcatcatcgtgttgaccagaggaggtacaacagctaaactggtggccaagtatagaccggctgttccaattctatcggtggttgttccggtcttcaccagcgatacgtttaactggagttgcagcgatgagtcaccggcgaggcatagtttgatatatagaggtctgataccggttttgggtgaaggatctgcaaaagcaactgatagtgaatccacagaggagattattgaatctgctttgaagtcagcgacagagaaaggactgtgtaaccatggtgatgctgtggtggctctgcaccgtattggagctgcttcggttatcaagatctgtgtggtgaagtga

SEQ ID NO: 91015 - protein, 510 aa, Arabidopsis thaliana
  peptide (1)..(510): Ceres Seq. ID no. 12726139
MSNIDIEGILKELPNDGRTPKTKIVCTLGPASRSVTMIEKLLKAGMNVARFNFSHGSHEYHQETLDNLRTAMQNTGILAAVMLDTKGPEIRTGFLKDGNPIQLKEGQEITITTDYDIKGDEKTISMSYKKLPVDVKPGNTILCADGSISLAVVSCDPNAGTVICRCENTAMLGERKNVNLPGVVVDLPTLTDKDVEDILKWGVPNNIDMIALSFVRKGSDLVNVRKVLGSHSKSIMLMSKVENQEGVLNFDEILRETDAFMVARGDLGMEIPIEKIFLAQKMMIYKCNLAGKPVVTATQMLESMIKSPRPTRAEATDVANAVLDGTDCVMLSGESAAGAYPEIAVKTMAKICIEAESSLDYNTIFKEMIRATPLPMSTLESLASSAVRTANKAKAKLIIVLTRGGTTAKLVAKYRPAVPILSVVVPVFTSDTFNWSCSDESPARHSLIYRGLIPVLGEGSAKATDSESTEEIIESALKSATEKGLCNHGDAVVALHRIGAASVIKICVVK

SEQ ID NO: 91016 - protein, 474 aa, Arabidopsis thaliana
  peptide (1)..(474): Ceres Seq. ID no. 12726140
MIEKLLKAGMNVARFNFSHGSHEYHQETLDNLRTAMQNTGILAAVMLDTKGPEIRTGFLKDGNPIQLKEGQEITITTDYDIKGDEKTISMSYKKLPVDVKPGNTILCADGSISLAVVSCDPNAGTVICRCENTAMLGERKNVNLPGVVVDLPTLTDKDVEDILKWGVPNNIDMIALSFVRKGSDLVNVRKVLGSHSKSIMLMSKVENQEGVLNFDEILRETDAFMVARGDLGMEIPIEKIFLAQKMMIYKCNLAGKPVVTATQMLESMIKSPRPTRAEATDVANAVLDGTDCVMLSGESAAGAYPEIAVKTMAKICIEAESSLDYNTIFKEMIRATPLPMSTLESLASSAVRTANKAKAKLIIVLTRGGTTAKLVAKYRPAVPILSVVVPVFTSDTFNWSCSDESPARHSLIYRGLIPVLGEGSAKATDSESTEEIIESALKSATEKGLCNHGDAVVALHRIGAASVIKICVVK

SEQ ID NO: 91017 - protein, 465 aa, Arabidopsis thaliana
  peptide (1)..(465): Ceres Seq. ID no. 12726141
MNVARFNFSHGSHEYHQETLDNLRTAMQNTGILAAVMLDTKGPEIRTGFLKDGNPIQLKEGQEITITTDYDIKGDEKTISMSYKKLPVDVKPGNTILCADGSISLAVVSCDPNAGTVICRCENTAMLGERKNVNLPGVVVDLPTLTDKDVEDILKWGVPNNIDMIALSFVRKGSDLVNVRKVLGSHSKSIMLMSKVENQEGVLNFDEILRETDAFMVARGDLGMEIPIEKIFLAQKMMIYKCNLAGKPVVTATQMLESMIKSPRPTRAEATDVANAVLDGTDCVMLSGESAAGAYPEIAVKTMAKICIEAESSLDYNTIFKEMIRATPLPMSTLESLASSAVRTANKAKAKLIIVLTRGGTTAKLVAKYRPAVPILSVVVPVFTSDTFNWSCSDESPARHSLIYRGLIPVLGEGSAKATDSESTEEIIESALKSATEKGLCNHGDAVVALHRIGAASVIKICVVK

SEQ ID NO: 91018 - DNA, 420 bp, Arabidopsis thaliana
  misc_feature (1)..(420): Ceres Seq. ID no. 12726142
  misc_feature (1)..(420): Ortholog of  Ceres SEQ ID NO 12584421 as cited in SEQ ID NO 68035
atgcaattgtttctcaaggatatagttccagcggcgcagaacaacatagacacgcgtttcatcatcctcgacaaagccaaatcgtctgcggcaaacgggaagaattattgtattgcgttggcggcggatgaaacggctgcggttcacatacagctgtggggagatgagtgcgacgcgttcgaggcaggagatatcgtgaagctcaccaatgggattttctcatacgtgcgtaacagtggacttattctcagagctgggaagcgtgggaagatggagaagatgggagagttcacggttgcgtttgtcgaaacgccaaacattagtgagatccaatggattcctgatcctgagaatcccaaacgctatattcagagcggcgtcgtttcagcttattcccgtatcttccctcctttgccttga

SEQ ID NO: 91019 - protein, 139 aa, Arabidopsis thaliana
  peptide (1)..(139): Ceres Seq. ID no. 12726143
MQLFLKDIVPAAQNNIDTRFIILDKAKSSAANGKNYCIALAADETAAVHIQLWGDECDAFEAGDIVKLTNGIFSYVRNSGLILRAGKRGKMEKMGEFTVAFVETPNISEIQWIPDPENPKRYIQSGVVSAYSRIFPPLP

SEQ ID NO: 91020 - protein, 70 aa, Arabidopsis thaliana
  peptide (1)..(70): Ceres Seq. ID no. 12726144
MGFSHTCVTVDLFSELGSVGRWRRWESSRLRLSKRQTLVRSNGFLILRIPNAIFRAASFQLIPVSSLLCL

SEQ ID NO: 91021 - DNA, 2063 bp, Arabidopsis thaliana
  misc_feature (1)..(2063): Ceres Seq. ID no. 12726145
  misc_feature (1)..(2063): Ortholog of  Ceres SEQ ID NO 15179672 as cited in SEQ ID NO 0
catttctctcttcaaccccatgttttcgttctcttccgtttagagtgttttcagctcctctatggctcactcggggaacggtgaaagtttccatgatcctcttcgaggattcattcaaagaaattgctttagatggaacaatcagaaattgatcttacaatgtttcatggccttagcttttgtgggaatcacttcgtcaacaactcaaccagatatcgaaggaggagctctgttgcagctcagagattcgcttaatgattcgagcaatcgtctaaaatggacacgcgattttgtgagcccttgctatagttggtcttatgttacctgcagaggccagagtgttgtggctctaaatcttgcctcgagtggattcacaggaacactctctccagctattacaaaactgaagttcttggttaccttagagttacagaacaatagtttatctggtgccttaccagattctcttgggaacatggttaatctacagactttaaacctatcagtgaatagtttcagcggatcgataccagcgagctggagtcagctctcgaatctaaagcacttggatctctcatccaataatttaacaggaagcatcccaacacaattcttctcaatcccaacattcgatttttcaggaactcagcttatatgcggtaaaagtttgaatcagccttgttcttcaagttctcgtcttccagtcacatcctccaagaaaaagctgagagacattactttgactgcaagttgtgttgcttctataatcttattccttggagcaatggttatgtatcatcaccatcgcgtccgcagaaccaaatacgacatcttttttgatgtagctggggaagatgacaggaagatttcctttggacaactaaaacgattctctttacgtgaaatccagctcgcaacagatagtttcaacgagagcaatttgataggacaaggaggatttggtaaagtatacagaggtttgcttccagacaaaacaaaagttgcagtgaaacgccttgcggattacttcagtcctggaggagaagctgctttccaaagagagattcagctcataagcgttgcggttcataaaaatctcttacgccttattggcttctgcacaacttcctctgagagaatccttgtttatccatacatggaaaatcttagtgttgcatatcgactaagagatttgaaagcgggagaggaaggattagactggccaacaaggaagcgtgtagcttttggttcagctcacggtttagagtatctacacgaacattgtaacccgaagatcatacaccgcgatctcaaggctgcaaacatacttttagacaacaattttgagccagttcttggagatttcggtttagctaagcttgtggacacatctctgactcatgtcacaactcaagtccgaggcacaatgggtcacattgcgccagagtatctctgcacaggaaaatcatctgaaaaaaccgatgtttttggttacggtataacgcttcttgagcttgttactggtcagcgcgcaatcgatttttcacgcttggaagaagaggaaaatattctcttgcttgatcatataaagaagttgcttagagaacagagacttagagacattgttgatagcaatttgactacatatgactccaaagaagttgaaacaatcgttcaagtggctcttctctgcacacaaggctcaccagaagatagaccagcgatgtctgaagtggtcaaaatgcttcaagggactggtggtttggctgagaaatggactgaatgggaacaacttgaagaagttaggaacaaagaagcattgttgcttccgactttaccggctacttgggatgaagaagaaaccaccgttgatcaagaatctatccgattatcgacagcaagatgaagaagaaacagagagagaaagatatctatgaaaacaaacttgcattacagaagataaacttagaaagtattttaagctgctaattgtattgaaccaggtggggaaaacgaagcaaacacacaacgttgatttgtgtaatagatgatatgatatacat

SEQ ID NO: 91022 - protein, 614 aa, Arabidopsis thaliana
  peptide (1)..(614): Ceres Seq. ID no. 12726146
MAHSGNGESFHDPLRGFIQRNCFRWNNQKLILQCFMALAFVGITSSTTQPDIEGGALLQLRDSLNDSSNRLKWTRDFVSPCYSWSYVTCRGQSVVALNLASSGFTGTLSPAITKLKFLVTLELQNNSLSGALPDSLGNMVNLQTLNLSVNSFSGSIPASWSQLSNLKHLDLSSNNLTGSIPTQFFSIPTFDFSGTQLICGKSLNQPCSSSSRLPVTSSKKKLRDITLTASCVASIILFLGAMVMYHHHRVRRTKYDIFFDVAGEDDRKISFGQLKRFSLREIQLATDSFNESNLIGQGGFGKVYRGLLPDKTKVAVKRLADYFSPGGEAAFQREIQLISVAVHKNLLRLIGFCTTSSERILVYPYMENLSVAYRLRDLKAGEEGLDWPTRKRVAFGSAHGLEYLHEHCNPKIIHRDLKAANILLDNNFEPVLGDFGLAKLVDTSLTHVTTQVRGTMGHIAPEYLCTGKSSEKTDVFGYGITLLELVTGQRAIDFSRLEEEENILLLDHIKKLLREQRLRDIVDSNLTTYDSKEVETIVQVALLCTQGSPEDRPAMSEVVKMLQGTGGLAEKWTEWEQLEEVRNKEALLLPTLPATWDEEETTVDQESIRLSTAR

SEQ ID NO: 91023 - protein, 579 aa, Arabidopsis thaliana
  peptide (1)..(579): Ceres Seq. ID no. 12726147
MALAFVGITSSTTQPDIEGGALLQLRDSLNDSSNRLKWTRDFVSPCYSWSYVTCRGQSVVALNLASSGFTGTLSPAITKLKFLVTLELQNNSLSGALPDSLGNMVNLQTLNLSVNSFSGSIPASWSQLSNLKHLDLSSNNLTGSIPTQFFSIPTFDFSGTQLICGKSLNQPCSSSSRLPVTSSKKKLRDITLTASCVASIILFLGAMVMYHHHRVRRTKYDIFFDVAGEDDRKISFGQLKRFSLREIQLATDSFNESNLIGQGGFGKVYRGLLPDKTKVAVKRLADYFSPGGEAAFQREIQLISVAVHKNLLRLIGFCTTSSERILVYPYMENLSVAYRLRDLKAGEEGLDWPTRKRVAFGSAHGLEYLHEHCNPKIIHRDLKAANILLDNNFEPVLGDFGLAKLVDTSLTHVTTQVRGTMGHIAPEYLCTGKSSEKTDVFGYGITLLELVTGQRAIDFSRLEEEENILLLDHIKKLLREQRLRDIVDSNLTTYDSKEVETIVQVALLCTQGSPEDRPAMSEVVKMLQGTGGLAEKWTEWEQLEEVRNKEALLLPTLPATWDEEETTVDQESIRLSTAR

SEQ ID NO: 91024 - protein, 476 aa, Arabidopsis thaliana
  peptide (1)..(476): Ceres Seq. ID no. 12726148
MVNLQTLNLSVNSFSGSIPASWSQLSNLKHLDLSSNNLTGSIPTQFFSIPTFDFSGTQLICGKSLNQPCSSSSRLPVTSSKKKLRDITLTASCVASIILFLGAMVMYHHHRVRRTKYDIFFDVAGEDDRKISFGQLKRFSLREIQLATDSFNESNLIGQGGFGKVYRGLLPDKTKVAVKRLADYFSPGGEAAFQREIQLISVAVHKNLLRLIGFCTTSSERILVYPYMENLSVAYRLRDLKAGEEGLDWPTRKRVAFGSAHGLEYLHEHCNPKIIHRDLKAANILLDNNFEPVLGDFGLAKLVDTSLTHVTTQVRGTMGHIAPEYLCTGKSSEKTDVFGYGITLLELVTGQRAIDFSRLEEEENILLLDHIKKLLREQRLRDIVDSNLTTYDSKEVETIVQVALLCTQGSPEDRPAMSEVVKMLQGTGGLAEKWTEWEQLEEVRNKEALLLPTLPATWDEEETTVDQESIRLSTAR

SEQ ID NO: 91025 - DNA, 2665 bp, Arabidopsis thaliana
  misc_feature (1)..(2665): Ceres Seq. ID no. 12726173
  misc_feature (1)..(2665): Ortholog of  Ceres SEQ ID NO 13582534 as cited in SEQ ID NO 57409
ctagaggagtcattgttttcagtttttcaaaacaaaattttattcatacattcagatctgaaggagaactcttttgaacacatgggaatacacttgggagagattggtattgttctctttccttggtttctgtggttaagtttattcctaagttgtggctatgcagctataactatttcaagtcctttgacattgggacaaactctgagttcccctggtggattttatgagttaggattcttcagtcctaacaactctcagaatcagtatgtagggatctggttcaagaaaattacaccacgggtggttgtgtgggtggctaacagagaaaagccgatcacaacccctgtggcaaatcttactatcagcagaaatggtagtcttattttgctagacagtagtaaaaatgttgtttggtcaaccagaagaccttccatatctaataagtgtcatgcaaagctcttagatacaggaaatcttgtcatagtagatgatgtttcagaaaatcttttgtggcaaagttttgagaatcctggtgatactatgctgccttactcatcgctgatgtacaaccttgccactggggagaagcgagtattatcttcgtggaaaagccacactgatccatcccctggtgatttcgtagttcgactaacaccacaagtgccagcacagatcgttactatgagaggctcatcggtttataagagaagcggtccatgggctaagaccggtttcactggcgtaccactaatggatgaatcatacacaagtcctttcagcctttcccaagatgtaggaaatggaacagggctcttctcttatttacagagaagttctgaacttacacgagttatcataacatcagagggatatctaaagacttttcggtacaatgggacaggctgggttctggactttatcactccagcaaatttatgtgatttgtatggtgcatgtggaccttttgggctgtgtgtgacgtccaatcccacaaagtgtaaatgcatgaaagggtttgtaccaaaatacaaggaggagtggaagcgcgggaacatgacttctggatgtatgcgacgtacagaattatcttgtcaggcaaacttatctacaaagacacaaggaaaaggtgtagacgtcttctatcgtctggccaatgtaaagcctccggatctctacgaatatgcaagctttgtggatgcagatcaatgccaccagggttgtctcagcaattgctcttgctctgcttttgcgtatattactggaattggttgtttgctttggaatcatgagctaatagacacaattagatattccgttggaggagagtttctttccattcgtcttgcaagttcagaactggctggaagcaggaggaccaagattattgttggtagtatcagcctttccatttttgtgattttggcctttggctcatataagtactggagatacagagcaaaacaaaatgttgggccaacttgggcattcttcaacaattcacaagattcatggaaaaatggtttggaaccacaagaaatctcaggtttaacattctttgagatgaataccatacgagctgctaccaataacttcaatgtctcaaacaaactcggtcaaggtggatttggtccagtttataagggaacactgtcagacaagaaggatatagccgttaaacgcctttctagcagctctgggcagggtacagaagagttcatgaacgaaataaaactcatctcaaaattacaacacagaaacttggttcgacttttgggatgctgcattgatggagaagaaaaactactaatttatgagtttctagtgaacaaaagcctcgacacttttctctttgatttgacgctaaagcttcagattgattggcctaagaggttcaacatcattcaaggtgtttcacgtgggcttctctatctccatcgtgactcttgcatgagggtcatacatcgagatctgaaggtcagcaacattctcttggacgacaaaatgaacccaaaaatatcagatttcggattggctcggatgtttcaaggaacccaacatcaagacaacactcgtaaggttgttggaactctaggatacatgtctcctgagtatgcatggacaggaatgttctcagagaagtccgacatatatgcttttggagttctcctgttagaaatcataagtgggaagaagatttcaagcttttgctgtggagaggaaggcaaaacccttcttggacatgcatgggaatgttggctcgagaccggtggagtggatctattggatgaagatattagcagctcgtgttctccagttgaagttgaagtcgctcgatgtgttcagattggtctactctgcatccaacagcaagctgttgacagaccaaacatagcacaagtagtgaccatgatgacaagtgcaacagatcttccgagaccaaaacaaccactctttgcattgcagattcaagatcaagagagtgttgtgtcagtctcaaagtctgtgaatcatgttacacaaactgagatatatgggcgataaagtttgctttattatgtattaactgcagactgaaatgtaataccagcaatagagtgtaatcacttaatttaaattgtacattacgatagtttggttgttaataaatatgatgttaagaaag

SEQ ID NO: 91026 - protein, 847 aa, Arabidopsis thaliana
  peptide (1)..(847): Ceres Seq. ID no. 12726174
LEESLFSVFQNKILFIHSDLKENSFEHMGIHLGEIGIVLFPWFLWLSLFLSCGYAAITISSPLTLGQTLSSPGGFYELGFFSPNNSQNQYVGIWFKKITPRVVVWVANREKPITTPVANLTISRNGSLILLDSSKNVVWSTRRPSISNKCHAKLLDTGNLVIVDDVSENLLWQSFENPGDTMLPYSSLMYNLATGEKRVLSSWKSHTDPSPGDFVVRLTPQVPAQIVTMRGSSVYKRSGPWAKTGFTGVPLMDESYTSPFSLSQDVGNGTGLFSYLQRSSELTRVIITSEGYLKTFRYNGTGWVLDFITPANLCDLYGACGPFGLCVTSNPTKCKCMKGFVPKYKEEWKRGNMTSGCMRRTELSCQANLSTKTQGKGVDVFYRLANVKPPDLYEYASFVDADQCHQGCLSNCSCSAFAYITGIGCLLWNHELIDTIRYSVGGEFLSIRLASSELAGSRRTKIIVGSISLSIFVILAFGSYKYWRYRAKQNVGPTWAFFNNSQDSWKNGLEPQEISGLTFFEMNTIRAATNNFNVSNKLGQGGFGPVYKGTLSDKKDIAVKRLSSSSGQGTEEFMNEIKLISKLQHRNLVRLLGCCIDGEEKLLIYEFLVNKSLDTFLFDLTLKLQIDWPKRFNIIQGVSRGLLYLHRDSCMRVIHRDLKVSNILLDDKMNPKISDFGLARMFQGTQHQDNTRKVVGTLGYMSPEYAWTGMFSEKSDIYAFGVLLLEIISGKKISSFCCGEEGKTLLGHAWECWLETGGVDLLDEDISSSCSPVEVEVARCVQIGLLCIQQQAVDRPNIAQVVTMMTSATDLPRPKQPLFALQIQDQESVVSVSKSVNHVTQTEIYGR

SEQ ID NO: 91027 - protein, 820 aa, Arabidopsis thaliana; identical to SEQ ID NO: 77556
  peptide (1)..(820): Ceres Seq. ID no. 12726175

SEQ ID NO: 91028 - protein, 666 aa, Arabidopsis thaliana; identical to SEQ ID NO: 85276
  peptide (1)..(666): Ceres Seq. ID no. 12726176

SEQ ID NO: 91029 - DNA, 2827 bp, Arabidopsis thaliana
  misc_feature (1)..(2827): Ceres Seq. ID no. 12726177
  misc_feature (1)..(2827): Ortholog of  Ceres SEQ ID NO 13584744 as cited in SEQ ID NO 69137
aagccgctcgttcttcgagacaaaacacactacactctttctctctcactcactcttcatctcttttcttctttctctctctcctaaaaatccgacgaaattatgattcactttaccttttaatcaggaatatccctgtttcacccttcttcttcttcttcttcttcttcttcctcgtgttttttttccataacattccctctgaatcttcgttttttattggaaagaaacaatctaatccaagttcaagggttttctcatcttcagtggctgaagttatgagctttacaagatgggaagtgttctttggtctctctgttttagccttgacaatgcctttctcagctggagttactaatctacgagatgtttcggcgattaataacttgtatatcactttgggagcaccatctctacatcattggcttgcttttggaggagacccttgtggagaaaagtggcaaggtgtggtgtgtgactcctcaaacatcacagaaataaggatacctggcatgaaggtaggtggaggcttaagtgatactctggctgatttttcatctatccaagtcatggacttcagtagcaatcatatttcagggacaattccgcaggctttgccttcttccatccgaaacctatctctctcaagcaatcgcttcactgggaacattccctttacattgtcctttctatccgatttgtctgaactgtcattgggaagcaatcttctatcaggagagataccagattactttcagcagctatcaaaactgacaaaactggacttatcgtctaacatactggaggggcatttaccttcttccatgggagacttagcttctcttaagatattgtatttgcaggacaacaagctcacaggaacacttgatgttatagaggatcttttcttaaccgatttgaatgtagaaaacaacttattctcgggacctataccgccaaatctattgaaaattccaaacttcaaaaaagatggaactccgttcaatacatcgattataacaccaccgcctccgcctgtggttgatcctcctcccgctactcaccgtgctcctcctgttccccgtatccctcctgtttctggtgttcccccagcaccttttgctccttttgctccactgcaaccacaacaacatccaccaccatcaccacctctggtctggtcaccaccttcttctgataatggaggaggagatccctggaactctgtgtcagggcaacctaccttgcaaatatcacctccttcaggttcaggatcaggaaaattctggtccactcaaagaatcattctagtagtttcttcagtggccataattgttcttgtatccggtttgtgtgttacactttggagatgttgcagaagtaaaatatataaccgatattacagtggagctcgtaaagatttacaacgaccatacttcaataagcctccatctcaaccaacccccactatgggaaaagtttctcgggagcctatggttaagcctttcgatggatatggagctggagacaggaaatatgggtatccaatgccacagcgggctgaagagagccggagagcaatgcctcctacttcatattataataaggatgttaatacacctcaaaagccgctgcaacaaccaccgaggcagttccagtccaatgatactgcttcaaagagagcggctcatttccccccgggcttgaattcctcatcttctgctactgttttcaccattgcttcacttcagcaatacacaaataatttctcagaagagaatataatcggggaagggtcgattggtaatgtctacagagctgagcttcgtcatggaaagtttcttgcggtgaagaagctgagcaataccatcaacagaacacagagtgacggcgaattcctcaatctagtctccaatgtgttgaagcttaaacgcggtcatatattggagcttcttggttactgtaacgagtttggtcaaaggttacttgtgtatgagtactgtcctaatggatcacttcaagatgcactacatttggatcgcaagttgcacaagaagctcacttggaatgtacgtataaatattgcattaggagcttcaaaggcattgcagtttcttcatgaggtatgtcaaccgccggttgttcaccagaatttcaagtcttccaaggttcttcttgatggaaagctctcagtacgtgttgcagacagcggtttggcttatatgttaccaccacgcccaacgagtcagatggcgggttatgccgctcctgaggttgagtatggaagctacacttgtcagagcgacgtatttagccttggggttgtaatgttagaactgctcactggacgcagaccatttgacaggacaaggccgaggggacatcaaacactagctcagtgggcgattcctcggcttcatgacatcgatgcgttgacaagaatggttgatccgtcattacacggagcgtatccaatgaaatcattgtcacgttttgcagatatcatatcacgttcactgcagatggaaccaggatttagaccgccgatatcagaaatagtccaagatcttcaacatatgatctaagatacacaaccttggactaagacgcagaagcaatagtttattgtcagattcttgttctttgtcctttgatgaatgaaagtatttcttttgtattataataacactttatgtatgttgttggctgtatgaaatgagctatgggatcatcattatgtaaccccaatcccattaccggctcaaacattattcaccaacctgatcatgtatttagattctattttctgaaaaggataaacattttt

SEQ ID NO: 91030 - protein, 860 aa, Arabidopsis thaliana; identical to SEQ ID NO: 46832
  peptide (1)..(860): Ceres Seq. ID no. 12726178

SEQ ID NO: 91031 - protein, 768 aa, Arabidopsis thaliana; identical to SEQ ID NO: 46833
  peptide (1)..(768): Ceres Seq. ID no. 12726179

SEQ ID NO: 91032 - protein, 750 aa, Arabidopsis thaliana; identical to SEQ ID NO: 46834
  peptide (1)..(750): Ceres Seq. ID no. 12726180

SEQ ID NO: 91033 - DNA, 562 bp, Arabidopsis thaliana
  misc_feature (1)..(562): Ceres Seq. ID no. 12726188
  misc_feature (1)..(562): Ortholog of  Ceres SEQ ID NO 13638769 as cited in SEQ ID NO 51773
  misc_feature (1)..(562): Ortholog of  Ceres SEQ ID NO 12583723 as cited in SEQ ID NO 58297
  misc_feature (1)..(562): Ortholog of  Ceres SEQ ID NO 12623263 as cited in SEQ ID NO 60988
  misc_feature (1)..(562): Ortholog of  Ceres SEQ ID NO 15225568 as cited in SEQ ID NO 61512
  misc_feature (1)..(562): Ortholog of  Ceres SEQ ID NO 13664236 as cited in SEQ ID NO 66530
  misc_feature (1)..(562): Ortholog of  Ceres SEQ ID NO 13590249 as cited in SEQ ID NO 68385
  misc_feature (1)..(562): Ortholog of  Ceres SEQ ID NO 12635807 as cited in SEQ ID NO 0
  misc_feature (1)..(562): Ortholog of  Ceres SEQ ID NO 15179245 as cited in SEQ ID NO 0
gacattttcacaaagccacaccaactcactcacaaaatctgtagaatcatctttcaacaatggcttccactgctctctccagcgcaatcgtaagcacctctttcctccgccgtcaacagacaccaatcagcctcagatccctcccgtttgccaacacacaatctctcttcggcctcaaatcttccaccgctcgcggcggccgcgtcacggccatggctacctacaaggtcaagttcatcacacctgagggagaacaagaggtcgaatgcgaagaagatgtctacgtcctcgacgctgctgaggaagccggactcgacttgccctactcatgccgtgccggttcttgctcaagttgcgccgggaaagtcgtctctggttctattgaccagtcggaccagagcttcttagacgatgaacagatgagtgagggctatgtcttgacctgtgtggcttatccgacttctgatgtcgtcatcgaaacccacaaagaagaagccattatgtaaaattttaaagctttttgatgaatttcatcaaaagagaaattacttgatgtttaagt

SEQ ID NO: 91034 - protein, 148 aa, Arabidopsis thaliana; identical to SEQ ID NO: 34708
  peptide (1)..(148): Ceres Seq. ID no. 12726189

SEQ ID NO: 91035 - protein, 97 aa, Arabidopsis thaliana; identical to SEQ ID NO: 34709
  peptide (1)..(97): Ceres Seq. ID no. 12726190

SEQ ID NO: 91036 - protein, 81 aa, Arabidopsis thaliana
  peptide (1)..(81): Ceres Seq. ID no. 12726191
TFSQSHTNSLTKSVESSFNNGFHCSLQRNRKHLFPPPSTDTNQPQIPPVCQHTISLRPQIFHRSRRPRHGHGYLQGQVHHT

SEQ ID NO: 91037 - DNA, 871 bp, Arabidopsis thaliana
  misc_feature (1)..(871): Ceres Seq. ID no. 12726254
  misc_feature (1)..(871): Ortholog of  Ceres SEQ ID NO 13597333 as cited in SEQ ID NO 63974
  misc_feature (1)..(871): Ortholog of  Ceres SEQ ID NO 13599307 as cited in SEQ ID NO 0
atggcggtctcgtttaatacaacgcttcaccagccttctctgagtccgagctgtagcatcaagctttattctgggttaaagcctcaatctgcaagctttttggcaagtgggtatcagaatttgaacaaggagttctatggaagagtttataagagtctgcaatctgggactgggaaagcgagcaggtcacgggtaaagatgatgccaataggaacaccgagagtaccctacagaaaccgagaagaagggacttggcaatgggttgatatatggaatgccctttatcgagagcgtgtaatcttcattggacaaaacattgatgaagagtttagcaaccagatattagcaaccatgttgtaccttgatactcttgatgactcgaggaggatttatatgtacctaaatggtccgggtggtgatcttactccaagtctagccatctatgatacaatgaagagcttgaaaagtccggttgggacacattgcgttgggcttgcttacaaccttgcaggttttcttcttgcggctggagaaaagggtcaccgatttgcgatgccattatcaagaatcgccctccagtcaccagctggtgcagcccgtggtcaggctgatgatatccaaaatgaagcaaaagagctttcaaggataagagactacctcttcaatgaactagccaagaatacaggccagcctgcggaaagggtcttcaaagacttgagccgggtgaaaaggttcaatgcagaggaagcaatcgagtatggacttattgataagattgttagaccaccgcgcatcaaagaagacgctcctcgccaagacgaaagcgcagggctaggctagtctttttgtttgtttgttatgtcaaaagttt

SEQ ID NO: 91038 - protein, 279 aa, Arabidopsis thaliana; identical to SEQ ID NO: 26212
  peptide (1)..(279): Ceres Seq. ID no. 12726255

SEQ ID NO: 91039 - protein, 213 aa, Arabidopsis thaliana; identical to SEQ ID NO: 26213
  peptide (1)..(213): Ceres Seq. ID no. 12726256

SEQ ID NO: 91040 - protein, 212 aa, Arabidopsis thaliana; identical to SEQ ID NO: 27066
  peptide (1)..(212): Ceres Seq. ID no. 12726257

SEQ ID NO: 91041 - DNA, 654 bp, Arabidopsis thaliana
  misc_feature (1)..(654): Ceres Seq. ID no. 12726274
  misc_feature (1)..(654): Ortholog of  Ceres SEQ ID NO 12625452 as cited in SEQ ID NO 63642
atgatgaatgtttctggagaatgtgtaggccgtgaaagatgcgaggaattagccaagtcttcttcgttttaccggaaagtttactcggagcgaattaacttttgcttcgatgtaggatgtgccatatatgtttacactagaatggtcaacaagttcaagattgaaggatgtaatgcaccaattccaaaaggtagatctaagactttgctacattctctctttcaaccagctcgtgcctctgctattcgccggattgatgctgggaatgattgtatcatcattgttcatatcgacttcaaagaccctaaatccctaccagagtcaaatgaaagatcatttcctgagaaccttgaatgtattctaggtactgagcttccaaagcctctaggtctccaagtggaagacgatcaacaacaagttgaatgtgggatttgctatgcgcagtttctacccaccgatgaggagctcggagctagaagtgggacacgaacagattacacatgtgaaaacatcagttgcaacaagtctttccatagcctctgcctcacagactggttaaggtctatcacaacaacaagacagtcatttgatgttctgtttgggaactgcccttattgttcagacccagttgcagtcaaaaccagcaacaaatag

SEQ ID NO: 91042 - protein, 217 aa, Arabidopsis thaliana
  peptide (1)..(217): Ceres Seq. ID no. 12726275
MMNVSGECVGRERCEELAKSSSFYRKVYSERINFCFDVGCAIYVYTRMVNKFKIEGCNAPIPKGRSKTLLHSLFQPARASAIRRIDAGNDCIIIVHIDFKDPKSLPESNERSFPENLECILGTELPKPLGLQVEDDQQQVECGICYAQFLPTDEELGARSGTRTDYTCENISCNKSFHSLCLTDWLRSITTTRQSFDVLFGNCPYCSDPVAVKTSNK

SEQ ID NO: 91043 - protein, 216 aa, Arabidopsis thaliana
  peptide (1)..(216): Ceres Seq. ID no. 12726276
MNVSGECVGRERCEELAKSSSFYRKVYSERINFCFDVGCAIYVYTRMVNKFKIEGCNAPIPKGRSKTLLHSLFQPARASAIRRIDAGNDCIIIVHIDFKDPKSLPESNERSFPENLECILGTELPKPLGLQVEDDQQQVECGICYAQFLPTDEELGARSGTRTDYTCENISCNKSFHSLCLTDWLRSITTTRQSFDVLFGNCPYCSDPVAVKTSNK

SEQ ID NO: 91044 - protein, 170 aa, Arabidopsis thaliana
  peptide (1)..(170): Ceres Seq. ID no. 12726277
MVNKFKIEGCNAPIPKGRSKTLLHSLFQPARASAIRRIDAGNDCIIIVHIDFKDPKSLPESNERSFPENLECILGTELPKPLGLQVEDDQQQVECGICYAQFLPTDEELGARSGTRTDYTCENISCNKSFHSLCLTDWLRSITTTRQSFDVLFGNCPYCSDPVAVKTSNK

SEQ ID NO: 91045 - DNA, 1236 bp, Arabidopsis thaliana
  misc_feature (1)..(1236): Ceres Seq. ID no. 12726282
  misc_feature (1)..(1236): Ortholog of  Ceres SEQ ID NO 14315223 as cited in SEQ ID NO 52527
  misc_feature (1)..(1236): Ortholog of  Ceres SEQ ID NO 14307085 as cited in SEQ ID NO 54749
aaaaaaagaattacaattaataagaacaagatcaagaatcaagaatcaagaaaatgggaagagcaccgtgttgtgataaggccaacgtgaagaaagggccttggtctcctgaggaagacgccaaactcaaagattacatcgagaatagtggcacaggaggcaactggattgctttgcctcagaaaattggtttaaggagatgtgggaagagttgcaggctaaggtggctcaactatttgagaccaaacatcaaacatggtggcttctccgaggaagaagacaacatcatttgtaacctctatgttactattggtagcaggtggtctataattgctgcacaattgccgggaagaaccgacaacgatatcaaaaactattggaacacgaggctgaagaagaagcttctgaacaaacaaaggaaagagttccaagaagcgcgaatgaagcaagagatggtgatgatgaaaaggcaacaacaaggacaaggacaaggtcaaagtaatggtagtacggatctttatcttaacaacatgtttggatcatcaccatggccattactaccacaacttcctcctccacatcatcaaatacctcttggaatgatggaaccaacaagctgtaactactaccaaacgacaccgtcttgtaacctagaacaaaagccattgatcacactcaagaacatggtcaagattgaagaagaacaggaaaggacaaaccctgatcatcatcatcaagattctgtcacaaacccttttgatttctctttctctcagcttttgttagatcccaattactatctgggatcaggagggggaggagaaggagattttgctatcatgagcagcagcacaaactcaccattaccaaacacaagtagtgatcaacatccaagtcaacagcaagagattcttcaatggtttgggagcagtaactttcagacagaagcaatcaacgatatgttcataaacaacaacaacaacatagtgaatcttgagaccatcgagaacacaaaagtctatggagacgcctcagtagccggagccgctgtccgagcagctttgggcggagggacaacgagtacatcggcggatcaaagtacaataagttgggaggatataacttctctagttaattccgaagatgcaagttacttcaatgcgccaaatcatgtgtaacattttgtttaaaactttatttgtacttaaatacataaagaggggttttctattttgt

SEQ ID NO: 91046 - protein, 374 aa, Arabidopsis thaliana
  peptide (1)..(374): Ceres Seq. ID no. 12726283
MGRAPCCDKANVKKGPWSPEEDAKLKDYIENSGTGGNWIALPQKIGLRRCGKSCRLRWLNYLRPNIKHGGFSEEEDNIICNLYVTIGSRWSIIAAQLPGRTDNDIKNYWNTRLKKKLLNKQRKEFQEARMKQEMVMMKRQQQGQGQGQSNGSTDLYLNNMFGSSPWPLLPQLPPPHHQIPLGMMEPTSCNYYQTTPSCNLEQKPLITLKNMVKIEEEQERTNPDHHHQDSVTNPFDFSFSQLLLDPNYYLGSGGGGEGDFAIMSSSTNSPLPNTSSDQHPSQQQEILQWFGSSNFQTEAINDMFINNNNNIVNLETIENTKVYGDASVAGAAVRAALGGGTTSTSADQSTISWEDITSLVNSEDASYFNAPNHV

SEQ ID NO: 91047 - protein, 245 aa, Arabidopsis thaliana
  peptide (1)..(245): Ceres Seq. ID no. 12726284
MKQEMVMMKRQQQGQGQGQSNGSTDLYLNNMFGSSPWPLLPQLPPPHHQIPLGMMEPTSCNYYQTTPSCNLEQKPLITLKNMVKIEEEQERTNPDHHHQDSVTNPFDFSFSQLLLDPNYYLGSGGGGEGDFAIMSSSTNSPLPNTSSDQHPSQQQEILQWFGSSNFQTEAINDMFINNNNNIVNLETIENTKVYGDASVAGAAVRAALGGGTTSTSADQSTISWEDITSLVNSEDASYFNAPNHV

SEQ ID NO: 91048 - protein, 241 aa, Arabidopsis thaliana
  peptide (1)..(241): Ceres Seq. ID no. 12726285
MVMMKRQQQGQGQGQSNGSTDLYLNNMFGSSPWPLLPQLPPPHHQIPLGMMEPTSCNYYQTTPSCNLEQKPLITLKNMVKIEEEQERTNPDHHHQDSVTNPFDFSFSQLLLDPNYYLGSGGGGEGDFAIMSSSTNSPLPNTSSDQHPSQQQEILQWFGSSNFQTEAINDMFINNNNNIVNLETIENTKVYGDASVAGAAVRAALGGGTTSTSADQSTISWEDITSLVNSEDASYFNAPNHV

SEQ ID NO: 91049 - DNA, 1836 bp, Arabidopsis thaliana
  misc_feature (1)..(1836): Ceres Seq. ID no. 12726302
  misc_feature (1)..(1836): Ortholog of  Ceres SEQ ID NO 14307682 as cited in SEQ ID NO 54529
cacgtacgtaatcaaggaccaagggattttcttcttttggctaccatggccacaagatgcttttggtgttggaccactttgctcttctgctctcagctgcttaccggctttgcccgagcttcctctgcaggcggcgccaaagagaaaggactctcccaaactcccacctgggccgttgccctcgtctgtaccttcttcattcttgtctccgtcctcctcgagaaggctcttcacagagttgccacgtggttgtgggagaaacataagaactctctgcttgaagccttggagaaaataaaggcggagctgatgattctaggattcatttccttgttgctcaccttcggagagcagtacattctcaagatttgtattcctgaaaaggctgcagcctctatgttaccttgtccagctccttctactcatgaccaagacaagacccaccgcagacgtctagctgctgctacgacctcttcccgctgcgatgagggtcatgaaccactcatacctgccacgggtttgcaccagctacacattctattgttcttcatggctgcctttcatatcctctacagtttcatcaccatgatgcttggcagactcaagatccgtggctggaaaaagtgggagcaggagacatgttctcatgattacgagttttcaatcgatccatcaagattcagactcactcatgagacgtcctttgttagacaacattccagtttctggacaaaaatccccttcttcttttatgctgggtgcttcctacagcagtttttccgatctgtagggaggactgactacttaactctgcgccatggcttcatcgctgcccatttagctccaggaagaaagttcgacttccagaagtatatcaaaagatcattggaagacgatttcaaggtggtagttggaataagtcctcttttgtgggcatcatttgtaattttcctacttctgaatgttaatggctgggaagcattgttttgggcgtcaatcctacctgtacttatcattctagctgtcagtacgaagcttcaagcgatcctaacaagaatggctctgggaatcacggagagacacgcagttgttcaagggatacctctcgtgcatggttcagataagtacttttggtttaatcgccctcagttgctacttcatcttcttcacttcgccttatttcagaatgctttccagctaacatacttcttctgggtctggtattcctttgggctaaaatcttgctttcacacggatttcaaactagtcatcgtaaaactctctctaggcgttggagctttgattttgtgcagctacatcacacttcctttgtatgcactagttactcagatgggttcaaacatgaagaaagctgtgtttgatgagcaaatggcaaaagcgttgaagaaatggcacatgactgtgaagaagaagaaaggcaaagcgagaaagccaccaacagagacccttggtgtttctgacactgtcagcacctctacctcatcctttcacgcctctggagccactctactccgctccaagaccactggtcactcgacagcctcttatatgagtaatttcgaggaccaaagcatgtctgatcttgaagctgagccattatcccctgaaccaatagaggggcacactctcgtcagggttggtgatcagaacacagagatagaatatactggagatattagtcctggaaaccaattctcctttgtgaagaacgttcctgctaatgatattgactaatattcaaaatgaatgcagaacaaatccatcatccggtctttattttctattacatgtatgccaacaattgcttcgccaagt

SEQ ID NO: 91050 - protein, 584 aa, Arabidopsis thaliana
  peptide (1)..(584): Ceres Seq. ID no. 12726303
HVRNQGPRDFLLLATMATRCFWCWTTLLFCSQLLTGFARASSAGGAKEKGLSQTPTWAVALVCTFFILVSVLLEKALHRVATWLWEKHKNSLLEALEKIKAELMILGFISLLLTFGEQYILKICIPEKAAASMLPCPAPSTHDQDKTHRRRLAAATTSSRCDEGHEPLIPATGLHQLHILLFFMAAFHILYSFITMMLGRLKIRGWKKWEQETCSHDYEFSIDPSRFRLTHETSFVRQHSSFWTKIPFFFYAGCFLQQFFRSVGRTDYLTLRHGFIAAHLAPGRKFDFQKYIKRSLEDDFKVVVGISPLLWASFVIFLLLNVNGWEALFWASILPVLIILAVSTKLQAILTRMALGITERHAVVQGIPLVHGSDKYFWFNRPQLLLHLLHFALFQNAFQLTYFFWVWYSFGLKSCFHTDFKLVIVKLSLGVGALILCSYITLPLYALVTQMGSNMKKAVFDEQMAKALKKWHMTVKKKKGKARKPPTETLGVSDTVSTSTSSFHASGATLLRSKTTGHSTASYMSNFEDQSMSDLEAEPLSPEPIEGHTLVRVGDQNTEIEYTGDISPGNQFSFVKNVPANDID

SEQ ID NO: 91051 - protein, 569 aa, Arabidopsis thaliana
  peptide (1)..(569): Ceres Seq. ID no. 12726304
MATRCFWCWTTLLFCSQLLTGFARASSAGGAKEKGLSQTPTWAVALVCTFFILVSVLLEKALHRVATWLWEKHKNSLLEALEKIKAELMILGFISLLLTFGEQYILKICIPEKAAASMLPCPAPSTHDQDKTHRRRLAAATTSSRCDEGHEPLIPATGLHQLHILLFFMAAFHILYSFITMMLGRLKIRGWKKWEQETCSHDYEFSIDPSRFRLTHETSFVRQHSSFWTKIPFFFYAGCFLQQFFRSVGRTDYLTLRHGFIAAHLAPGRKFDFQKYIKRSLEDDFKVVVGISPLLWASFVIFLLLNVNGWEALFWASILPVLIILAVSTKLQAILTRMALGITERHAVVQGIPLVHGSDKYFWFNRPQLLLHLLHFALFQNAFQLTYFFWVWYSFGLKSCFHTDFKLVIVKLSLGVGALILCSYITLPLYALVTQMGSNMKKAVFDEQMAKALKKWHMTVKKKKGKARKPPTETLGVSDTVSTSTSSFHASGATLLRSKTTGHSTASYMSNFEDQSMSDLEAEPLSPEPIEGHTLVRVGDQNTEIEYTGDISPGNQFSFVKNVPANDID

SEQ ID NO: 91052 - protein, 481 aa, Arabidopsis thaliana
  peptide (1)..(481): Ceres Seq. ID no. 12726305
MILGFISLLLTFGEQYILKICIPEKAAASMLPCPAPSTHDQDKTHRRRLAAATTSSRCDEGHEPLIPATGLHQLHILLFFMAAFHILYSFITMMLGRLKIRGWKKWEQETCSHDYEFSIDPSRFRLTHETSFVRQHSSFWTKIPFFFYAGCFLQQFFRSVGRTDYLTLRHGFIAAHLAPGRKFDFQKYIKRSLEDDFKVVVGISPLLWASFVIFLLLNVNGWEALFWASILPVLIILAVSTKLQAILTRMALGITERHAVVQGIPLVHGSDKYFWFNRPQLLLHLLHFALFQNAFQLTYFFWVWYSFGLKSCFHTDFKLVIVKLSLGVGALILCSYITLPLYALVTQMGSNMKKAVFDEQMAKALKKWHMTVKKKKGKARKPPTETLGVSDTVSTSTSSFHASGATLLRSKTTGHSTASYMSNFEDQSMSDLEAEPLSPEPIEGHTLVRVGDQNTEIEYTGDISPGNQFSFVKNVPANDID

SEQ ID NO: 91053 - DNA, 1188 bp, Arabidopsis thaliana
  misc_feature (1)..(1188): Ceres Seq. ID no. 12726306
  misc_feature (1)..(1188): Ortholog of  Ceres SEQ ID NO 13596189 as cited in SEQ ID NO 68452
atgggtttcttagagttgttggaggtggcttcaatgccaatcgttcaagttcttcttatcagcgtccttggcgctttcttggcaaccgattactgctctcttctctctgctgacacccgaagatccgtgaacaagctcgtcttcgtggtattcaccccctgcatcatgtttgccaaccttgccgagactgtcacattgcaggacattatttcatggtggtttatgcccataaatgttggaatcacctttctagtaggaggcattcttggatggttggtggtcaagctactgaaccccaaacctcaacttcatggcctcataattgctacttgtgcctcaggcaatatggggaaccttatgcttatactggtccctgccatctgtgacgaggaaggcagtccttttgggaatcgtagtgtctgcagatccattgggctctcctacgcatctttctctatggccctcgggggtttctacatatggacgtacagttaccaactggtaagaagctctgctacacagtttagagctcttgaagccgccgggttggtcaagtctcccaacaaggacatcgactctgatccccacgctcttctcctcaagccgcaccaaaaccaagaccttgaaatccaaggcaaacaaaaagtgtctaccaggacatacatcaaggacttgctccatcagattcttgaggaactcttcgcaccacccaccattggtgccattcttggcttcgtcttcggagcaaccaattggctaaggaatcttataattggggagaatgccccgttgcgagtgatccaagactcagtaaagctacttggggagggcacaattccttgcatcacactcatactggggggaaacctgattcagggtctgcgttcatcagctgtgaagaaatcagtgattgtgggagtgataattgtgcgctatatcctccttcccgtggtgggagtcggggtggtccaattagcaggaaatctaggctatcttcctccagaccctctctttcgatacgttctcatgcttcagttcgcactaccgcctgccatgaatattagcacaatggcacaactgttcgacgtggctcaagatgagtgctcggtcatcttcttgtggacctacctggttgcatctttagccctcaccgtctggtcaaccatcttcctctccatcctctcctga

SEQ ID NO: 91054 - protein, 395 aa, Arabidopsis thaliana
  peptide (1)..(395): Ceres Seq. ID no. 12726307
MGFLELLEVASMPIVQVLLISVLGAFLATDYCSLLSADTRRSVNKLVFVVFTPCIMFANLAETVTLQDIISWWFMPINVGITFLVGGILGWLVVKLLNPKPQLHGLIIATCASGNMGNLMLILVPAICDEEGSPFGNRSVCRSIGLSYASFSMALGGFYIWTYSYQLVRSSATQFRALEAAGLVKSPNKDIDSDPHALLLKPHQNQDLEIQGKQKVSTRTYIKDLLHQILEELFAPPTIGAILGFVFGATNWLRNLIIGENAPLRVIQDSVKLLGEGTIPCITLILGGNLIQGLRSSAVKKSVIVGVIIVRYILLPVVGVGVVQLAGNLGYLPPDPLFRYVLMLQFALPPAMNISTMAQLFDVAQDECSVIFLWTYLVASLALTVWSTIFLSILS

SEQ ID NO: 91055 - protein, 384 aa, Arabidopsis thaliana
  peptide (1)..(384): Ceres Seq. ID no. 12726308
MPIVQVLLISVLGAFLATDYCSLLSADTRRSVNKLVFVVFTPCIMFANLAETVTLQDIISWWFMPINVGITFLVGGILGWLVVKLLNPKPQLHGLIIATCASGNMGNLMLILVPAICDEEGSPFGNRSVCRSIGLSYASFSMALGGFYIWTYSYQLVRSSATQFRALEAAGLVKSPNKDIDSDPHALLLKPHQNQDLEIQGKQKVSTRTYIKDLLHQILEELFAPPTIGAILGFVFGATNWLRNLIIGENAPLRVIQDSVKLLGEGTIPCITLILGGNLIQGLRSSAVKKSVIVGVIIVRYILLPVVGVGVVQLAGNLGYLPPDPLFRYVLMLQFALPPAMNISTMAQLFDVAQDECSVIFLWTYLVASLALTVWSTIFLSILS

SEQ ID NO: 91056 - protein, 340 aa, Arabidopsis thaliana
  peptide (1)..(340): Ceres Seq. ID no. 12726309
MFANLAETVTLQDIISWWFMPINVGITFLVGGILGWLVVKLLNPKPQLHGLIIATCASGNMGNLMLILVPAICDEEGSPFGNRSVCRSIGLSYASFSMALGGFYIWTYSYQLVRSSATQFRALEAAGLVKSPNKDIDSDPHALLLKPHQNQDLEIQGKQKVSTRTYIKDLLHQILEELFAPPTIGAILGFVFGATNWLRNLIIGENAPLRVIQDSVKLLGEGTIPCITLILGGNLIQGLRSSAVKKSVIVGVIIVRYILLPVVGVGVVQLAGNLGYLPPDPLFRYVLMLQFALPPAMNISTMAQLFDVAQDECSVIFLWTYLVASLALTVWSTIFLSILS

SEQ ID NO: 91057 - DNA, 366 bp, Arabidopsis thaliana
  misc_feature (1)..(366): Ceres Seq. ID no. 12726322
  misc_feature (1)..(366): Ortholog of  Ceres SEQ ID NO 15177004 as cited in SEQ ID NO 57554
atggactgcgaagggtgcgagagacgggtgaggaagtcggtggaaggcatgaaaggagtcagcaaagtcaccgtcgatcctaaacagagcaaactcacggtcgagggattcgtccaaccgagcaaggtggtgcatcgggtgatgcatcggacagggaagaaggcggagctgtggccttacgtaccttacgaggtggtgccacacccttacgcacctggtgcctacgacaagaaggcccctcctggttacgttcgtaatgcactcgccgaccctctagtggccccgcttgctcgtgccagctccttcgaggtcaaatacacttctgctttcagcgatgacaatcccaacgcttgtaccatcatgtga

SEQ ID NO: 91058 - protein, 121 aa, Arabidopsis thaliana
  peptide (1)..(121): Ceres Seq. ID no. 12726323
MDCEGCERRVRKSVEGMKGVSKVTVDPKQSKLTVEGFVQPSKVVHRVMHRTGKKAELWPYVPYEVVPHPYAPGAYDKKAPPGYVRNALADPLVAPLARASSFEVKYTSAFSDDNPNACTIM

SEQ ID NO: 91059 - protein, 105 aa, Arabidopsis thaliana
  peptide (1)..(105): Ceres Seq. ID no. 12726324
MKGVSKVTVDPKQSKLTVEGFVQPSKVVHRVMHRTGKKAELWPYVPYEVVPHPYAPGAYDKKAPPGYVRNALADPLVAPLARASSFEVKYTSAFSDDNPNACTIM

SEQ ID NO: 91060 - protein, 74 aa, Arabidopsis thaliana
  peptide (1)..(74): Ceres Seq. ID no. 12726325
MHRTGKKAELWPYVPYEVVPHPYAPGAYDKKAPPGYVRNALADPLVAPLARASSFEVKYTSAFSDDNPNACTIM

SEQ ID NO: 91061 - DNA, 978 bp, Arabidopsis thaliana
  misc_feature (1)..(978): Ceres Seq. ID no. 12726330
  misc_feature (1)..(978): Ortholog of  Ceres SEQ ID NO 15226269 as cited in SEQ ID NO 64009
atggaagaaacgtccaagctacagttaccggagagtttccttagctttctagaggcgaatggccttgatccttcaatctatactcacggagattcaattccacgttatgtaaggttgaaacctggattcgaggatgctttcgaagagattgaatccgaaattaactgtaaactggagaaggtgaattggttaccaggattttactccatccctccagatgttcatatagccagaaccaaggcctatcagcaaggcatgatgtacggaatcgatgcagcttccggtgccgctgtctcagctcttggtatctccccaggagaccatgtcttggatctttgtgctgctcctggtgagtcatgtgtggacgatcatgaagacacattcaagcagtggacctcccgtagaccttacaaagaaaggaaacaagaagctaaggcaaggaagaattctgttttgccgcagaatggacaggcagaaattattttctacggacagggttctggagtaatcgggctaaaaaagaatgaactttatagatcccttgaccaaaatgattatgcatcttatgggtatgataaggttcttgtggacgcagagtgcacacacgatggttcgatcaaacatatccagaaatttgagcaatggggttggaaaactctggaacgccgtgttctggatgctgagagaaccgatacaaacttaaaagctcttcagttgaatctactgagaaatggattcagattgttgaaagaagctggcactctagtgtacagcacctgcagtgggaagactaacagaaaactgggttatgacgatgcagagctacaagagattgaaatggccaaggattggccgtgtagaagtggtcgcacgcctaagacactgcggtttgatccttccacctcagcaaccagcggccttttcgttgcaaaaatcaggaaattgccacccaacgaagcaaagaagaatgtgttgtga

SEQ ID NO: 91062 - protein, 325 aa, Arabidopsis thaliana
  peptide (1)..(325): Ceres Seq. ID no. 12726331
MEETSKLQLPESFLSFLEANGLDPSIYTHGDSIPRYVRLKPGFEDAFEEIESEINCKLEKVNWLPGFYSIPPDVHIARTKAYQQGMMYGIDAASGAAVSALGISPGDHVLDLCAAPGESCVDDHEDTFKQWTSRRPYKERKQEAKARKNSVLPQNGQAEIIFYGQGSGVIGLKKNELYRSLDQNDYASYGYDKVLVDAECTHDGSIKHIQKFEQWGWKTLERRVLDAERTDTNLKALQLNLLRNGFRLLKEAGTLVYSTCSGKTNRKLGYDDAELQEIEMAKDWPCRSGRTPKTLRFDPSTSATSGLFVAKIRKLPPNEAKKNVL

SEQ ID NO: 91063 - protein, 240 aa, Arabidopsis thaliana
  peptide (1)..(240): Ceres Seq. ID no. 12726332
MMYGIDAASGAAVSALGISPGDHVLDLCAAPGESCVDDHEDTFKQWTSRRPYKERKQEAKARKNSVLPQNGQAEIIFYGQGSGVIGLKKNELYRSLDQNDYASYGYDKVLVDAECTHDGSIKHIQKFEQWGWKTLERRVLDAERTDTNLKALQLNLLRNGFRLLKEAGTLVYSTCSGKTNRKLGYDDAELQEIEMAKDWPCRSGRTPKTLRFDPSTSATSGLFVAKIRKLPPNEAKKNVL

SEQ ID NO: 91064 - protein, 239 aa, Arabidopsis thaliana
  peptide (1)..(239): Ceres Seq. ID no. 12726333
MYGIDAASGAAVSALGISPGDHVLDLCAAPGESCVDDHEDTFKQWTSRRPYKERKQEAKARKNSVLPQNGQAEIIFYGQGSGVIGLKKNELYRSLDQNDYASYGYDKVLVDAECTHDGSIKHIQKFEQWGWKTLERRVLDAERTDTNLKALQLNLLRNGFRLLKEAGTLVYSTCSGKTNRKLGYDDAELQEIEMAKDWPCRSGRTPKTLRFDPSTSATSGLFVAKIRKLPPNEAKKNVL

SEQ ID NO: 91065 - DNA, 1776 bp, Arabidopsis thaliana
  misc_feature (1)..(1776): Ceres Seq. ID no. 12726334
  misc_feature (1)..(1776): Ortholog of  Ceres SEQ ID NO 14312989 as cited in SEQ ID NO 59121
  misc_feature (1)..(1776): Ortholog of  Ceres SEQ ID NO 12586556 as cited in SEQ ID NO 64667
  misc_feature (1)..(1776): Ortholog of  Ceres SEQ ID NO 13660894 as cited in SEQ ID NO 67475
atgttgaagtccataagcagcagcagcggcgacgatcatcttctttctctgatcgtatcttccaccggaaaactccatctccggcagattcacgccctcttactccgcacttccttaatcagaaactctgacgttttccaccatttcctctctcgtctcgctctctctctgattcctcgagacatcaattactcatgccgagttttctcccagagattgaacccaactctctctcactgcaacaccatgatcagagctttctctctcagccaaactccatgcgaagggtttcgcttgtttcgatctcttcgacgaaacagctctcttcctgctaatccgctctcgtcttcttttgctctcaagtgttgtatcaaatcaggtgacttactcggtggtttgcagattcacggcaagattttcagtgatgggtttctctcggatagtcttcttatgacgactctgatggatctttactccacttgcgaaaacagtactgatgcatgtaaagtgttcgacgaaattcccaagagagatactgtttcttggaatgtgctgttttcgtgttatctgcggaataaacgtacgagagatgttttagttttgtttgataagatgaagaacgatgtcgatggttgtgtaaaaccagatggtgtaacatgtttgttagctttacaagcttgtgctaacttgggggcgttggattttggtaaacaagttcatgactttatcgatgaaaatggactcagtggtgctttgaatttgagtaacactctggtttcaatgtactcacgttgcgggtctatggataaggcttaccaagtattttatggaatgcgtgaaagaaacgtagtctcgtggacggctctgatctcgggtttagctatgaatgggtttggaaaagaagccattgaagctttcaacgaaatgttgaagtttggaatctctccagaggaacagacactcactggtttattgtctgcctgtagccattccgggctggtcgctgaaggaatgatgtttttcgatagaatgaggagtggtgaatttaagataaagccaaatttacatcactatggctgcgttgttgacctcttgggacgtgctcgtctacttgataaagcttacagtctcattaagtcaatggagatgaaaccggactcaaccatttggcgtacgcttctcggggcttgtagagtccatggagatgtggaacttggggaacgtgtgatctctcatctcatcgaactcaaagccgaagaagctggagattacgttctgttactcaacacatactccacggttgggaaatgggagaaagtgactgaattgcgttctttaatgaaggagaaaagaatccatactaaacctggatgcagcgcgatcgagctacaaggaaccgttcatgagtttatagtagacgatgtttcgcatccgcggaaggaagaaatctataaaatgctggcggaaatcaatcagcagctgaagattgcggggtatgtggcggaaattacatcggaactgcacaatcttgagtcagaagaagaaaagggatacgcgttaagataccatagcgagaagctagctatagcctttgggattctggtgactccaccaggaacaaccattagagtgaccaagaatctcagaacttgtgttgattgtcataattttgcaaagtttgtatctgatgtttatgatcgtatcgtgatcgttagagaccgttccagatttcatcattttaaaggcggctcttgctcttgtaatgacttttggtga

SEQ ID NO: 91066 - protein, 591 aa, Arabidopsis thaliana
  peptide (1)..(591): Ceres Seq. ID no. 12726335
MLKSISSSSGDDHLLSLIVSSTGKLHLRQIHALLLRTSLIRNSDVFHHFLSRLALSLIPRDINYSCRVFSQRLNPTLSHCNTMIRAFSLSQTPCEGFRLFRSLRRNSSLPANPLSSSFALKCCIKSGDLLGGLQIHGKIFSDGFLSDSLLMTTLMDLYSTCENSTDACKVFDEIPKRDTVSWNVLFSCYLRNKRTRDVLVLFDKMKNDVDGCVKPDGVTCLLALQACANLGALDFGKQVHDFIDENGLSGALNLSNTLVSMYSRCGSMDKAYQVFYGMRERNVVSWTALISGLAMNGFGKEAIEAFNEMLKFGISPEEQTLTGLLSACSHSGLVAEGMMFFDRMRSGEFKIKPNLHHYGCVVDLLGRARLLDKAYSLIKSMEMKPDSTIWRTLLGACRVHGDVELGERVISHLIELKAEEAGDYVLLLNTYSTVGKWEKVTELRSLMKEKRIHTKPGCSAIELQGTVHEFIVDDVSHPRKEEIYKMLAEINQQLKIAGYVAEITSELHNLESEEEKGYALRYHSEKLAIAFGILVTPPGTTIRVTKNLRTCVDCHNFAKFVSDVYDRIVIVRDRSRFHHFKGGSCSCNDFW

SEQ ID NO: 91067 - protein, 509 aa, Arabidopsis thaliana
  peptide (1)..(509): Ceres Seq. ID no. 12726336
MIRAFSLSQTPCEGFRLFRSLRRNSSLPANPLSSSFALKCCIKSGDLLGGLQIHGKIFSDGFLSDSLLMTTLMDLYSTCENSTDACKVFDEIPKRDTVSWNVLFSCYLRNKRTRDVLVLFDKMKNDVDGCVKPDGVTCLLALQACANLGALDFGKQVHDFIDENGLSGALNLSNTLVSMYSRCGSMDKAYQVFYGMRERNVVSWTALISGLAMNGFGKEAIEAFNEMLKFGISPEEQTLTGLLSACSHSGLVAEGMMFFDRMRSGEFKIKPNLHHYGCVVDLLGRARLLDKAYSLIKSMEMKPDSTIWRTLLGACRVHGDVELGERVISHLIELKAEEAGDYVLLLNTYSTVGKWEKVTELRSLMKEKRIHTKPGCSAIELQGTVHEFIVDDVSHPRKEEIYKMLAEINQQLKIAGYVAEITSELHNLESEEEKGYALRYHSEKLAIAFGILVTPPGTTIRVTKNLRTCVDCHNFAKFVSDVYDRIVIVRDRSRFHHFKGGSCSCNDFW

SEQ ID NO: 91068 - protein, 441 aa, Arabidopsis thaliana
  peptide (1)..(441): Ceres Seq. ID no. 12726337
MTTLMDLYSTCENSTDACKVFDEIPKRDTVSWNVLFSCYLRNKRTRDVLVLFDKMKNDVDGCVKPDGVTCLLALQACANLGALDFGKQVHDFIDENGLSGALNLSNTLVSMYSRCGSMDKAYQVFYGMRERNVVSWTALISGLAMNGFGKEAIEAFNEMLKFGISPEEQTLTGLLSACSHSGLVAEGMMFFDRMRSGEFKIKPNLHHYGCVVDLLGRARLLDKAYSLIKSMEMKPDSTIWRTLLGACRVHGDVELGERVISHLIELKAEEAGDYVLLLNTYSTVGKWEKVTELRSLMKEKRIHTKPGCSAIELQGTVHEFIVDDVSHPRKEEIYKMLAEINQQLKIAGYVAEITSELHNLESEEEKGYALRYHSEKLAIAFGILVTPPGTTIRVTKNLRTCVDCHNFAKFVSDVYDRIVIVRDRSRFHHFKGGSCSCNDFW

SEQ ID NO: 91069 - DNA, 3316 bp, Arabidopsis thaliana
  misc_feature (1)..(3316): Ceres Seq. ID no. 12726341
  misc_feature (1)..(3316): Ortholog of  Ceres SEQ ID NO 13656662 as cited in SEQ ID NO 65594
aggcattttaatttgcaattgcttcgcctcttatatgttcattttcctgcaaaacatgagaagcatcaaaagctttttaaccaccatttgtttttttggaaagcatgagactgtttcttttacttgctttcaatgctctcatgctacttgaaacacatggttttaccgatgaaactgataggcaagctttgcttcagttcaagtctcaagtttctgaagacaaaagagttgtcttgtcctcatggaaccactcattcccactctgcaattggaagggcgttacatgtggccgtaaaaacaaaagagttactcatctggaactcggaagattgcaactaggcggagtgatatcaccatccattggtaatctatcgtttcttgtatcacttgatctctatgaaaacttttttggtggtactattcctcaagaggtgggacagttgtctagactcgaatacttggatatgggcataaattatcttaggggaccgattccattaggtctatacaattgctctagattgttgaaccttcgtttagattcaaatcgtcttgggggaagtgttccttcagagctaggatcattgacgaaccttgttcagttaaatctttatggaaacaatatgagaggaaagctccctacatcactaggaaacttgacgttactagaacaacttgcattgtcgcataacaatctggaaggagaaattccgagtgatgtagctcaactgactcaaatatggagtcttcaattagtagccaacaatttctccggtgtttttcctcccgctctctacaacttgtcctcacttaagcttctaggtatcggttataatcatttctcgggtcgccttagacctgacttaggtattctactaccaaatcttctatcgtttaatatgggagggaattatttcacagggtccattccaacaactctttccaatatctctactcttgaaagattgggtatgaatgagaacaatctgacaggaagtattcctacattcggaaatgttccaaatttaaaattgttatttcttcataccaattctttaggaagtgattcttctagagatcttgaattcctcacttctttgacaaactgcacccaactagagaccttagggattggcagaaataggcttgggggtgacttgcctatatctattgcgaacctatccgcaaaactcgtaactctagaccttggaggaaccctcatttccggaagcattccttatgacattggaaatctcataaacctacaaaagcttattttagatcaaaatatgttgagtggaccactcccaacctctcttggaaagcttttgaatttgaggtatttaagtctattttcaaatagattatcaggaggtataccagcttttataggcaacatgactatgttagaaacacttgatttgtccaacaatggttttgaaggtattgttcctacaagtcttggcaactgtagtcacctactagaattgtggattggggataataagttgaatgggactatacctctggaaattatgaaaattcagcagcttcttcgcctagacatgtcaggaaattctttgatcggctctctcccgcaggatatcggagcgctacaaaatcttggtacactatcacttggggataataaattatcagggaaacttccacaaactttgggaaactgtcttacaatggaaagtctttttttggaaggaaatttgttttatggagatattccagatttaaaagggttggtgggtgttaaagaagttgatttgtctaacaatgatctctctggaagtatacctgaatactttgcaagcttttccaagttggagtatctcaatctatcttttaacaatcttgagggaaaggtgccagtgaaaggaatatttgagaatgctactacagtttccatagttgggaacaatgatttatgtggaggtattatggggtttcaactaaagccatgcctttcgcaagcaccatctgtggtgaagaagcattcatctcgtttaaagaaagttgtgattggagttagcgtaggcataactttgcttttgttgttgttcatggcttcagttactttgatttggttgagaaagagaaagaagaacaaagaaaccaataatccaactccttctactttggaagtcttgcatgagaagataagttatggagatcttcgtaatgcgacgaatggcttctcttcgagcaatatggtcgggtctggcagttttggtaccgtatataaggcattgctcctgacggagaaaaaggttgttgcagtgaaagttttaaacatgcagagacgtggagcgatgaagagctttatggcagaatgtgaatccttgaaggacataagacatcgtaatcttgtgaaactattgacagcttgttcgagtattgattttcaaggaaatgaatttagagctctcatctatgagttcatgcctaatggaagtttagatatgtggctgcacccagaggaagtggaagagattcataggccctcaagaactttgacccttcttgaaaggcttaacattgccatagacgtggcttctgttttggattatctccatgttcattgtcatgaacctatagctcattgcgatcttaagccaagcaacgtccttctagacgatgatctaaccgcccatgttagtgactttggtctagctcgtcttctcctcaaattcgacgaggagtccttcttcaaccaactaagctcagccggtgttagaggaaccatcggctatgccgcaccagagtatggagtgggaggacagccatctataaatggtgatgtatatagttttgggattctccttttagaaatgttcactggaaaaagaccaaccaatgagctatttggaggaaactttaccctgaacagctacactaagtcggcattgccggaaagaatattggacattgtagacgaatcaattcttcacattggtctcagagtcggtttccctgttgttgagtgcttgacaatggtttttgaggtgggccttaggtgttgtgaagaatctccgatgaaccggttggcaacgagtatagtcgtcaaggagttgatctcaatcagagagaggttctttaaagccagtagaacgacttggcgttgaagtgtttggttttgtctacaaactttgcaacccaataaaaaggcttataatatcttatttcataaattggggttttgtctaagaatgcttgtagaatattgctaatgaaatgcttgtgttaattaataaaaatgtatgaatgttgtggtaccaattttatatggagacaacgtagcttt

SEQ ID NO: 91070 - protein, 1010 aa, Arabidopsis thaliana
  peptide (1)..(1010): Ceres Seq. ID no. 12726342
MRLFLLLAFNALMLLETHGFTDETDRQALLQFKSQVSEDKRVVLSSWNHSFPLCNWKGVTCGRKNKRVTHLELGRLQLGGVISPSIGNLSFLVSLDLYENFFGGTIPQEVGQLSRLEYLDMGINYLRGPIPLGLYNCSRLLNLRLDSNRLGGSVPSELGSLTNLVQLNLYGNNMRGKLPTSLGNLTLLEQLALSHNNLEGEIPSDVAQLTQIWSLQLVANNFSGVFPPALYNLSSLKLLGIGYNHFSGRLRPDLGILLPNLLSFNMGGNYFTGSIPTTLSNISTLERLGMNENNLTGSIPTFGNVPNLKLLFLHTNSLGSDSSRDLEFLTSLTNCTQLETLGIGRNRLGGDLPISIANLSAKLVTLDLGGTLISGSIPYDIGNLINLQKLILDQNMLSGPLPTSLGKLLNLRYLSLFSNRLSGGIPAFIGNMTMLETLDLSNNGFEGIVPTSLGNCSHLLELWIGDNKLNGTIPLEIMKIQQLLRLDMSGNSLIGSLPQDIGALQNLGTLSLGDNKLSGKLPQTLGNCLTMESLFLEGNLFYGDIPDLKGLVGVKEVDLSNNDLSGSIPEYFASFSKLEYLNLSFNNLEGKVPVKGIFENATTVSIVGNNDLCGGIMGFQLKPCLSQAPSVVKKHSSRLKKVVIGVSVGITLLLLLFMASVTLIWLRKRKKNKETNNPTPSTLEVLHEKISYGDLRNATNGFSSSNMVGSGSFGTVYKALLLTEKKVVAVKVLNMQRRGAMKSFMAECESLKDIRHRNLVKLLTACSSIDFQGNEFRALIYEFMPNGSLDMWLHPEEVEEIHRPSRTLTLLERLNIAIDVASVLDYLHVHCHEPIAHCDLKPSNVLLDDDLTAHVSDFGLARLLLKFDEESFFNQLSSAGVRGTIGYAAPEYGVGGQPSINGDVYSFGILLLEMFTGKRPTNELFGGNFTLNSYTKSALPERILDIVDESILHIGLRVGFPVVECLTMVFEVGLRCCEESPMNRLATSIVVKELISIRERFFKASRTTWR

SEQ ID NO: 91071 - protein, 998 aa, Arabidopsis thaliana
  peptide (1)..(998): Ceres Seq. ID no. 12726343
MLLETHGFTDETDRQALLQFKSQVSEDKRVVLSSWNHSFPLCNWKGVTCGRKNKRVTHLELGRLQLGGVISPSIGNLSFLVSLDLYENFFGGTIPQEVGQLSRLEYLDMGINYLRGPIPLGLYNCSRLLNLRLDSNRLGGSVPSELGSLTNLVQLNLYGNNMRGKLPTSLGNLTLLEQLALSHNNLEGEIPSDVAQLTQIWSLQLVANNFSGVFPPALYNLSSLKLLGIGYNHFSGRLRPDLGILLPNLLSFNMGGNYFTGSIPTTLSNISTLERLGMNENNLTGSIPTFGNVPNLKLLFLHTNSLGSDSSRDLEFLTSLTNCTQLETLGIGRNRLGGDLPISIANLSAKLVTLDLGGTLISGSIPYDIGNLINLQKLILDQNMLSGPLPTSLGKLLNLRYLSLFSNRLSGGIPAFIGNMTMLETLDLSNNGFEGIVPTSLGNCSHLLELWIGDNKLNGTIPLEIMKIQQLLRLDMSGNSLIGSLPQDIGALQNLGTLSLGDNKLSGKLPQTLGNCLTMESLFLEGNLFYGDIPDLKGLVGVKEVDLSNNDLSGSIPEYFASFSKLEYLNLSFNNLEGKVPVKGIFENATTVSIVGNNDLCGGIMGFQLKPCLSQAPSVVKKHSSRLKKVVIGVSVGITLLLLLFMASVTLIWLRKRKKNKETNNPTPSTLEVLHEKISYGDLRNATNGFSSSNMVGSGSFGTVYKALLLTEKKVVAVKVLNMQRRGAMKSFMAECESLKDIRHRNLVKLLTACSSIDFQGNEFRALIYEFMPNGSLDMWLHPEEVEEIHRPSRTLTLLERLNIAIDVASVLDYLHVHCHEPIAHCDLKPSNVLLDDDLTAHVSDFGLARLLLKFDEESFFNQLSSAGVRGTIGYAAPEYGVGGQPSINGDVYSFGILLLEMFTGKRPTNELFGGNFTLNSYTKSALPERILDIVDESILHIGLRVGFPVVECLTMVFEVGLRCCEESPMNRLATSIVVKELISIRERFFKASRTTWR

SEQ ID NO: 91072 - protein, 890 aa, Arabidopsis thaliana
  peptide (1)..(890): Ceres Seq. ID no. 12726344
MGINYLRGPIPLGLYNCSRLLNLRLDSNRLGGSVPSELGSLTNLVQLNLYGNNMRGKLPTSLGNLTLLEQLALSHNNLEGEIPSDVAQLTQIWSLQLVANNFSGVFPPALYNLSSLKLLGIGYNHFSGRLRPDLGILLPNLLSFNMGGNYFTGSIPTTLSNISTLERLGMNENNLTGSIPTFGNVPNLKLLFLHTNSLGSDSSRDLEFLTSLTNCTQLETLGIGRNRLGGDLPISIANLSAKLVTLDLGGTLISGSIPYDIGNLINLQKLILDQNMLSGPLPTSLGKLLNLRYLSLFSNRLSGGIPAFIGNMTMLETLDLSNNGFEGIVPTSLGNCSHLLELWIGDNKLNGTIPLEIMKIQQLLRLDMSGNSLIGSLPQDIGALQNLGTLSLGDNKLSGKLPQTLGNCLTMESLFLEGNLFYGDIPDLKGLVGVKEVDLSNNDLSGSIPEYFASFSKLEYLNLSFNNLEGKVPVKGIFENATTVSIVGNNDLCGGIMGFQLKPCLSQAPSVVKKHSSRLKKVVIGVSVGITLLLLLFMASVTLIWLRKRKKNKETNNPTPSTLEVLHEKISYGDLRNATNGFSSSNMVGSGSFGTVYKALLLTEKKVVAVKVLNMQRRGAMKSFMAECESLKDIRHRNLVKLLTACSSIDFQGNEFRALIYEFMPNGSLDMWLHPEEVEEIHRPSRTLTLLERLNIAIDVASVLDYLHVHCHEPIAHCDLKPSNVLLDDDLTAHVSDFGLARLLLKFDEESFFNQLSSAGVRGTIGYAAPEYGVGGQPSINGDVYSFGILLLEMFTGKRPTNELFGGNFTLNSYTKSALPERILDIVDESILHIGLRVGFPVVECLTMVFEVGLRCCEESPMNRLATSIVVKELISIRERFFKASRTTWR

SEQ ID NO: 91073 - DNA, 3312 bp, Arabidopsis thaliana
  misc_feature (1)..(3312): Ceres Seq. ID no. 12726345
  misc_feature (1)..(3312): Ortholog of  Ceres SEQ ID NO 13656662 as cited in SEQ ID NO 65594
acaaaaacattcaaaatataaaaataaactttgagaaggatgaaactatttcttttactttctttcagtgctcatttgttactgggagcagatgggtttaccgatgaaactgataggcaagcattgttggagttcaagtctcaagtttctgaaggcaaaagagatgtcttatcctcatggaataactcattccctctatgcaactggaagtgggttacatgtggtcgtaaacacaagagagttactcatttgaacctcgggggattacagttgggcgggatagtatcaccatctatcggtaatgtatcgtttctcatatcacttgatctgtctgataacgcttttgggggtatcatccctcgagaggtgggaaacttgtttagacttgaacacttgtatatggccttcaattctctagagggagggattccagccactctatctaactgctctagattgttgaaccttgatttatattcaaatcctcttagacaaggtgttccttctgaactagggtcattgacgaaactcgttattttagatcttggtcgaaacaacctgaaaggcaagctccctagatctctaggaaacttgacctctttaaaatcgcttggcttcacagataacaatatagaaggagaagttccagatgaattagctagactgagtcaaatggtgggtcttgggttatcaatgaacaaattctttggcgtttttcctcccgccatctacaatttgtccgcacttgaggacttattcctctttggtagtggcttctcgggtagcctaaagcctgattttggtaatctgctaccaaacattcgtgagttaaatctgggagaaaatgatctagtgggagccattccaacaacactttccaatatttcaactctacaaaagtttggaatcaacaaaaacatgatgacaggaggtatatatccgaactttggaaaagtaccgagtttgcaatacctagatcttagtgagaatcctctaggaagttacacttttggagatcttgaatttattgattctttgactaattgcacccatttgcaactcttaagtgttggttacactaggcttgggggtgccttgcctacatccattgccaatatgtccacagaactcatcagtttaaaccttataggaaaccacttttttggaagcattcctcaagatattgggaatctcataggcctacaaagacttcagttgggaaaaaatatgttgaccggaccactcccaacttctttgggaaagcttctaagattggggttattaagtctatattcaaataggatgtcaggagagattccatcttttataggcaacctaactcaattagaaatactatatttgtccaacaatagttttgagggaattgttcctccgagtctcgggaagtgtagtcacatgcttgatttacgcattgggtataacaagttgaatgggactataccgaaggaaattatgcaaatcccaacccttgttaacctaagcatggaaggtaactctttgagcggctctctaccaaatgatattggaagtctacaaaatcttgtaaaactatcacttgagaacaataagttttcaggacatctcccacaaaccttgggaaattgtctcgcgatggaacaactttttctacaaggaaattcttttgatggagcaattccaaatataagagggttgatgggtgtaagaagagttgatttgtcaaacaatgatctatcgggaagtatacctgaatattttgcaaacttctccaagttggaatatctcaatctatctattaacaattttacgggaaaggtgccttccaaaggaaattttcagaactctacaatagtttttgtatttggaaacaaaaacctatgtggaggcatcaaggatctgaaactaaagccatgcctcgcccaagaaccaccagtggagacaaagcattcctctcatttaaagaaagttgcaattttagtaagcataggcatagctttgctattgctgttggtcatagcttcgatggttctgtgttggttcagaaaaagaaggaagaaccagcagacaaataacctggttccttctaagttggagattttccatgagaagataagctatggagatctacgaaatgcgacaaatggcttctcttcaagcaatatggttgggtcaggtagttttggtactgtgttcaaggcattgctcccgacggagagcaagattgttgcagtgaaagttctaaacatgcagagacgtggagctatgaagagctttatggcagaatgtgaatccttgaaagacacaaggcatcgtaatcttgtgaaattactgacagcttgcgctagtactgatttccaaggaaacgaattcagagcgcttatctatgagtacttgccgaatggaagcgtggatatgtggctgcacccagaggaagtcgaagagatacgtaggcccccacgaaccttgacacttcttgaaaggcttaatattgtcatagacgtggcttctgttttggactatcttcatgttcactgtcatgagcctatagctcattgcgatctcaagccaagcaacgtccttctagaagatgatttgaccgcccatgttagtgattttggtctggctcggcttctactcaaattcgacaaggagtcattccttaaccaactaagctcagccggagttagaggaaccatcggctatgccgcaccagaatatggaatgggaggacaaccatcaatacatggtgatgtgtatagctttggggttctccttttagaaatgttcaccgggaaacgaccaactgatgagttatttgggggaaatttaacactacatagctacaccaagttagcgttgccagaaaaagtattcgaaattgcagacaaagcgattcttcacattggtcttagagttggtttccgtactgctgagtgcttgacactggttttggaggtgggacttaggtgctgtgaagaatatcctacgaaccggttggcaacgagtgaagtcgcaaaagagttgatctcaatcagagaaaggttctttaaaaccagaagaacacctagacgttgaagtttttatggttttgcctacaaactttgcagtccactcaaaaggcctatataacattgtcttttacaatttgtgttttcttcttctctattaaacatacttatgctatacgtgtttctaagctctattaaaacatactaagatggcttgcagaatattgttaatgaatgcttgtgttttttgcagacaatatatgtatgttgtgtaaccagttttatcatatatatcagtgttccc

SEQ ID NO: 91074 - protein, 1011 aa, Arabidopsis thaliana
  peptide (1)..(1011): Ceres Seq. ID no. 12726346
MKLFLLLSFSAHLLLGADGFTDETDRQALLEFKSQVSEGKRDVLSSWNNSFPLCNWKWVTCGRKHKRVTHLNLGGLQLGGIVSPSIGNVSFLISLDLSDNAFGGIIPREVGNLFRLEHLYMAFNSLEGGIPATLSNCSRLLNLDLYSNPLRQGVPSELGSLTKLVILDLGRNNLKGKLPRSLGNLTSLKSLGFTDNNIEGEVPDELARLSQMVGLGLSMNKFFGVFPPAIYNLSALEDLFLFGSGFSGSLKPDFGNLLPNIRELNLGENDLVGAIPTTLSNISTLQKFGINKNMMTGGIYPNFGKVPSLQYLDLSENPLGSYTFGDLEFIDSLTNCTHLQLLSVGYTRLGGALPTSIANMSTELISLNLIGNHFFGSIPQDIGNLIGLQRLQLGKNMLTGPLPTSLGKLLRLGLLSLYSNRMSGEIPSFIGNLTQLEILYLSNNSFEGIVPPSLGKCSHMLDLRIGYNKLNGTIPKEIMQIPTLVNLSMEGNSLSGSLPNDIGSLQNLVKLSLENNKFSGHLPQTLGNCLAMEQLFLQGNSFDGAIPNIRGLMGVRRVDLSNNDLSGSIPEYFANFSKLEYLNLSINNFTGKVPSKGNFQNSTIVFVFGNKNLCGGIKDLKLKPCLAQEPPVETKHSSHLKKVAILVSIGIALLLLLVIASMVLCWFRKRRKNQQTNNLVPSKLEIFHEKISYGDLRNATNGFSSSNMVGSGSFGTVFKALLPTESKIVAVKVLNMQRRGAMKSFMAECESLKDTRHRNLVKLLTACASTDFQGNEFRALIYEYLPNGSVDMWLHPEEVEEIRRPPRTLTLLERLNIVIDVASVLDYLHVHCHEPIAHCDLKPSNVLLEDDLTAHVSDFGLARLLLKFDKESFLNQLSSAGVRGTIGYAAPEYGMGGQPSIHGDVYSFGVLLLEMFTGKRPTDELFGGNLTLHSYTKLALPEKVFEIADKAILHIGLRVGFRTAECLTLVLEVGLRCCEEYPTNRLATSEVAKELISIRERFFKTRRTPRR

SEQ ID NO: 91075 - protein, 891 aa, Arabidopsis thaliana
  peptide (1)..(891): Ceres Seq. ID no. 12726347
MAFNSLEGGIPATLSNCSRLLNLDLYSNPLRQGVPSELGSLTKLVILDLGRNNLKGKLPRSLGNLTSLKSLGFTDNNIEGEVPDELARLSQMVGLGLSMNKFFGVFPPAIYNLSALEDLFLFGSGFSGSLKPDFGNLLPNIRELNLGENDLVGAIPTTLSNISTLQKFGINKNMMTGGIYPNFGKVPSLQYLDLSENPLGSYTFGDLEFIDSLTNCTHLQLLSVGYTRLGGALPTSIANMSTELISLNLIGNHFFGSIPQDIGNLIGLQRLQLGKNMLTGPLPTSLGKLLRLGLLSLYSNRMSGEIPSFIGNLTQLEILYLSNNSFEGIVPPSLGKCSHMLDLRIGYNKLNGTIPKEIMQIPTLVNLSMEGNSLSGSLPNDIGSLQNLVKLSLENNKFSGHLPQTLGNCLAMEQLFLQGNSFDGAIPNIRGLMGVRRVDLSNNDLSGSIPEYFANFSKLEYLNLSINNFTGKVPSKGNFQNSTIVFVFGNKNLCGGIKDLKLKPCLAQEPPVETKHSSHLKKVAILVSIGIALLLLLVIASMVLCWFRKRRKNQQTNNLVPSKLEIFHEKISYGDLRNATNGFSSSNMVGSGSFGTVFKALLPTESKIVAVKVLNMQRRGAMKSFMAECESLKDTRHRNLVKLLTACASTDFQGNEFRALIYEYLPNGSVDMWLHPEEVEEIRRPPRTLTLLERLNIVIDVASVLDYLHVHCHEPIAHCDLKPSNVLLEDDLTAHVSDFGLARLLLKFDKESFLNQLSSAGVRGTIGYAAPEYGMGGQPSIHGDVYSFGVLLLEMFTGKRPTDELFGGNLTLHSYTKLALPEKVFEIADKAILHIGLRVGFRTAECLTLVLEVGLRCCEEYPTNRLATSEVAKELISIRERFFKTRRTPRR

SEQ ID NO: 91076 - protein, 800 aa, Arabidopsis thaliana
  peptide (1)..(800): Ceres Seq. ID no. 12726348
MVGLGLSMNKFFGVFPPAIYNLSALEDLFLFGSGFSGSLKPDFGNLLPNIRELNLGENDLVGAIPTTLSNISTLQKFGINKNMMTGGIYPNFGKVPSLQYLDLSENPLGSYTFGDLEFIDSLTNCTHLQLLSVGYTRLGGALPTSIANMSTELISLNLIGNHFFGSIPQDIGNLIGLQRLQLGKNMLTGPLPTSLGKLLRLGLLSLYSNRMSGEIPSFIGNLTQLEILYLSNNSFEGIVPPSLGKCSHMLDLRIGYNKLNGTIPKEIMQIPTLVNLSMEGNSLSGSLPNDIGSLQNLVKLSLENNKFSGHLPQTLGNCLAMEQLFLQGNSFDGAIPNIRGLMGVRRVDLSNNDLSGSIPEYFANFSKLEYLNLSINNFTGKVPSKGNFQNSTIVFVFGNKNLCGGIKDLKLKPCLAQEPPVETKHSSHLKKVAILVSIGIALLLLLVIASMVLCWFRKRRKNQQTNNLVPSKLEIFHEKISYGDLRNATNGFSSSNMVGSGSFGTVFKALLPTESKIVAVKVLNMQRRGAMKSFMAECESLKDTRHRNLVKLLTACASTDFQGNEFRALIYEYLPNGSVDMWLHPEEVEEIRRPPRTLTLLERLNIVIDVASVLDYLHVHCHEPIAHCDLKPSNVLLEDDLTAHVSDFGLARLLLKFDKESFLNQLSSAGVRGTIGYAAPEYGMGGQPSIHGDVYSFGVLLLEMFTGKRPTDELFGGNLTLHSYTKLALPEKVFEIADKAILHIGLRVGFRTAECLTLVLEVGLRCCEEYPTNRLATSEVAKELISIRERFFKTRRTPRR

SEQ ID NO: 91077 - DNA, 1754 bp, Arabidopsis thaliana
  misc_feature (1)..(1754): Ceres Seq. ID no. 12726349
  misc_feature (1)..(1754): Ortholog of  Ceres SEQ ID NO 13654285 as cited in SEQ ID NO 68661
aaaatatatataaaatagttatagctccccacttatatatgcaaaagccaacatcaagtatcttaaatgtcataatggacggtggagacagcgtcggaggaggaggaggagatgatcaccaccgtcacctccaccatcaccaccgccctactttcccttttcaactactcggaaaacacgaccccgacgacaaccatcaacaacaaccttccccttcctcctcctcctctctattttctctccatcaacaccaacaattatctcaatcgcaacctcaatcgcaatcgcaaaagtcacaaccgcagacaacgcaaaaagagttattacaaacgcaagaggaatctgcggtggtggcagctaaaaagccaccgttgaaacgagcgtcgacgaaagaccgacacacgaaagtagacggaagagggaggagaataaggatgccggcgttatgtgcagctagggtttttcagctaacgcgagagctaggtcataaatccgacggtgagacaatagagtggcttcttcaacaagctgaaccatctgtaatcgccgccaccggaaccggaacaatcccggcgaatttcacttctttaaacatctctctccgttcttcaggctcttccatgtctcttccttctcatttccgctccgccgcttccacttttagccctaataacatattttctccggcgatgcttcaacaacaacaacaacaacaacgtggtggtggtgttgggtttcatcatccccatctacagggacgtgcacctacgtcgtctttgtttcctggtattgataacttcacaccaacgacgtcgtttttgaactttcataatccaacaaagcaagaaggagatcaagattctgaagagttaaactcggagaagaaaagaagaatccaaacgacgtcggatttgcatcaacaacaacaacaacaccaacatgatcaaatcggaggatatacacttcaatctagcaacagtggatctacagccaccgcagccgccgcgcaacaaataccgggaaatttctggatggttgcggcggctgcggctgcaggtggtggtggtggtaataacaaccaaacaggtggtcttatgacagcttctattggtactggtggcggcggtggagagcctgtttggacgtttccttccattaacacggcagcggcagcgttatatagaagtggcgtttcgggcgttccaagcggcgcggtttctagcggtttacattttatgaatttcgcagcgccaatggcatttcttactggacaacaacagctagcaacaactagtaatcatgagattaatgaagatagtaataataatgaaggaggaagaagtgacggtggtggtgatcatcataatacacagagacatcatcatcatcaacaacaacatcatcataatattctctccggcttgaaccagtacggacggcaagtttccggcgactctcaagctagtggatcacttggaggtggtgatgaggaggatcagcaagattagacacacacaaaaacattttaacggtgggattttctgccgacggcggtagcggtgacggcgttcggcggctgtgtaaaacttttgttttcaccgttaattttttttattttctgtagtaattttttttgctaagtaaaaaaaaaaaaaaaaacacgtgagattttctttttaattttgatttttttacttgattttaaatttgatttttcttgtgagtgagtgattaaatagtacacgagatttttt

SEQ ID NO: 91078 - protein, 501 aa, Arabidopsis thaliana
  peptide (1)..(501): Ceres Seq. ID no. 12726350
NIYKIVIAPHLYMQKPTSSILNVIMDGGDSVGGGGGDDHHRHLHHHHRPTFPFQLLGKHDPDDNHQQQPSPSSSSSLFSLHQHQQLSQSQPQSQSQKSQPQTTQKELLQTQEESAVVAAKKPPLKRASTKDRHTKVDGRGRRIRMPALCAARVFQLTRELGHKSDGETIEWLLQQAEPSVIAATGTGTIPANFTSLNISLRSSGSSMSLPSHFRSAASTFSPNNIFSPAMLQQQQQQQRGGGVGFHHPHLQGRAPTSSLFPGIDNFTPTTSFLNFHNPTKQEGDQDSEELNSEKKRRIQTTSDLHQQQQQHQHDQIGGYTLQSSNSGSTATAAAAQQIPGNFWMVAAAAAAGGGGGNNNQTGGLMTASIGTGGGGGEPVWTFPSINTAAAALYRSGVSGVPSGAVSSGLHFMNFAAPMAFLTGQQQLATTSNHEINEDSNNNEGGRSDGGGDHHNTQRHHHHQQQHHHNILSGLNQYGRQVSGDSQASGSLGGGDEEDQQD

SEQ ID NO: 91079 - protein, 489 aa, Arabidopsis thaliana
  peptide (1)..(489): Ceres Seq. ID no. 12726351
MQKPTSSILNVIMDGGDSVGGGGGDDHHRHLHHHHRPTFPFQLLGKHDPDDNHQQQPSPSSSSSLFSLHQHQQLSQSQPQSQSQKSQPQTTQKELLQTQEESAVVAAKKPPLKRASTKDRHTKVDGRGRRIRMPALCAARVFQLTRELGHKSDGETIEWLLQQAEPSVIAATGTGTIPANFTSLNISLRSSGSSMSLPSHFRSAASTFSPNNIFSPAMLQQQQQQQRGGGVGFHHPHLQGRAPTSSLFPGIDNFTPTTSFLNFHNPTKQEGDQDSEELNSEKKRRIQTTSDLHQQQQQHQHDQIGGYTLQSSNSGSTATAAAAQQIPGNFWMVAAAAAAGGGGGNNNQTGGLMTASIGTGGGGGEPVWTFPSINTAAAALYRSGVSGVPSGAVSSGLHFMNFAAPMAFLTGQQQLATTSNHEINEDSNNNEGGRSDGGGDHHNTQRHHHHQQQHHHNILSGLNQYGRQVSGDSQASGSLGGGDEEDQQD

SEQ ID NO: 91080 - protein, 477 aa, Arabidopsis thaliana
  peptide (1)..(477): Ceres Seq. ID no. 12726352
MDGGDSVGGGGGDDHHRHLHHHHRPTFPFQLLGKHDPDDNHQQQPSPSSSSSLFSLHQHQQLSQSQPQSQSQKSQPQTTQKELLQTQEESAVVAAKKPPLKRASTKDRHTKVDGRGRRIRMPALCAARVFQLTRELGHKSDGETIEWLLQQAEPSVIAATGTGTIPANFTSLNISLRSSGSSMSLPSHFRSAASTFSPNNIFSPAMLQQQQQQQRGGGVGFHHPHLQGRAPTSSLFPGIDNFTPTTSFLNFHNPTKQEGDQDSEELNSEKKRRIQTTSDLHQQQQQHQHDQIGGYTLQSSNSGSTATAAAAQQIPGNFWMVAAAAAAGGGGGNNNQTGGLMTASIGTGGGGGEPVWTFPSINTAAAALYRSGVSGVPSGAVSSGLHFMNFAAPMAFLTGQQQLATTSNHEINEDSNNNEGGRSDGGGDHHNTQRHHHHQQQHHHNILSGLNQYGRQVSGDSQASGSLGGGDEEDQQD

SEQ ID NO: 91081 - DNA, 2121 bp, Arabidopsis thaliana
  misc_feature (1)..(2121): Ceres Seq. ID no. 12726393
  misc_feature (1)..(2121): Ortholog of  Ceres SEQ ID NO 12586556 as cited in SEQ ID NO 64667
  misc_feature (1)..(2121): Ortholog of  Ceres SEQ ID NO 13660894 as cited in SEQ ID NO 67475
atgatttcgagtgtgagaaattgcggcacaatccaacggttttgtacaacttcgatttcattgctccagaaaccggttgaggagaacattgtccgtatctcgaatcaggtgatggtcaaatttgatcccaactctcaccttaggagtctcatcaatgcagggaatttgcgagctgctcgccaagtgttcgataaaatgccccacggagatattgtttcatggacatccatcattaaaagatacgtaactgcaaacaactctgacgaagcactgattttgttctccgcaatgcgtgttgttgatcatgccgtctcacctgatacctctgtgctaagtgttgtactcaaggcttgtggtcaaagctccaatattgcatatggagaatctttgcatgcttatgcggtgaaaacttcgcttctcagctctgtatatgtgggaagttctttactggatatgtataagagagttggaaagattgataagagttgcagagtctttagcgaaatgccttttagaaatgctgtaacatggacagcgattattacggggttggttcacgctggtcgttacaaggaaggtcttacgtacttttctgaaatgtcgagatcggaagaactatctgatacttatacatttgctattgccttgaaggcttgtgctggtttacgtcaagttaaatatggtaaggcgattcatactcatgtgatagtgagaggctttgttaccactctttgcgtggctaactcactcgcgacaatgtacactgaatgtggggaaatgcaggacggactttgtttgtttgaaaatatgagtgagagggatgtggtttcgtggacaagccttattgtggcttacaagcgaatcggtcaagaagtaaaagctgtggagacatttataaagatgagaaattctcaagtccctcctaatgaacaaacttttgcatcaatgttttctgcgtgtgcgagtctttctagacttgtgtggggcgagcagctccactgtaatgttttgtctctaggtttaaatgattctttgtcagtgagtaactcgatgatgaagatgtattctacatgtgggaatttagtctctgcttctgttttgtttcaaggaatgagatgcagggacattatttcgtggagtaccattattggagggtactgtcaagccggttttggagaagaaggttttaagtatttctcatggatgagacaatcagggacaaaaccaacagattttgctcttgctagtttgctgagtgtttcaggaaacatggcagttattgagggaggcaggcaagttcacgcgcttgctctttgttttggtttagaacagaactccacggttcgtagtagtctgattaatatgtactcgaaatgtggaagtatcaaagaagcttcaatgatattcggagaaacagatagagatgatattgtttctctgacagctatgatcaatggatatgcagaacatggaaagagcaaagaagctattgatctgtttgagaagagtctaaaggttggtttcagacccgactctgtaactttcatcagcgttctcaccgcctgcactcattcgggacagcttgaccttggttttcactatttcaacatgatgcaagagacgtataatatgagaccagccaaggaacattatggttgtatggttgatctgttatgtagagcaggacggctaagtgatgcagagaagatgatcaatgagatgtcatggaagaaagacgatgtagtctggaccacacttctcattgcgtgtaaggccaaaggagacattgaacgtgggagaagggctgctgagaggattctagagctggatcctacttgtgcaactgcacttgtaacactagccaatatatattcaagcacagggaacttggaagaagctgcaaatgtaagaaagaatatgaaagcaaaaggcgtgatcaaagagcccggatggtcatcaattaagatcaaggattgcgtttcagcgtttgtatctggtgatcggttccatccgcaaagtgaagatatatacaatatcttggaattagcagtatctggtgcagaagctcatagatttgattgcacattaaagagagcttttggggttaatttatattcctga

SEQ ID NO: 91082 - protein, 706 aa, Arabidopsis thaliana
  peptide (1)..(706): Ceres Seq. ID no. 12726394
MISSVRNCGTIQRFCTTSISLLQKPVEENIVRISNQVMVKFDPNSHLRSLINAGNLRAARQVFDKMPHGDIVSWTSIIKRYVTANNSDEALILFSAMRVVDHAVSPDTSVLSVVLKACGQSSNIAYGESLHAYAVKTSLLSSVYVGSSLLDMYKRVGKIDKSCRVFSEMPFRNAVTWTAIITGLVHAGRYKEGLTYFSEMSRSEELSDTYTFAIALKACAGLRQVKYGKAIHTHVIVRGFVTTLCVANSLATMYTECGEMQDGLCLFENMSERDVVSWTSLIVAYKRIGQEVKAVETFIKMRNSQVPPNEQTFASMFSACASLSRLVWGEQLHCNVLSLGLNDSLSVSNSMMKMYSTCGNLVSASVLFQGMRCRDIISWSTIIGGYCQAGFGEEGFKYFSWMRQSGTKPTDFALASLLSVSGNMAVIEGGRQVHALALCFGLEQNSTVRSSLINMYSKCGSIKEASMIFGETDRDDIVSLTAMINGYAEHGKSKEAIDLFEKSLKVGFRPDSVTFISVLTACTHSGQLDLGFHYFNMMQETYNMRPAKEHYGCMVDLLCRAGRLSDAEKMINEMSWKKDDVVWTTLLIACKAKGDIERGRRAAERILELDPTCATALVTLANIYSSTGNLEEAANVRKNMKAKGVIKEPGWSSIKIKDCVSAFVSGDRFHPQSEDIYNILELAVSGAEAHRFDCTLKRAFGVNLYS

SEQ ID NO: 91083 - protein, 669 aa, Arabidopsis thaliana
  peptide (1)..(669): Ceres Seq. ID no. 12726395
MVKFDPNSHLRSLINAGNLRAARQVFDKMPHGDIVSWTSIIKRYVTANNSDEALILFSAMRVVDHAVSPDTSVLSVVLKACGQSSNIAYGESLHAYAVKTSLLSSVYVGSSLLDMYKRVGKIDKSCRVFSEMPFRNAVTWTAIITGLVHAGRYKEGLTYFSEMSRSEELSDTYTFAIALKACAGLRQVKYGKAIHTHVIVRGFVTTLCVANSLATMYTECGEMQDGLCLFENMSERDVVSWTSLIVAYKRIGQEVKAVETFIKMRNSQVPPNEQTFASMFSACASLSRLVWGEQLHCNVLSLGLNDSLSVSNSMMKMYSTCGNLVSASVLFQGMRCRDIISWSTIIGGYCQAGFGEEGFKYFSWMRQSGTKPTDFALASLLSVSGNMAVIEGGRQVHALALCFGLEQNSTVRSSLINMYSKCGSIKEASMIFGETDRDDIVSLTAMINGYAEHGKSKEAIDLFEKSLKVGFRPDSVTFISVLTACTHSGQLDLGFHYFNMMQETYNMRPAKEHYGCMVDLLCRAGRLSDAEKMINEMSWKKDDVVWTTLLIACKAKGDIERGRRAAERILELDPTCATALVTLANIYSSTGNLEEAANVRKNMKAKGVIKEPGWSSIKIKDCVSAFVSGDRFHPQSEDIYNILELAVSGAEAHRFDCTLKRAFGVNLYS

SEQ ID NO: 91084 - protein, 641 aa, Arabidopsis thaliana
  peptide (1)..(641): Ceres Seq. ID no. 12726396
MPHGDIVSWTSIIKRYVTANNSDEALILFSAMRVVDHAVSPDTSVLSVVLKACGQSSNIAYGESLHAYAVKTSLLSSVYVGSSLLDMYKRVGKIDKSCRVFSEMPFRNAVTWTAIITGLVHAGRYKEGLTYFSEMSRSEELSDTYTFAIALKACAGLRQVKYGKAIHTHVIVRGFVTTLCVANSLATMYTECGEMQDGLCLFENMSERDVVSWTSLIVAYKRIGQEVKAVETFIKMRNSQVPPNEQTFASMFSACASLSRLVWGEQLHCNVLSLGLNDSLSVSNSMMKMYSTCGNLVSASVLFQGMRCRDIISWSTIIGGYCQAGFGEEGFKYFSWMRQSGTKPTDFALASLLSVSGNMAVIEGGRQVHALALCFGLEQNSTVRSSLINMYSKCGSIKEASMIFGETDRDDIVSLTAMINGYAEHGKSKEAIDLFEKSLKVGFRPDSVTFISVLTACTHSGQLDLGFHYFNMMQETYNMRPAKEHYGCMVDLLCRAGRLSDAEKMINEMSWKKDDVVWTTLLIACKAKGDIERGRRAAERILELDPTCATALVTLANIYSSTGNLEEAANVRKNMKAKGVIKEPGWSSIKIKDCVSAFVSGDRFHPQSEDIYNILELAVSGAEAHRFDCTLKRAFGVNLYS

SEQ ID NO: 91085 - DNA, 1470 bp, Arabidopsis thaliana
  misc_feature (1)..(1470): Ceres Seq. ID no. 12726436
  misc_feature (1)..(1470): Ortholog of  Ceres SEQ ID NO 13594209 as cited in SEQ ID NO 59089
  misc_feature (1)..(1470): Ortholog of  Ceres SEQ ID NO 14307995 as cited in SEQ ID NO 63970
  misc_feature (1)..(1470): Ortholog of  Ceres SEQ ID NO 14302228 as cited in SEQ ID NO 65061
  misc_feature (1)..(1470): Ortholog of  Ceres SEQ ID NO 15176091 as cited in SEQ ID NO 65733
  misc_feature (1)..(1470): Ortholog of  Ceres SEQ ID NO 15169585 as cited in SEQ ID NO 66076
  misc_feature (1)..(1470): Ortholog of  Ceres SEQ ID NO 13502874 as cited in SEQ ID NO 66298
  misc_feature (1)..(1470): Ortholog of  Ceres SEQ ID NO 12614124 as cited in SEQ ID NO 68392
  misc_feature (1)..(1470): Ortholog of  Ceres SEQ ID NO 15176087 as cited in SEQ ID NO 68692
atgatgatcatgttctttctgttatgctcaataatctttgtagttaccatcataattttcagaaaacagaagagagggaagaaaagaaacacacttccgtcaccaccgggactaccgttgatcggaaaccttcatcaactcggccgccaccctcaccgatcactatgctctctcagccaccggtacggtcctcttatgcttcttcactttggccgtgtccccgttcttgtagtatcttcagctgaattggctagagacgttttgaagacgcatgaccgtgttttcgcaagccggccacggtcaaaaatcttcgagaaacttctttacgataagcatgatgtggcctcagctccttatggagagtactggaggcaaatgaaaagtgtgtgcgtcctccatctattcagcaacaaaatggtacgatcctttcgagaagtgagagaagaagagatcagtctgatgatggaaaagatcaggaaatcgatttctttgccggtaaatctaagcaagatcttggtgagtttaactaacgatgtgatatgtaaagttgctttgggacggaaatacggtggtgaaacggattttaaggagttaatggagagactaaataaactattggggacgtttagtgtggggagttatgtaccttggcttgcgtggattgattggatccgcggtttagactgtcaactagaaaagacggcaaacgatgttgataagttctttgagagagttgtgcaagatcatgtcgatggaaacagagatatgactgattttgtggatgtattgctcgctattcaaagagataagaccgtcgggtttgaaatcaaccgtgttagcataaaggcaattgtcatgaatgtttttgtgggtggtacggatacatcgtctacacttatggaatgggcaatgacagagcttctacgtcatccaaagtgtctgaaaagactccaagaagaagtccgcacgatttgcaaggataaatcaagtgtgtcagaagaagaaattcaaaacatgagctacttaaaagctgtaatcaaagaggcactcaggctccatcctccacttccattgatggttcctcacgaatcaacacaagatgtcagattaggagatcaccacataccagccggtacacaggtattgatcaatgcatgggcaatcgggagagaggctgcgacgtggggaccagacgtggaggagtttagaccagagaggcatttagattcgtctgttgattaccggggtcaggcttttgaactgattccattcggatcaggaagaaggatttgtccagcaatatcattcgctgtggtgttgaatgaggttgttttggctaacttagtgcatcggtttgattggagattatcagtcgaatctacagaagatcagaccgaggtcgctgaatcaacgggtattgcgatccaccgcatgttcccactctacgccattgcatcaaatactacttga

SEQ ID NO: 91086 - protein, 489 aa, Arabidopsis thaliana
  peptide (1)..(489): Ceres Seq. ID no. 12726437
MMIMFFLLCSIIFVVTIIIFRKQKRGKKRNTLPSPPGLPLIGNLHQLGRHPHRSLCSLSHRYGPLMLLHFGRVPVLVVSSAELARDVLKTHDRVFASRPRSKIFEKLLYDKHDVASAPYGEYWRQMKSVCVLHLFSNKMVRSFREVREEEISLMMEKIRKSISLPVNLSKILVSLTNDVICKVALGRKYGGETDFKELMERLNKLLGTFSVGSYVPWLAWIDWIRGLDCQLEKTANDVDKFFERVVQDHVDGNRDMTDFVDVLLAIQRDKTVGFEINRVSIKAIVMNVFVGGTDTSSTLMEWAMTELLRHPKCLKRLQEEVRTICKDKSSVSEEEIQNMSYLKAVIKEALRLHPPLPLMVPHESTQDVRLGDHHIPAGTQVLINAWAIGREAATWGPDVEEFRPERHLDSSVDYRGQAFELIPFGSGRRICPAISFAVVLNEVVLANLVHRFDWRLSVESTEDQTEVAESTGIAIHRMFPLYAIASNTT

SEQ ID NO: 91087 - protein, 488 aa, Arabidopsis thaliana
  peptide (1)..(488): Ceres Seq. ID no. 12726438
MIMFFLLCSIIFVVTIIIFRKQKRGKKRNTLPSPPGLPLIGNLHQLGRHPHRSLCSLSHRYGPLMLLHFGRVPVLVVSSAELARDVLKTHDRVFASRPRSKIFEKLLYDKHDVASAPYGEYWRQMKSVCVLHLFSNKMVRSFREVREEEISLMMEKIRKSISLPVNLSKILVSLTNDVICKVALGRKYGGETDFKELMERLNKLLGTFSVGSYVPWLAWIDWIRGLDCQLEKTANDVDKFFERVVQDHVDGNRDMTDFVDVLLAIQRDKTVGFEINRVSIKAIVMNVFVGGTDTSSTLMEWAMTELLRHPKCLKRLQEEVRTICKDKSSVSEEEIQNMSYLKAVIKEALRLHPPLPLMVPHESTQDVRLGDHHIPAGTQVLINAWAIGREAATWGPDVEEFRPERHLDSSVDYRGQAFELIPFGSGRRICPAISFAVVLNEVVLANLVHRFDWRLSVESTEDQTEVAESTGIAIHRMFPLYAIASNTT

SEQ ID NO: 91088 - protein, 486 aa, Arabidopsis thaliana
  peptide (1)..(486): Ceres Seq. ID no. 12726439
MFFLLCSIIFVVTIIIFRKQKRGKKRNTLPSPPGLPLIGNLHQLGRHPHRSLCSLSHRYGPLMLLHFGRVPVLVVSSAELARDVLKTHDRVFASRPRSKIFEKLLYDKHDVASAPYGEYWRQMKSVCVLHLFSNKMVRSFREVREEEISLMMEKIRKSISLPVNLSKILVSLTNDVICKVALGRKYGGETDFKELMERLNKLLGTFSVGSYVPWLAWIDWIRGLDCQLEKTANDVDKFFERVVQDHVDGNRDMTDFVDVLLAIQRDKTVGFEINRVSIKAIVMNVFVGGTDTSSTLMEWAMTELLRHPKCLKRLQEEVRTICKDKSSVSEEEIQNMSYLKAVIKEALRLHPPLPLMVPHESTQDVRLGDHHIPAGTQVLINAWAIGREAATWGPDVEEFRPERHLDSSVDYRGQAFELIPFGSGRRICPAISFAVVLNEVVLANLVHRFDWRLSVESTEDQTEVAESTGIAIHRMFPLYAIASNTT

SEQ ID NO: 91089 - DNA, 1461 bp, Arabidopsis thaliana
  misc_feature (1)..(1461): Ceres Seq. ID no. 12726440
  misc_feature (1)..(1461): Ortholog of  Ceres SEQ ID NO 13594209 as cited in SEQ ID NO 59089
  misc_feature (1)..(1461): Ortholog of  Ceres SEQ ID NO 14307995 as cited in SEQ ID NO 63970
  misc_feature (1)..(1461): Ortholog of  Ceres SEQ ID NO 14302228 as cited in SEQ ID NO 65061
  misc_feature (1)..(1461): Ortholog of  Ceres SEQ ID NO 15169585 as cited in SEQ ID NO 66076
  misc_feature (1)..(1461): Ortholog of  Ceres SEQ ID NO 13502874 as cited in SEQ ID NO 66298
  misc_feature (1)..(1461): Ortholog of  Ceres SEQ ID NO 12614124 as cited in SEQ ID NO 68392
  misc_feature (1)..(1461): Ortholog of  Ceres SEQ ID NO 15176087 as cited in SEQ ID NO 68692
atgatgatgatgatcatacttctcttatgctcaataatactcataaccattctcttcttcaaaaaacagtcgagagggaagaagagcaacgcacctccatcaccaccgagacttcctctgataagaaaccttcatcagctcgggcgccaccctcaccgatcattatgctccctcagccaccgttacggtcctctgatgctcctccactttggcagtgtccctgttcttgtagtctcctccgcagatgcggctaaagacgttttgaagacgcatgaccgcgtttttgctagccgtccacggtcaaaaatctttgataagattttttacaacgggcgagatgtggccttagctccttatggagagtattggaggcaaatgaaaagtgtgtgcgtcctccatctctttagtaacaaaatggtacgatcctttcgagacgttagacaagaagagatcagcctgatgattgagaagatccgaatatcgagttctttgcggataaatttaagcgagatcctggtgaatcttacaaacaatgtaatatgtagagttgctttgggacggaaatacggcggtaagaccgattttaaagacttaatgaaaaggctaacgaggctactaggcgagtttagtgtcgggagttatgtatcgtggctcgcatggattgactggatccgcggtttggatggtcaacttataaagataagcaatgatcttgatgaattcttggagagggttgtccaagatcatgtagatggggatggacacaagaatgattttgtggatttcttgctcacaattgagagagagaagagcgttgggtttgaaatcgaccggttaagcataaaagcaattatcttggatgtttttgtgggtgatatggacacaacatacactcttttggaatgggcaatgacagagctactatgccaccatgagtgtctagacagactccaagaagaagttcgtatggtttgtaaagacaaatcgggtgtatcagaagacgaccttcaagacatgaaatacttaaaagctgtgattaaagagacactaaggctacatcctccacttccattgatggttcctcacgaatcaacacatgatgtcaaattaagagactatcacatacctgccggtacacatgtaatgatcaatgcttgggcaatcgggagagaggctgcgacatggggaccagacgcggaagagtttagaccagagagacatttgaattcgtatgttgattaccgaggtcaggatacggagctggtcccgtttggagcagggagaaggatttgcccagcaatatcatttgctgtggtattggatgaggtggttttggctaacttagtgcatcagtttgattggacactaccggaggaatctacagaatatcagactgatgtcgctgaatcaaccggtatggcggttcatcgcatgttcccactcttcgccatgactacttga

SEQ ID NO: 91090 - protein, 486 aa, Arabidopsis thaliana
  peptide (1)..(486): Ceres Seq. ID no. 12726441
MMMMIILLLCSIILITILFFKKQSRGKKSNAPPSPPRLPLIRNLHQLGRHPHRSLCSLSHRYGPLMLLHFGSVPVLVVSSADAAKDVLKTHDRVFASRPRSKIFDKIFYNGRDVALAPYGEYWRQMKSVCVLHLFSNKMVRSFRDVRQEEISLMIEKIRISSSLRINLSEILVNLTNNVICRVALGRKYGGKTDFKDLMKRLTRLLGEFSVGSYVSWLAWIDWIRGLDGQLIKISNDLDEFLERVVQDHVDGDGHKNDFVDFLLTIEREKSVGFEIDRLSIKAIILDVFVGDMDTTYTLLEWAMTELLCHHECLDRLQEEVRMVCKDKSGVSEDDLQDMKYLKAVIKETLRLHPPLPLMVPHESTHDVKLRDYHIPAGTHVMINAWAIGREAATWGPDAEEFRPERHLNSYVDYRGQDTELVPFGAGRRICPAISFAVVLDEVVLANLVHQFDWTLPEESTEYQTDVAESTGMAVHRMFPLFAMTT

SEQ ID NO: 91091 - protein, 485 aa, Arabidopsis thaliana
  peptide (1)..(485): Ceres Seq. ID no. 12726442
MMMIILLLCSIILITILFFKKQSRGKKSNAPPSPPRLPLIRNLHQLGRHPHRSLCSLSHRYGPLMLLHFGSVPVLVVSSADAAKDVLKTHDRVFASRPRSKIFDKIFYNGRDVALAPYGEYWRQMKSVCVLHLFSNKMVRSFRDVRQEEISLMIEKIRISSSLRINLSEILVNLTNNVICRVALGRKYGGKTDFKDLMKRLTRLLGEFSVGSYVSWLAWIDWIRGLDGQLIKISNDLDEFLERVVQDHVDGDGHKNDFVDFLLTIEREKSVGFEIDRLSIKAIILDVFVGDMDTTYTLLEWAMTELLCHHECLDRLQEEVRMVCKDKSGVSEDDLQDMKYLKAVIKETLRLHPPLPLMVPHESTHDVKLRDYHIPAGTHVMINAWAIGREAATWGPDAEEFRPERHLNSYVDYRGQDTELVPFGAGRRICPAISFAVVLDEVVLANLVHQFDWTLPEESTEYQTDVAESTGMAVHRMFPLFAMTT

SEQ ID NO: 91092 - protein, 484 aa, Arabidopsis thaliana
  peptide (1)..(484): Ceres Seq. ID no. 12726443
MMIILLLCSIILITILFFKKQSRGKKSNAPPSPPRLPLIRNLHQLGRHPHRSLCSLSHRYGPLMLLHFGSVPVLVVSSADAAKDVLKTHDRVFASRPRSKIFDKIFYNGRDVALAPYGEYWRQMKSVCVLHLFSNKMVRSFRDVRQEEISLMIEKIRISSSLRINLSEILVNLTNNVICRVALGRKYGGKTDFKDLMKRLTRLLGEFSVGSYVSWLAWIDWIRGLDGQLIKISNDLDEFLERVVQDHVDGDGHKNDFVDFLLTIEREKSVGFEIDRLSIKAIILDVFVGDMDTTYTLLEWAMTELLCHHECLDRLQEEVRMVCKDKSGVSEDDLQDMKYLKAVIKETLRLHPPLPLMVPHESTHDVKLRDYHIPAGTHVMINAWAIGREAATWGPDAEEFRPERHLNSYVDYRGQDTELVPFGAGRRICPAISFAVVLDEVVLANLVHQFDWTLPEESTEYQTDVAESTGMAVHRMFPLFAMTT

SEQ ID NO: 91093 - DNA, 1263 bp, Arabidopsis thaliana
  misc_feature (1)..(1263): Ceres Seq. ID no. 12726444
  misc_feature (1)..(1263): Ortholog of  Ceres SEQ ID NO 13594209 as cited in SEQ ID NO 59089
  misc_feature (1)..(1263): Ortholog of  Ceres SEQ ID NO 13502874 as cited in SEQ ID NO 66298
  misc_feature (1)..(1263): Ortholog of  Ceres SEQ ID NO 12614124 as cited in SEQ ID NO 68392
atgctcctccacttcggaagtgtccccgttattgtagcctctacagcagaagcagctcgagacgttttaaagacgcatgatcgcgtttttgctagccgtccacggtcaaaaatcttcgaaaagcttctttacaagagccgtaatatggcctcagctccttatggagagtattggcgacaaatgaagagtgttagtgttctccatctcctcagcaacaaaatggtacggtcctttcaagacgtgagacaagaagagatcactctgatgatggaaacgatccgtaaatcgagttctaaaccggtaaatcttagcaagatcttgtcgagtttaactaacgatgttatatgtagagtagctttgggacggaaatatggtgttggaacagattttaaagagttaatagacaggctcatgaggcaacttggtacgtttactatcgggagttatgtaccgtggcttgcgtggactgattgggtcagcggtttggaggctcgactggaaaagaccgctaatgattttgataagctattggagagaattgtgcaggatcatgaagatggagacggcgacaagactgattttgtggatgtattgctcgcagctcagagagacaagagtttcgggttcgatattgaccggttaagcataaaagcaatcgtcttggatgcttttgtgggtggtacagacacatcctccacgcttgtggaatgggaaatgacagagcttctacgacacccaacgtgtctaaaaaaacttcaagaggaagtccgtacgatttgtaagggaaaatcaagtgtgtctgaagatgacattcaaggaatggaatacttaaaagctgtggtcaaagaggcactcaggctacatccaccagttccattgatggttcctcatcaatcaacacaagatgttaggttaagagataaccatatacctgccggtacgcaggttatagtcaatctttgggccgtcgggagagaggctgcgacgtggggaccagatgcgaatgagtttagaccggagaggcatttagagtcgccttctgatttccggggtcaggattttgagctgattccttttggagcagggagaaggatgtgtccaggaatatcatttgctgtggtgctgaatgaggtagtcttggctaacttagtgcatgggtttgattggcaatctatagacgatgagaccgatgttgctgaatcaatcggtagtgtgattcgccgcatgcaccctctttacgtcattccatcatctactacttga

SEQ ID NO: 91094 - protein, 420 aa, Arabidopsis thaliana; identical to SEQ ID NO: 86699
  peptide (1)..(420): Ceres Seq. ID no. 12726445

SEQ ID NO: 91095 - protein, 372 aa, Arabidopsis thaliana; identical to SEQ ID NO: 86700
  peptide (1)..(372): Ceres Seq. ID no. 12726446

SEQ ID NO: 91096 - protein, 360 aa, Arabidopsis thaliana
  peptide (1)..(360): Ceres Seq. ID no. 12726447
MKSVSVLHLLSNKMVRSFQDVRQEEITLMMETIRKSSSKPVNLSKILSSLTNDVICRVALGRKYGVGTDFKELIDRLMRQLGTFTIGSYVPWLAWTDWVSGLEARLEKTANDFDKLLERIVQDHEDGDGDKTDFVDVLLAAQRDKSFGFDIDRLSIKAIVLDAFVGGTDTSSTLVEWEMTELLRHPTCLKKLQEEVRTICKGKSSVSEDDIQGMEYLKAVVKEALRLHPPVPLMVPHQSTQDVRLRDNHIPAGTQVIVNLWAVGREAATWGPDANEFRPERHLESPSDFRGQDFELIPFGAGRRMCPGISFAVVLNEVVLANLVHGFDWQSIDDETDVAESIGSVIRRMHPLYVIPSSTT

SEQ ID NO: 91097 - DNA, 1605 bp, Arabidopsis thaliana
  misc_feature (1)..(1605): Ceres Seq. ID no. 12726448
  misc_feature (1)..(1605): Ortholog of  Ceres SEQ ID NO 13594209 as cited in SEQ ID NO 59089
  misc_feature (1)..(1605): Ortholog of  Ceres SEQ ID NO 14307995 as cited in SEQ ID NO 63970
  misc_feature (1)..(1605): Ortholog of  Ceres SEQ ID NO 14302228 as cited in SEQ ID NO 65061
  misc_feature (1)..(1605): Ortholog of  Ceres SEQ ID NO 15176091 as cited in SEQ ID NO 65733
  misc_feature (1)..(1605): Ortholog of  Ceres SEQ ID NO 15169585 as cited in SEQ ID NO 66076
  misc_feature (1)..(1605): Ortholog of  Ceres SEQ ID NO 13502874 as cited in SEQ ID NO 66298
  misc_feature (1)..(1605): Ortholog of  Ceres SEQ ID NO 12614124 as cited in SEQ ID NO 68392
  misc_feature (1)..(1605): Ortholog of  Ceres SEQ ID NO 15176087 as cited in SEQ ID NO 68692
atgactcagatcatctaagttcaaaaagaagaccacaaattcttagaaactctttactagaaaatcttgacgaaacttgaagaatacaagcatggaatcaatgatcaggataattctgctaagcttgataatcttcattaccatcctctttttcataaaacagaaaaaagggaagaaaagcaacacacctgcgtcaccaccgagacttccgttgataggaaaccttcatcaactcggtcgccaccctcaccgatcactatgctctctcagcaatcgttacggccctcttatgctccttcgttttggccttgtccccgttcttgtagtctcttccgcagatgtggctcgagatattttgaagacgtatgaccgcgtttttgcaagccggccacggtcaaaaatctttgagaaaatattttatgaggcccgtgatgtggccttagctccttatggagagtattggaggcaaatgaagagcgtgtgcgtcctccatctcctcaccaacaaaatggtcagatcctttcgaaacgtgagacaagaagagatcagtctgatgatggagaagatccagaaatcaagttctttgcaagtgaatctaagcgagctcttggggagtttaactaacgatgtgatatctagagttgctttgggacggaaatatagtgatgaaacggattttaaggagttaatgaaaaggctcacgaagctactgggcgagttttgtgtggggacttatgtaccatggcttgcatggattgattggatcagcggtttggatggacaactaaaaaagacaggtaatgatcttgatgaattcttggagaaagttgtccaagatcatgaagatggcgacgcacaaaggactgactttgtggatgtattgctcagaatccagagggagaagagcgtcgggtttgaaatcgaccggttaagcataaaggcaatcatcttggatgttgttgtgggtggtacggatacatcgtacgcacttatggagtgggcaatgacagagcttcttcatcgcccagagtgtctgaacagactccaagaagaagtccgtacgatttgtaagggaaattcgagtgtatcagaagatgacatcaaagacatgaactacttaaaagctgtgatcaaagagactatgaggctacatcctccacttccattgatggttcctcacgaatcaacacaagatgtcagattaggagattaccacatacctgcgggtacacaggtaatgatcaatgcttgggcgatcgggagagaggctgcgacgtggggaccagacgcggagaagtttagaccggagagacatttaaattcgtctgtcgatttccgaggtcacaattttgagcttattccatttggagcagggagaaggatttgtccagcaatatcattcgctgtgatcttgattgaggtgactttggctaacttagtgcatcggtatgattggagattaccggaggaatatatagaagatcaaaccaatgtcgctgaatcaaccggtatggtgattcaccgtttattccctctttacgccattgtatcatctactacttgatggatgcattatacataaatgcttactattatgttatgtct

SEQ ID NO: 91098 - protein, 490 aa, Arabidopsis thaliana
  peptide (1)..(490): Ceres Seq. ID no. 12726449
MESMIRIILLSLIIFITILFFIKQKKGKKSNTPASPPRLPLIGNLHQLGRHPHRSLCSLSNRYGPLMLLRFGLVPVLVVSSADVARDILKTYDRVFASRPRSKIFEKIFYEARDVALAPYGEYWRQMKSVCVLHLLTNKMVRSFRNVRQEEISLMMEKIQKSSSLQVNLSELLGSLTNDVISRVALGRKYSDETDFKELMKRLTKLLGEFCVGTYVPWLAWIDWISGLDGQLKKTGNDLDEFLEKVVQDHEDGDAQRTDFVDVLLRIQREKSVGFEIDRLSIKAIILDVVVGGTDTSYALMEWAMTELLHRPECLNRLQEEVRTICKGNSSVSEDDIKDMNYLKAVIKETMRLHPPLPLMVPHESTQDVRLGDYHIPAGTQVMINAWAIGREAATWGPDAEKFRPERHLNSSVDFRGHNFELIPFGAGRRICPAISFAVILIEVTLANLVHRYDWRLPEEYIEDQTNVAESTGMVIHRLFPLYAIVSSTT

SEQ ID NO: 91099 - protein, 487 aa, Arabidopsis thaliana
  peptide (1)..(487): Ceres Seq. ID no. 12726450
MIRIILLSLIIFITILFFIKQKKGKKSNTPASPPRLPLIGNLHQLGRHPHRSLCSLSNRYGPLMLLRFGLVPVLVVSSADVARDILKTYDRVFASRPRSKIFEKIFYEARDVALAPYGEYWRQMKSVCVLHLLTNKMVRSFRNVRQEEISLMMEKIQKSSSLQVNLSELLGSLTNDVISRVALGRKYSDETDFKELMKRLTKLLGEFCVGTYVPWLAWIDWISGLDGQLKKTGNDLDEFLEKVVQDHEDGDAQRTDFVDVLLRIQREKSVGFEIDRLSIKAIILDVVVGGTDTSYALMEWAMTELLHRPECLNRLQEEVRTICKGNSSVSEDDIKDMNYLKAVIKETMRLHPPLPLMVPHESTQDVRLGDYHIPAGTQVMINAWAIGREAATWGPDAEKFRPERHLNSSVDFRGHNFELIPFGAGRRICPAISFAVILIEVTLANLVHRYDWRLPEEYIEDQTNVAESTGMVIHRLFPLYAIVSSTT

SEQ ID NO: 91100 - protein, 424 aa, Arabidopsis thaliana
  peptide (1)..(424): Ceres Seq. ID no. 12726451
MLLRFGLVPVLVVSSADVARDILKTYDRVFASRPRSKIFEKIFYEARDVALAPYGEYWRQMKSVCVLHLLTNKMVRSFRNVRQEEISLMMEKIQKSSSLQVNLSELLGSLTNDVISRVALGRKYSDETDFKELMKRLTKLLGEFCVGTYVPWLAWIDWISGLDGQLKKTGNDLDEFLEKVVQDHEDGDAQRTDFVDVLLRIQREKSVGFEIDRLSIKAIILDVVVGGTDTSYALMEWAMTELLHRPECLNRLQEEVRTICKGNSSVSEDDIKDMNYLKAVIKETMRLHPPLPLMVPHESTQDVRLGDYHIPAGTQVMINAWAIGREAATWGPDAEKFRPERHLNSSVDFRGHNFELIPFGAGRRICPAISFAVILIEVTLANLVHRYDWRLPEEYIEDQTNVAESTGMVIHRLFPLYAIVSSTT

SEQ ID NO: 91101 - DNA, 693 bp, Arabidopsis thaliana
  misc_feature (1)..(693): Ceres Seq. ID no. 12726452
  misc_feature (1)..(693): Ortholog of  Ceres SEQ ID NO 12623816 as cited in SEQ ID NO 61298
atgaagcaattctggagtccaagtagtatcaacaagaacaaagctatggttgagaatctgcaaaatcatggtatagttacttcagatgaagttgctaaagctatggaggctgtggatagaggcgtatttgtaacagatcgttcctctgcttatgttgatagtcccatgtctattggttataatgtgactatatcagctcctcatatgcatgcaatgtgtcttcaacttcttgaaaaacatttgaaaccgggaatgcgtgtacttgatgttggctcggggaccgggtacttaactgcttgctttgcggttatggttggaaccgaagggcgtgctattggtgtggaacatattcctgaattggtggcttcttctgttaagaatattgaagcgagtgctgcttcgccatttctgaaagaaaggtctcttgctgttcatgttggtgatgggaggcaaggatgggctgagtttgctccgtatgatgctattcacgtcggagcagcagcaccggagatcccagaggcgttgattgatcagttgaagcccggtgggagactggtgattccggttgggaacatattccaagatctgcaagtggtggataagaactcagatggttctgttagcatcaaggatgaaacttcagttcgttatgttcctttgactagccgtgaagcccagctgagaggggactga

SEQ ID NO: 91102 - protein, 230 aa, Arabidopsis thaliana
  peptide (1)..(230): Ceres Seq. ID no. 12726453
MKQFWSPSSINKNKAMVENLQNHGIVTSDEVAKAMEAVDRGVFVTDRSSAYVDSPMSIGYNVTISAPHMHAMCLQLLEKHLKPGMRVLDVGSGTGYLTACFAVMVGTEGRAIGVEHIPELVASSVKNIEASAASPFLKERSLAVHVGDGRQGWAEFAPYDAIHVGAAAPEIPEALIDQLKPGGRLVIPVGNIFQDLQVVDKNSDGSVSIKDETSVRYVPLTSREAQLRGD

SEQ ID NO: 91103 - protein, 215 aa, Arabidopsis thaliana
  peptide (1)..(215): Ceres Seq. ID no. 12726454
MVENLQNHGIVTSDEVAKAMEAVDRGVFVTDRSSAYVDSPMSIGYNVTISAPHMHAMCLQLLEKHLKPGMRVLDVGSGTGYLTACFAVMVGTEGRAIGVEHIPELVASSVKNIEASAASPFLKERSLAVHVGDGRQGWAEFAPYDAIHVGAAAPEIPEALIDQLKPGGRLVIPVGNIFQDLQVVDKNSDGSVSIKDETSVRYVPLTSREAQLRGD

SEQ ID NO: 91104 - protein, 196 aa, Arabidopsis thaliana
  peptide (1)..(196): Ceres Seq. ID no. 12726455
MEAVDRGVFVTDRSSAYVDSPMSIGYNVTISAPHMHAMCLQLLEKHLKPGMRVLDVGSGTGYLTACFAVMVGTEGRAIGVEHIPELVASSVKNIEASAASPFLKERSLAVHVGDGRQGWAEFAPYDAIHVGAAAPEIPEALIDQLKPGGRLVIPVGNIFQDLQVVDKNSDGSVSIKDETSVRYVPLTSREAQLRGD

SEQ ID NO: 91105 - DNA, 1056 bp, Arabidopsis thaliana
  misc_feature (1)..(1056): Ceres Seq. ID no. 12726456
  misc_feature (1)..(1056): Ortholog of  Ceres SEQ ID NO 13648081 as cited in SEQ ID NO 165
  misc_feature (1)..(1056): Ortholog of  Ceres SEQ ID NO 15224803 as cited in SEQ ID NO 56572
  misc_feature (1)..(1056): Ortholog of  Ceres SEQ ID NO 13502952 as cited in SEQ ID NO 62271
  misc_feature (1)..(1056): Ortholog of  Ceres SEQ ID NO 13596000 as cited in SEQ ID NO 68188
atgaagaaacttcttttgatatttctcttttctcttgtcattctccaaactgcttgtggattcgattacgacgacaaggaaatagaaagcgaagagggcttatcaacgctttatgatagatggaggagccaccactccgttcctaggagtctaaatgaaagggagaagagattcaacgttttcagacacaatgtcatgcatgtccacaataccaacaagaagaaccgatcctacaaacttaagctcaacaagtttgcagatttaacaattaatgagttcaagaatgcatacaccggttccaacatcaagcatcacagaatgttgcaaggaccaaaacgcggctcaaaacagttcatgtatgatcatgagaatttatccaaattaccgtcctccgttgattggagaaagaaaggtgctgtcactgaaatcaagaatcaaggaaaatgtgctgttgagggaatcaacaagatcaagactaacaaactggtctcactgtctgaacaagaactagtggattgtgatactaagcagaatgaaggttgtaacggaggtcttatggagattgcatttgaattcatcaagaagaacggtggtatcaccactgaagatagctatccttatgaaggtatcgatggaaaatgcgacgcttcaaaggataacggcgtgcttgtgacgatagatgggcatgaagatgtacccgaaaacgacgaaaatgctcttcttaaggctgttgcaaaccaacctgtatctgttgcaattgatgctggaagttcagatttccagttttattcagagggagtgtttacgggatcttgtggaacagagctgaaccatggtgtggcagcggtcgggtatggatctgagagggggaaaaagtattggatagtgagaaactcatggggagctgaatggggagagggaggctatataaagattgaaagagagattgatgaaccggaagggcgttgcggtattgcgatggaggcatcgtatccgatcaagctatcgtcgtctaatcctaccccgaaagacggtgatgtcaaagatgagctctag

SEQ ID NO: 91106 - protein, 351 aa, Arabidopsis thaliana
  peptide (1)..(351): Ceres Seq. ID no. 12726457
MKKLLLIFLFSLVILQTACGFDYDDKEIESEEGLSTLYDRWRSHHSVPRSLNEREKRFNVFRHNVMHVHNTNKKNRSYKLKLNKFADLTINEFKNAYTGSNIKHHRMLQGPKRGSKQFMYDHENLSKLPSSVDWRKKGAVTEIKNQGKCAVEGINKIKTNKLVSLSEQELVDCDTKQNEGCNGGLMEIAFEFIKKNGGITTEDSYPYEGIDGKCDASKDNGVLVTIDGHEDVPENDENALLKAVANQPVSVAIDAGSSDFQFYSEGVFTGSCGTELNHGVAAVGYGSERGKKYWIVRNSWGAEWGEGGYIKIEREIDEPEGRCGIAMEASYPIKLSSSNPTPKDGDVKDEL

SEQ ID NO: 91107 - protein, 286 aa, Arabidopsis thaliana
  peptide (1)..(286): Ceres Seq. ID no. 12726458
MHVHNTNKKNRSYKLKLNKFADLTINEFKNAYTGSNIKHHRMLQGPKRGSKQFMYDHENLSKLPSSVDWRKKGAVTEIKNQGKCAVEGINKIKTNKLVSLSEQELVDCDTKQNEGCNGGLMEIAFEFIKKNGGITTEDSYPYEGIDGKCDASKDNGVLVTIDGHEDVPENDENALLKAVANQPVSVAIDAGSSDFQFYSEGVFTGSCGTELNHGVAAVGYGSERGKKYWIVRNSWGAEWGEGGYIKIEREIDEPEGRCGIAMEASYPIKLSSSNPTPKDGDVKDEL

SEQ ID NO: 91108 - protein, 245 aa, Arabidopsis thaliana
  peptide (1)..(245): Ceres Seq. ID no. 12726459
MLQGPKRGSKQFMYDHENLSKLPSSVDWRKKGAVTEIKNQGKCAVEGINKIKTNKLVSLSEQELVDCDTKQNEGCNGGLMEIAFEFIKKNGGITTEDSYPYEGIDGKCDASKDNGVLVTIDGHEDVPENDENALLKAVANQPVSVAIDAGSSDFQFYSEGVFTGSCGTELNHGVAAVGYGSERGKKYWIVRNSWGAEWGEGGYIKIEREIDEPEGRCGIAMEASYPIKLSSSNPTPKDGDVKDEL

SEQ ID NO: 91109 - DNA, 4065 bp, Arabidopsis thaliana
  misc_feature (1)..(4065): Ceres Seq. ID no. 12726468
  misc_feature (1)..(4065): Ortholog of  Ceres SEQ ID NO 13597129 as cited in SEQ ID NO 64175
atggcggtttcagagcagagtcaagatgtgtttccatggcttaaatcgttaccggttgctccagagttcagacctactctagcagagtttcaagatccgatcgcttacattttgaagattgaagaagaagcttctagatatggaatctgtaaaattctgcctccactgcctcctccttccaaaaaaacctcgatttctaatctcaaccgttctctggcggcaagagcggcggcgagggttcgtgacggcggctttggcgcgtgtgattatgacggtggtcccacattcgccacgcgccagcagcagatcgggttttgccctaggaaacagcgtccagtgcagagacctgtgtggcagagtggagaggagtactcttttggtgagttcgagtttaaagctaagaactttgagaagaattatctcaagaaatgtggtaaaaagagtcaactctctgcccttgaaattgaaacactttactggagagccactgtggataaacccttctctgttgagtatgccaatgacatgcctggctcggcttttatccctctgagtctggctgctgcgaggaggagagagtctggtggtgaaggaggaacagttggtgagaccgcttggaacatgagggcaatgtctagagccgaaggatcattgcttaagttcatgaaggaagagatccctggagttacatcaccaatggtgtatgttgctatgatgtttagttggtttgcttggcatgtggaggaccatgaccttcatagtctcaattacttgcatatgggtgctggtaagacttggtacggtgtgccaaaggatgctgctctggcttttgaggaggttgttagggttcatggttacggtgaagagctcaatcctcttgtgacattttctactcttggtgagaagacaactgtgatgtctcctgaagtatttgttaaagccggaataccgtgttgcaggttagtgcaaaatcctggagagtttgtcgtcacctttccgggagcttatcattcgggatttagtcatggatttaattttggagaagcatctaacattgccactcccgaatggttgagaatggctaaagatgctgctatccggcgagctgctataaattaccctccaatggtttctcatctccagctactttatgactttgtattggctctaggttctagagtgccaacaagcatcaatcccaaaccacggagttctagattaaaagataaggcaagaagcgaaggagaaagattgaccaaaaagctatttgtgcaaaacattatccacaacaacgaattgctttcttctctcggaaaaggatccccagtggcccttctcccacagagttcctcagatatatcagtttgttctgacctgcgaattggatcccatttgataaccaaccaggaaaacccaatccagttaaagtgtgaggacttaagttctgatagtgttgtggttgatctcagtaacggtttaaaggatacagtttcagtgaaagaaaaatttacatctttatgtgaaaggagcagaaatcacctagcaagcacggagaaggacactcaagaaactctgtctgatgctgaaaggaggaagaatgatgcagctgttgcgctttcggatcaaaggcttttctcttgtgttacatgtggagtcttaagctttgattgtgtagctatcgttcaacctaaagaagcagctgctagatatctcatgtctgcagattgtagcttcttcaatgattggacagctgcttctggatctgcaaatcttggtcaggctgcaagatcacttcatcctcaaagcaaagagaagcatgatgtaaattacttctacaatgttcctgttcaaactatggatcattcagtgaagactggcgatcaaaaaacttcaacaacttccccgacaatagcgcataaagataatgatgttcttgggatgttagcttcagcatatggagactcttctgattccgaggaagaagatcaaaaaggcttagttacccctagttccaaaggggaaacaaaaacgtatgatcaagaaggttcagatggccatgaggaggctagagatggtagaacttctgattttaactgccagagactaaccagcgaacagaatgggttaagcaaaggcggaaaatcatcacttctggaaatagctttaccatttattccaagatctgatgacgattcatgtcggttgcacgtgttttgtcttgagcatgctgcggaagtggaacagcaacttcgtccttttggggggattaacttaatgttactgtgccatccagagtaccccaggatagaggctgaagcaaagatagttgccgaagagctcgtcatcaatcacgaatggaatgatactgaattcaggaatgtgacccgagaggatgaggaaacgattcaggcagcgttggataatgttgaagctaagggtgggaacagtgattggaccgtaaaattgggtgttaacctttcttacagcgctattctcagtcgctctcctctgtacagtaagcagatgccgtataactccatcatatacaaggcgttcggtcgcagctctccagtagcgagctcaccctcgaaacccaaagtctctggtaaaagatcgtccagacagaggaaatatgttgttggaaaatggtgtggtaaggtgcatccctttttgctggagcaggacttagagggggaagaatctgaaagaagttgtcatcttcgagttgctatggatgaggatgccactggaaagagatcgtttcctaataatgtttccagggattcgacaacaatgtttggaagaaagtattgtaggaagagaaagataagagcaaaggcggtgccacgcaagaagcttacttcttttaagagggaagatggagtttctgatgacacatcagaagatcattcttataagcagcaatggagggcttccgggaatgaggaagagtcttattttgagacagggaacacagcttctggtgattcatcaaatcaaatgtctgatccgcacaagggaattatcagacataaaggttataaagaatttgagtcagatgatgaggtttcagaccgttcacttggggaagagtatactgtacgggcatgtgcagcttcagagagctcaatggagaatggctctcagcattcaatgtatgaccatgatgatgatgatgatgatatcgacaggcagcctagggggattccaaggagccaacagacaagagtttttaggaatccagtttcatatgagtcagaagataatggcgtttatcagcaaagcggaagaatatccataagtaataggcaagctaatcgaatggttggtgaatatgattcagcagagaattctttggaggaacgaggcttttgcagtacagggaaaaggcaaaccaggtcaacagccaaacgaatagcaaaaaccaagacagttcagagttcgagagacacaaaaggtcgctttttgcaagaatttgcatctggaaagaagaatgaagaattggattcatacatggagggacctagcacacggcttagggtgagacatcagaagccgtcgagagggtctttagaaacaaaaccaaagaagattggtaagaagagaagtggtaatgcttccttctccagagttgcaactgaaaaagatgtggaggaaaaagaagaagaagaagaagaagaagagaatgaggaagaggaatgtgcagcataccaatgtaacatggagggttgcacgatgagtttcagttcggaaaaacagttgatgttacacaaaagaaacatatgcccaattaaaggctgtggtaaaaacttcttctcacacaagtatttggttcaacaccagcgtgttcactcagacgaccgtcctctgaaatgtccatggaagggatgtaagatgacgttcaagtgggcttggtctagaaccgagcacataagggttcacacaggcgctaggccttatgtttgcgctgaaccggattgtggtcaaacattcaggtttgtctctgacttcagccggcataaaaggaagaccggtcattcggttaagaagaccaacaaaaggtga

SEQ ID NO: 91110 - protein, 1354 aa, Arabidopsis thaliana
  peptide (1)..(1354): Ceres Seq. ID no. 12726469
MAVSEQSQDVFPWLKSLPVAPEFRPTLAEFQDPIAYILKIEEEASRYGICKILPPLPPPSKKTSISNLNRSLAARAAARVRDGGFGACDYDGGPTFATRQQQIGFCPRKQRPVQRPVWQSGEEYSFGEFEFKAKNFEKNYLKKCGKKSQLSALEIETLYWRATVDKPFSVEYANDMPGSAFIPLSLAAARRRESGGEGGTVGETAWNMRAMSRAEGSLLKFMKEEIPGVTSPMVYVAMMFSWFAWHVEDHDLHSLNYLHMGAGKTWYGVPKDAALAFEEVVRVHGYGEELNPLVTFSTLGEKTTVMSPEVFVKAGIPCCRLVQNPGEFVVTFPGAYHSGFSHGFNFGEASNIATPEWLRMAKDAAIRRAAINYPPMVSHLQLLYDFVLALGSRVPTSINPKPRSSRLKDKARSEGERLTKKLFVQNIIHNNELLSSLGKGSPVALLPQSSSDISVCSDLRIGSHLITNQENPIQLKCEDLSSDSVVVDLSNGLKDTVSVKEKFTSLCERSRNHLASTEKDTQETLSDAERRKNDAAVALSDQRLFSCVTCGVLSFDCVAIVQPKEAAARYLMSADCSFFNDWTAASGSANLGQAARSLHPQSKEKHDVNYFYNVPVQTMDHSVKTGDQKTSTTSPTIAHKDNDVLGMLASAYGDSSDSEEEDQKGLVTPSSKGETKTYDQEGSDGHEEARDGRTSDFNCQRLTSEQNGLSKGGKSSLLEIALPFIPRSDDDSCRLHVFCLEHAAEVEQQLRPFGGINLMLLCHPEYPRIEAEAKIVAEELVINHEWNDTEFRNVTREDEETIQAALDNVEAKGGNSDWTVKLGVNLSYSAILSRSPLYSKQMPYNSIIYKAFGRSSPVASSPSKPKVSGKRSSRQRKYVVGKWCGKVHPFLLEQDLEGEESERSCHLRVAMDEDATGKRSFPNNVSRDSTTMFGRKYCRKRKIRAKAVPRKKLTSFKREDGVSDDTSEDHSYKQQWRASGNEEESYFETGNTASGDSSNQMSDPHKGIIRHKGYKEFESDDEVSDRSLGEEYTVRACAASESSMENGSQHSMYDHDDDDDDIDRQPRGIPRSQQTRVFRNPVSYESEDNGVYQQSGRISISNRQANRMVGEYDSAENSLEERGFCSTGKRQTRSTAKRIAKTKTVQSSRDTKGRFLQEFASGKKNEELDSYMEGPSTRLRVRHQKPSRGSLETKPKKIGKKRSGNASFSRVATEKDVEEKEEEEEEEENEEEECAAYQCNMEGCTMSFSSEKQLMLHKRNICPIKGCGKNFFSHKYLVQHQRVHSDDRPLKCPWKGCKMTFKWAWSRTEHIRVHTGARPYVCAEPDCGQTFRFVSDFSRHKRKTGHSVKKTNKR

SEQ ID NO: 91111 - protein, 1179 aa, Arabidopsis thaliana
  peptide (1)..(1179): Ceres Seq. ID no. 12726470
MPGSAFIPLSLAAARRRESGGEGGTVGETAWNMRAMSRAEGSLLKFMKEEIPGVTSPMVYVAMMFSWFAWHVEDHDLHSLNYLHMGAGKTWYGVPKDAALAFEEVVRVHGYGEELNPLVTFSTLGEKTTVMSPEVFVKAGIPCCRLVQNPGEFVVTFPGAYHSGFSHGFNFGEASNIATPEWLRMAKDAAIRRAAINYPPMVSHLQLLYDFVLALGSRVPTSINPKPRSSRLKDKARSEGERLTKKLFVQNIIHNNELLSSLGKGSPVALLPQSSSDISVCSDLRIGSHLITNQENPIQLKCEDLSSDSVVVDLSNGLKDTVSVKEKFTSLCERSRNHLASTEKDTQETLSDAERRKNDAAVALSDQRLFSCVTCGVLSFDCVAIVQPKEAAARYLMSADCSFFNDWTAASGSANLGQAARSLHPQSKEKHDVNYFYNVPVQTMDHSVKTGDQKTSTTSPTIAHKDNDVLGMLASAYGDSSDSEEEDQKGLVTPSSKGETKTYDQEGSDGHEEARDGRTSDFNCQRLTSEQNGLSKGGKSSLLEIALPFIPRSDDDSCRLHVFCLEHAAEVEQQLRPFGGINLMLLCHPEYPRIEAEAKIVAEELVINHEWNDTEFRNVTREDEETIQAALDNVEAKGGNSDWTVKLGVNLSYSAILSRSPLYSKQMPYNSIIYKAFGRSSPVASSPSKPKVSGKRSSRQRKYVVGKWCGKVHPFLLEQDLEGEESERSCHLRVAMDEDATGKRSFPNNVSRDSTTMFGRKYCRKRKIRAKAVPRKKLTSFKREDGVSDDTSEDHSYKQQWRASGNEEESYFETGNTASGDSSNQMSDPHKGIIRHKGYKEFESDDEVSDRSLGEEYTVRACAASESSMENGSQHSMYDHDDDDDDIDRQPRGIPRSQQTRVFRNPVSYESEDNGVYQQSGRISISNRQANRMVGEYDSAENSLEERGFCSTGKRQTRSTAKRIAKTKTVQSSRDTKGRFLQEFASGKKNEELDSYMEGPSTRLRVRHQKPSRGSLETKPKKIGKKRSGNASFSRVATEKDVEEKEEEEEEEENEEEECAAYQCNMEGCTMSFSSEKQLMLHKRNICPIKGCGKNFFSHKYLVQHQRVHSDDRPLKCPWKGCKMTFKWAWSRTEHIRVHTGARPYVCAEPDCGQTFRFVSDFSRHKRKTGHSVKKTNKR

SEQ ID NO: 91112 - protein, 1147 aa, Arabidopsis thaliana
  peptide (1)..(1147): Ceres Seq. ID no. 12726471
MRAMSRAEGSLLKFMKEEIPGVTSPMVYVAMMFSWFAWHVEDHDLHSLNYLHMGAGKTWYGVPKDAALAFEEVVRVHGYGEELNPLVTFSTLGEKTTVMSPEVFVKAGIPCCRLVQNPGEFVVTFPGAYHSGFSHGFNFGEASNIATPEWLRMAKDAAIRRAAINYPPMVSHLQLLYDFVLALGSRVPTSINPKPRSSRLKDKARSEGERLTKKLFVQNIIHNNELLSSLGKGSPVALLPQSSSDISVCSDLRIGSHLITNQENPIQLKCEDLSSDSVVVDLSNGLKDTVSVKEKFTSLCERSRNHLASTEKDTQETLSDAERRKNDAAVALSDQRLFSCVTCGVLSFDCVAIVQPKEAAARYLMSADCSFFNDWTAASGSANLGQAARSLHPQSKEKHDVNYFYNVPVQTMDHSVKTGDQKTSTTSPTIAHKDNDVLGMLASAYGDSSDSEEEDQKGLVTPSSKGETKTYDQEGSDGHEEARDGRTSDFNCQRLTSEQNGLSKGGKSSLLEIALPFIPRSDDDSCRLHVFCLEHAAEVEQQLRPFGGINLMLLCHPEYPRIEAEAKIVAEELVINHEWNDTEFRNVTREDEETIQAALDNVEAKGGNSDWTVKLGVNLSYSAILSRSPLYSKQMPYNSIIYKAFGRSSPVASSPSKPKVSGKRSSRQRKYVVGKWCGKVHPFLLEQDLEGEESERSCHLRVAMDEDATGKRSFPNNVSRDSTTMFGRKYCRKRKIRAKAVPRKKLTSFKREDGVSDDTSEDHSYKQQWRASGNEEESYFETGNTASGDSSNQMSDPHKGIIRHKGYKEFESDDEVSDRSLGEEYTVRACAASESSMENGSQHSMYDHDDDDDDIDRQPRGIPRSQQTRVFRNPVSYESEDNGVYQQSGRISISNRQANRMVGEYDSAENSLEERGFCSTGKRQTRSTAKRIAKTKTVQSSRDTKGRFLQEFASGKKNEELDSYMEGPSTRLRVRHQKPSRGSLETKPKKIGKKRSGNASFSRVATEKDVEEKEEEEEEEENEEEECAAYQCNMEGCTMSFSSEKQLMLHKRNICPIKGCGKNFFSHKYLVQHQRVHSDDRPLKCPWKGCKMTFKWAWSRTEHIRVHTGARPYVCAEPDCGQTFRFVSDFSRHKRKTGHSVKKTNKR

SEQ ID NO: 91113 - DNA, 1521 bp, Arabidopsis thaliana
  misc_feature (1)..(1521): Ceres Seq. ID no. 12726480
  misc_feature (1)..(1521): Ortholog of  Ceres SEQ ID NO 15169603 as cited in SEQ ID NO 65772
  misc_feature (1)..(1521): Ortholog of  Ceres SEQ ID NO 14308003 as cited in SEQ ID NO 65919
  misc_feature (1)..(1521): Ortholog of  Ceres SEQ ID NO 14303087 as cited in SEQ ID NO 66569
atggcatttcttctgagttttttgatactagcgtttcttataaccatcatcttctttttatcttcatcttcaactaaaaaagtccaagaaaacaccacatatggaccaccatcgtatccactcattggctccatactctctttcaacaaaaaccgtcatcgtcttcttcaatggtacaccgagcttctccgtctctctccgtctcaaaccatcttagttcctctcctcggcaaccgtcgcaccatcatcacaacaaacccattaaacgtcgagtacattctcaaaacaaacttctttaacttccctaaaggtaaaccttttactgatcttcttggtgatcttctcggtggaggcatattcaatgtcgacggtcactcatggagctcgcagcgcaaactcgctagccacgagttctccactcgctcgcttaggagttttgcttttgaggttcttaaagacgaagtggagaaccgtctagtcccggttttatccacggcggctgatgttggtacgaccgtggatttgcaagatgttttgaaacgttttgcttttgatgttgtttgtaaagtctcgttgggttgggatccggattgtttggatctaacccgacccgttaatccacttgtggaggcttttgacaccgctgctgagattagtgctcgccgtgccacggagcctatttacgctgtttggaaaacgaagcgtgtgttgaacgtgggaagcgagaggaagcttagggaagcgatcaggaccgtgcacgtgttggtctctgagattgtcagagctaagaagaagagtcttgagatcggaaccggagcagaagcaaagcaagatcttttgtcgaggtttctagccgccggccacaacggcgaagcagtgagggacatggttattagttttatcatggcgggaagagatacaacgtcagcagcgatgacgtggctgttttggttgttgactgagaacgatgacgtggagcggaagattttagaagaagtggacccgttggtgagtttagggttagggtttgaggatttgaaagagatggcttacacgaaggcttgtctatgtgaagccatgaggctatatcctccagtttcgtgggactctaaacatgctgcaaacgacgacgttttgcctgatgggacacgtgtcaagagaggagacaaagtgacctatttcccatacggtatggggaggatggagacgctatggggtacggattcagaagagtttaacccgaaccggtggtttgattctgaaccggggagtacacgaccggttttgaaacctattagtccctacaaatttccggtttttcaagccgggccgagggtttgtgtagggaaagagatggcatttatgcagatgaaatacgtcgttggttctgttttgagtcggtttgagattgtgccggttaacaaagaccggccggtttttgttcctcttttaacggctcatatggctggtgggcttaaggtgaagatcaagagaagaagtcacatccttaacaacgtttaa

SEQ ID NO: 91114 - protein, 506 aa, Arabidopsis thaliana
  peptide (1)..(506): Ceres Seq. ID no. 12726481
MAFLLSFLILAFLITIIFFLSSSSTKKVQENTTYGPPSYPLIGSILSFNKNRHRLLQWYTELLRLSPSQTILVPLLGNRRTIITTNPLNVEYILKTNFFNFPKGKPFTDLLGDLLGGGIFNVDGHSWSSQRKLASHEFSTRSLRSFAFEVLKDEVENRLVPVLSTAADVGTTVDLQDVLKRFAFDVVCKVSLGWDPDCLDLTRPVNPLVEAFDTAAEISARRATEPIYAVWKTKRVLNVGSERKLREAIRTVHVLVSEIVRAKKKSLEIGTGAEAKQDLLSRFLAAGHNGEAVRDMVISFIMAGRDTTSAAMTWLFWLLTENDDVERKILEEVDPLVSLGLGFEDLKEMAYTKACLCEAMRLYPPVSWDSKHAANDDVLPDGTRVKRGDKVTYFPYGMGRMETLWGTDSEEFNPNRWFDSEPGSTRPVLKPISPYKFPVFQAGPRVCVGKEMAFMQMKYVVGSVLSRFEIVPVNKDRPVFVPLLTAHMAGGLKVKIKRRSHILNNV

SEQ ID NO: 91115 - DNA, 2549 bp, Arabidopsis thaliana
  misc_feature (1)..(2549): Ceres Seq. ID no. 12726490
  misc_feature (1)..(2549): Ortholog of  Ceres SEQ ID NO 14304565 as cited in SEQ ID NO 53297
  misc_feature (1)..(2549): Ortholog of  Ceres SEQ ID NO 15225368 as cited in SEQ ID NO 58345
  misc_feature (1)..(2549): Ortholog of  Ceres SEQ ID NO 15172170 as cited in SEQ ID NO 58957
  misc_feature (1)..(2549): Ortholog of  Ceres SEQ ID NO 13654989 as cited in SEQ ID NO 63117
  misc_feature (1)..(2549): Ortholog of  Ceres SEQ ID NO 13584744 as cited in SEQ ID NO 69137
agatcataaacagaaaacattaatatgagctctaattgtagttgttctcttttgagtctcttctctctccttctgatcattgatctcaccgttgctagctcttgtcctaagacatgtggaggaatcgacatcccgtacccgtttggaatcggaacgggttgctatctcgagaaatggtacgagattatttgtgtcaacaactctgttccttttctttccatcattaacagggaagttgtgagtatctctttttcggatatgtatcgccggttctttaacgtaggctacgggtcaattcgcataagaaacccaatagcttcaaagggatgctcaagtggcggacaagagtttggatcacttttaaatatgacaggttaccctttttaccttggcgacaacaatatgctcatagcggttggctgcaacaacacggcgtcgttgacaaatgtcgagccaagtattgtgggatgcgagtctacttgcagcacaaatcaagatatacctataaatgattatctcggggtactctactgtaatgctaggtatggcgattccgagtattgtaaaaatatttccattatgaatgatacaagctgcaacggtattggatgctgcaaggcaagtttgcccgctaggtatcaacagattattggtgtggaaatagatgatagtaacacagaatccaagggatgcaaagttgccttcataacagacgaggaatactttttgtcaaatggatctgacccggagaggcttcatgctaatggatatgatacggttgacctaagatggttcatccatacggcgaatcattccttcataggctctctaggatgcaaaagtatagacgagtacacaattctaagaagagacaatcgtgaatacggaataggttgcctttgcgactataactctacaactacaggctatgcaacatgttcatgcgctagtggtttcgaaggcaacccatatattcctggcgaatgcaaagatattaatgaatgcgtaagaggcattgatggaaacccagtctgtacggcaggcaagtgtgtcaatttgctgggcggttatacgtgtgagtacacaaatcatcgaccacttgttatagggcttagcactagtttcagcacattggtattcattggtggaatatactggttatacaaatttattagaagacaaaggaggttaaaccaaaagaagaaattctttaagcgtaatgggggtttattgttgcaacaacaattgactacaactgaaggcaacgtggacagtacaagagtgttcaactcaagagagttggagaaagccaccgaaaactttagcttaaccagaatactaggcgaaggaggtcaaggtacagtgtacaagggaatgcttgtagacggtagaatagtagcagtaaagaagtccaaagtcgtagacgaagacaagctagaagagttcatcaacgaagtcgtcattctctcacaaatcaaccataggaacatcgtaaaactcttggggtgttgcctagagacagatgtccctattctagtctacgaattcattcctaatggtaacctttttgagcatcttcatgatgattccgatgattatacgatgactacttgggaagtgcgtcttcgtattgctgtagatattgcaggagcgctttcatatttgcactcggctgcatcatctccaatctatcacagagacatcaagtctacaaacataatgttagatgagaaacatcgagccaaagtgtccgattttggtacttcaagaacggtgaccgtggatcatacccacctcactacagtagtttcaggcacggtgggatatatggatccagagtatttccagtcgagccaattcacagacaaaagtgatgtttatagctttggagtcgtgctagcggagctaatcactggagaaaaatcagtctcttttctgcgatctcaggaatataggacattggcaacttatttcactcttgcaatgaaagagaacagactctccgacattattgatgctcgaataagagatggttgtaagttgaatcaagtgacagcagccgcaaaaattgcaaggaaatgtttgaatatgaagggaaggaaacgaccaagtatgagacaagtatcgatggaattggagaagattcgttcatattctgaagatatgcagccgtatgagtatgctagcgaaaacgaagaagaaaaaaaagaaacattagtggacgttaacgtagagtcgagaaactacgtgagtgttaccgccgcatcatctcaatacagcattgctacaacatcttcgtcgcggtcagatgttgaaccattgtttcctcggtaatatattaaccatgcatgcaaacaaatttattactacctcatatctttgcatttacgttctgttttggtctttacgtgtgaagttatttctataaatgtcgtcactcgtcaatttgtgttattaaccatacagatctgtttgtaaccactttgtagtttgtactttgtactatacacttcccaatacataagaataatttcatagtttacttcttt

SEQ ID NO: 91116 - protein, 769 aa, Arabidopsis thaliana
  peptide (1)..(769): Ceres Seq. ID no. 12726491
MSSNCSCSLLSLFSLLLIIDLTVASSCPKTCGGIDIPYPFGIGTGCYLEKWYEIICVNNSVPFLSIINREVVSISFSDMYRRFFNVGYGSIRIRNPIASKGCSSGGQEFGSLLNMTGYPFYLGDNNMLIAVGCNNTASLTNVEPSIVGCESTCSTNQDIPINDYLGVLYCNARYGDSEYCKNISIMNDTSCNGIGCCKASLPARYQQIIGVEIDDSNTESKGCKVAFITDEEYFLSNGSDPERLHANGYDTVDLRWFIHTANHSFIGSLGCKSIDEYTILRRDNREYGIGCLCDYNSTTTGYATCSCASGFEGNPYIPGECKDINECVRGIDGNPVCTAGKCVNLLGGYTCEYTNHRPLVIGLSTSFSTLVFIGGIYWLYKFIRRQRRLNQKKKFFKRNGGLLLQQQLTTTEGNVDSTRVFNSRELEKATENFSLTRILGEGGQGTVYKGMLVDGRIVAVKKSKVVDEDKLEEFINEVVILSQINHRNIVKLLGCCLETDVPILVYEFIPNGNLFEHLHDDSDDYTMTTWEVRLRIAVDIAGALSYLHSAASSPIYHRDIKSTNIMLDEKHRAKVSDFGTSRTVTVDHTHLTTVVSGTVGYMDPEYFQSSQFTDKSDVYSFGVVLAELITGEKSVSFLRSQEYRTLATYFTLAMKENRLSDIIDARIRDGCKLNQVTAAAKIARKCLNMKGRKRPSMRQVSMELEKIRSYSEDMQPYEYASENEEEKKETLVDVNVESRNYVSVTAASSQYSIATTSSSRSDVEPLFPR

SEQ ID NO: 91117 - protein, 691 aa, Arabidopsis thaliana
  peptide (1)..(691): Ceres Seq. ID no. 12726492
MYRRFFNVGYGSIRIRNPIASKGCSSGGQEFGSLLNMTGYPFYLGDNNMLIAVGCNNTASLTNVEPSIVGCESTCSTNQDIPINDYLGVLYCNARYGDSEYCKNISIMNDTSCNGIGCCKASLPARYQQIIGVEIDDSNTESKGCKVAFITDEEYFLSNGSDPERLHANGYDTVDLRWFIHTANHSFIGSLGCKSIDEYTILRRDNREYGIGCLCDYNSTTTGYATCSCASGFEGNPYIPGECKDINECVRGIDGNPVCTAGKCVNLLGGYTCEYTNHRPLVIGLSTSFSTLVFIGGIYWLYKFIRRQRRLNQKKKFFKRNGGLLLQQQLTTTEGNVDSTRVFNSRELEKATENFSLTRILGEGGQGTVYKGMLVDGRIVAVKKSKVVDEDKLEEFINEVVILSQINHRNIVKLLGCCLETDVPILVYEFIPNGNLFEHLHDDSDDYTMTTWEVRLRIAVDIAGALSYLHSAASSPIYHRDIKSTNIMLDEKHRAKVSDFGTSRTVTVDHTHLTTVVSGTVGYMDPEYFQSSQFTDKSDVYSFGVVLAELITGEKSVSFLRSQEYRTLATYFTLAMKENRLSDIIDARIRDGCKLNQVTAAAKIARKCLNMKGRKRPSMRQVSMELEKIRSYSEDMQPYEYASENEEEKKETLVDVNVESRNYVSVTAASSQYSIATTSSSRSDVEPLFPR

SEQ ID NO: 91118 - protein, 655 aa, Arabidopsis thaliana
  peptide (1)..(655): Ceres Seq. ID no. 12726493
MTGYPFYLGDNNMLIAVGCNNTASLTNVEPSIVGCESTCSTNQDIPINDYLGVLYCNARYGDSEYCKNISIMNDTSCNGIGCCKASLPARYQQIIGVEIDDSNTESKGCKVAFITDEEYFLSNGSDPERLHANGYDTVDLRWFIHTANHSFIGSLGCKSIDEYTILRRDNREYGIGCLCDYNSTTTGYATCSCASGFEGNPYIPGECKDINECVRGIDGNPVCTAGKCVNLLGGYTCEYTNHRPLVIGLSTSFSTLVFIGGIYWLYKFIRRQRRLNQKKKFFKRNGGLLLQQQLTTTEGNVDSTRVFNSRELEKATENFSLTRILGEGGQGTVYKGMLVDGRIVAVKKSKVVDEDKLEEFINEVVILSQINHRNIVKLLGCCLETDVPILVYEFIPNGNLFEHLHDDSDDYTMTTWEVRLRIAVDIAGALSYLHSAASSPIYHRDIKSTNIMLDEKHRAKVSDFGTSRTVTVDHTHLTTVVSGTVGYMDPEYFQSSQFTDKSDVYSFGVVLAELITGEKSVSFLRSQEYRTLATYFTLAMKENRLSDIIDARIRDGCKLNQVTAAAKIARKCLNMKGRKRPSMRQVSMELEKIRSYSEDMQPYEYASENEEEKKETLVDVNVESRNYVSVTAASSQYSIATTSSSRSDVEPLFPR

SEQ ID NO: 91119 - DNA, 1988 bp, Arabidopsis thaliana
  misc_feature (1)..(1988): Ceres Seq. ID no. 12726505
  misc_feature (1)..(1988): Ortholog of  Ceres SEQ ID NO 13597407 as cited in SEQ ID NO 64106
gtcgtcgctcctctgtaaaagtttcttctattcgacgattcctctcgacgttatcatatttcctctccaggagcgtgtttccagaggggatggattctgttcgacgcacttacaccattatgcgaggtcgtcacatagacaagcgtgttccttctaaagagtttctctctgctttggataaagctgaaactgcaggttttttgtacccaccctcataatagtcatgattttactctattgcctactttttggtgcacacggacagtgttatatattttaaagaccacttctgatctttttattgtatttgctcatcaactctatattgcttgtttgtgttttagacatagcattgtacctagatataccacttttttcttgttgcctcaatatcttgaaacttcttctgcatagactgactcttgacttttctcaactccagtacgtcttcctactgggacgggaaaagactgcgggaatccttcctggaagcgatctctgcctcacgtgctcgttgcttctctgacttcgcttttattcggctatcatctcggggttgttaatgaaactctcgaaagcatatcaattgaccttggctttagtgggaacaccatagctgaaggtcttgtggttagcacctgcttaggcggcgcctttattgggtctctgttcagtgggttggtagctgatggtgttgggcgccgtagagctttccagttgagcgctttaccaatgattgttggagcttctgtgagtgcatcaactgagagtcttatgggcatgctcctgggaaggtttttggtcggaattgggatgggcataggtccttctgttacagctctctatgtcactgaggtgtcacctgcttatgtgagaggtacatatgggagttctacccaaatcgcaacatgtattggactcttaggttcgctgtttgctggaatcccggcaaaagataacttgggctggtggcgcatatgtttttggatatccacagtcccagctgcaatgcttgctgtcttcatggaactctgcgtggaaagtcctcagtggctttttaagaggggaagggcagctgaagctgaagctgtgtttgagaagctattgggagggtcgtacgtcaaagctgctatggcagagttagtgaagtcggataggggagatgacgccgattcagccaaattgtcggagttgctttttggacgcagttttagagtggttttcattggatctaccctttttgctttacaacagttgtctgggataaatgctgtgttctatttctcatcaactgtcttcaagaaagctggtgtaccttcagcctctgcaaacatatgtgtaggagtttgcaacctcttaggatcaactgttgctgtggttttgatggataagctggggagaaaagtgttgcttattgggagttttgcgggcatggcagtatcgctgggtctccaagcaatagcatatacttcgcttccttcgccctttggaaccttgtttctctcggttggaggaatgctgctgtttgtgttgtcgtttgcaactggagcgggtcctgttccaagtcttctcctgtctgagatatgccctggtcgacttcgagcaactgcgttggctgtttgtcttgccgttcactgggttataaacttctttgtcgggctgctgtttctgagaatgctggagcaactaggttcggtgcttctaaatgcaatatttgggttcttctgtgtggtggcagtcatctttgtgcagaagaacgtggttgagactaaaggaaagagcctacaagagatagaaatcagtctgctctcttccacccagtgattgatctctttattctgagaattcgtattattcttctggctctctttttttccttggagagacacaagtaacgtgtacctaatatggaagtaggagtgagtagtaagtaggtaaacaacatgtaaggaaatggatattattcattcgagtatagccaacgtttc

SEQ ID NO: 91120 - protein, 363 aa, Arabidopsis thaliana; identical to SEQ ID NO: 88973
  peptide (1)..(363): Ceres Seq. ID no. 12726506

SEQ ID NO: 91121 - protein, 349 aa, Arabidopsis thaliana; identical to SEQ ID NO: 88974
  peptide (1)..(349): Ceres Seq. ID no. 12726507

SEQ ID NO: 91122 - protein, 347 aa, Arabidopsis thaliana
  peptide (1)..(347): Ceres Seq. ID no. 12726508
MLLGRFLVGIGMGIGPSVTALYVTEVSPAYVRGTYGSSTQIATCIGLLGSLFAGIPAKDNLGWWRICFWISTVPAAMLAVFMELCVESPQWLFKRGRAAEAEAVFEKLLGGSYVKAAMAELVKSDRGDDADSAKLSELLFGRSFRVVFIGSTLFALQQLSGINAVFYFSSTVFKKAGVPSASANICVGVCNLLGSTVAVVLMDKLGRKVLLIGSFAGMAVSLGLQAIAYTSLPSPFGTLFLSVGGMLLFVLSFATGAGPVPSLLLSEICPGRLRATALAVCLAVHWVINFFVGLLFLRMLEQLGSVLLNAIFGFFCVVAVIFVQKNVVETKGKSLQEIEISLLSSTQ

SEQ ID NO: 91123 - DNA, 1920 bp, Arabidopsis thaliana
  misc_feature (1)..(1920): Ceres Seq. ID no. 12726542
  misc_feature (1)..(1920): Ortholog of  Ceres SEQ ID NO 13639663 as cited in SEQ ID NO 57850
aacaatgcccgttgccaagcttctccgcgtcctcttggtagcttgagaagctcgtttgattccattttgtctctaatggctgccctcgcttctccctccctcatcccctcttctctctgcttcgctgccgccgccgatggtccccgttccctctcttctaatttctctgccttttccgacggcggttccaatttcaggtatcacaagagcttcttgtcgctttcatcttcgtcttcttcgtctacgccttatcgaaatcgacggggccgttccctcgtcgtatttgctacttccggagactactacgccactctcggtgtctctaaatctgccaataacaaggagattaaagctgcttatcgacggctcgctcgtcagtatcatcccgatgtgaacaaggaacccggagcaactgaaaaattcaaggaaatcagtgctgcctatgaggtgctatcagacgagcaaaagagagcattatatgatcaatatggtgaagccggtgtcaagagtacagtaggaggagcttctggtccttacacgtcaaatccctttgaccttttcgagacattctttggtgcaagtatgggtggatttcccgggatggaccaagctgattttgggagaacccgccgcagtagggttaccaaaggtgaagatttacggtatgacatcaccttagaactttcggaggctatttttggatctgagaaagaatttgatcttacgcatctggagacatgtgaagcttgtgctggcaccggggcaaaagcaggatccaagatgagaatatgctccacttgtggtgggcggggtcaagttatgagaactgagcaaacaccatttggcatgttttcacaggtttctatatgtccaaactgtggtggagatggtgaggtgatttctgaaaattgccggaaatgttctggagaagggcgtgtgcgtataaaaaaaagcatcaaagtcaaaattcccccgggagttagtgcaggtagcatccttagagtcgccggagaaggtgattctggtcccagaggtggccctccaggagatttgtatgtatatcttgatgttgaagatgtccggggaattgaaagagatggcataaacctattatctaccctttcgatcagttaccttgatgctatactgggtgctgttgttaaggtgaaaacagttgaaggagacactgaactgcagatacctccaggtacacaacctggtgatgtgctagtcctggcaaagaaaggagtaccgaaactgaatagaccgtctatccgcggtgaccacttgtttacagtcaaagtttctgtaccaaatcaaataagtgctggagaacgggagttgctggaggaacttgcatctctgaaggacacgtccagcaaccgctcacgaactcgtgctaagcctcagcaacccagtactctgagcactgcacccagtggctcagaaaacaagaaagatgaagttaaggaggaaaatgaagaaccggagcaagaaaactacttgtggaataacatcaaagaatttgcagggtctgtcgcaaatggagctctaaaatggctgagagataacctctagagatccatcttcaactaacaggtcttgcattaaagctttttatccgcagaattcatgtttcaatttgatgcacagattgtgagaagagggcggttctcctctacctgcccctagttctaaaaatagtagtagagagatacaaccggtttatcgagttggttttggtaaaaaaagaagtgagagaattgaagggtttcttactaaaccgctccatttaatttggttggtcattggtgtttgatggagtcgtcttgaggaaatggttgcatgtgttgatggaacatgttacgtggatgataaaaaaagaaaagtatccaagagaaggcttatttttttgtgtac

SEQ ID NO: 91124 - protein, 525 aa, Arabidopsis thaliana
  peptide (1)..(525): Ceres Seq. ID no. 12726543
NNARCQASPRPLGSLRSSFDSILSLMAALASPSLIPSSLCFAAAADGPRSLSSNFSAFSDGGSNFRYHKSFLSLSSSSSSSTPYRNRRGRSLVVFATSGDYYATLGVSKSANNKEIKAAYRRLARQYHPDVNKEPGATEKFKEISAAYEVLSDEQKRALYDQYGEAGVKSTVGGASGPYTSNPFDLFETFFGASMGGFPGMDQADFGRTRRSRVTKGEDLRYDITLELSEAIFGSEKEFDLTHLETCEACAGTGAKAGSKMRICSTCGGRGQVMRTEQTPFGMFSQVSICPNCGGDGEVISENCRKCSGEGRVRIKKSIKVKIPPGVSAGSILRVAGEGDSGPRGGPPGDLYVYLDVEDVRGIERDGINLLSTLSISYLDAILGAVVKVKTVEGDTELQIPPGTQPGDVLVLAKKGVPKLNRPSIRGDHLFTVKVSVPNQISAGERELLEELASLKDTSSNRSRTRAKPQQPSTLSTAPSGSENKKDEVKEENEEPEQENYLWNNIKEFAGSVANGALKWLRDNL

SEQ ID NO: 91125 - protein, 500 aa, Arabidopsis thaliana
  peptide (1)..(500): Ceres Seq. ID no. 12726544
MAALASPSLIPSSLCFAAAADGPRSLSSNFSAFSDGGSNFRYHKSFLSLSSSSSSSTPYRNRRGRSLVVFATSGDYYATLGVSKSANNKEIKAAYRRLARQYHPDVNKEPGATEKFKEISAAYEVLSDEQKRALYDQYGEAGVKSTVGGASGPYTSNPFDLFETFFGASMGGFPGMDQADFGRTRRSRVTKGEDLRYDITLELSEAIFGSEKEFDLTHLETCEACAGTGAKAGSKMRICSTCGGRGQVMRTEQTPFGMFSQVSICPNCGGDGEVISENCRKCSGEGRVRIKKSIKVKIPPGVSAGSILRVAGEGDSGPRGGPPGDLYVYLDVEDVRGIERDGINLLSTLSISYLDAILGAVVKVKTVEGDTELQIPPGTQPGDVLVLAKKGVPKLNRPSIRGDHLFTVKVSVPNQISAGERELLEELASLKDTSSNRSRTRAKPQQPSTLSTAPSGSENKKDEVKEENEEPEQENYLWNNIKEFAGSVANGALKWLRDNL

SEQ ID NO: 91126 - protein, 331 aa, Arabidopsis thaliana
  peptide (1)..(331): Ceres Seq. ID no. 12726545
MGGFPGMDQADFGRTRRSRVTKGEDLRYDITLELSEAIFGSEKEFDLTHLETCEACAGTGAKAGSKMRICSTCGGRGQVMRTEQTPFGMFSQVSICPNCGGDGEVISENCRKCSGEGRVRIKKSIKVKIPPGVSAGSILRVAGEGDSGPRGGPPGDLYVYLDVEDVRGIERDGINLLSTLSISYLDAILGAVVKVKTVEGDTELQIPPGTQPGDVLVLAKKGVPKLNRPSIRGDHLFTVKVSVPNQISAGERELLEELASLKDTSSNRSRTRAKPQQPSTLSTAPSGSENKKDEVKEENEEPEQENYLWNNIKEFAGSVANGALKWLRDNL

SEQ ID NO: 91127 - DNA, 1113 bp, Arabidopsis thaliana
  misc_feature (1)..(1113): Ceres Seq. ID no. 12726564
  misc_feature (1)..(1113): Ortholog of  Ceres SEQ ID NO 13598741 as cited in SEQ ID NO 62749
  misc_feature (1)..(1113): Ortholog of  Ceres SEQ ID NO 12587535 as cited in SEQ ID NO 64020
  misc_feature (1)..(1113): Ortholog of  Ceres SEQ ID NO 12586366 as cited in SEQ ID NO 68983
atgatgtaccaagaagcagcactcctcttagctctcctcttcatctcttcgaatgtcgtcttatcggccccagtccgcgatggtttattaccaaacggcaacttcgagttgggtcctaaaccctcccaaatgaaaggatccgtggttaaggaacgaaccgccgtaccaaactggaacataatcggctttgtggagttcattaaatccggtcagaaacaagatgacatggtcttggtcgtaccgcagggttcctccgccgttagactaggcaacgaagcctcaatctcccagaaaatatccgtcctacctggccgtctgtactcaataacgttcagcgccgctcgaacctgcgctcaagacgagaggctcaatatatccgtgacgcatgagtcaggtgtgatccctatccagacgatgtacggcagcgatggttgggactcatactcatgggcttttaaagctggtggtcccgaaatcgagatccggttccataaccctggtgttgaagagcacccggcttgcggacctttgatcgacgccgtggctatcaaggctttgttccctcccagattctctggatataatctgataaagaatgggaatttcgaagaaggaccttacgtgtttcccacggcaaaatggggagtactgatcccaccgttcatcgaggacgataacagcccattgcccggttggatgatcgagtctctcaaagccgttaagtacgtagacaaagcacacttcgctgtccccgaaggacaccgagccatcgagcttgttggaggcaaagagagcgccatttctcagatagtgaggacgtcactgaacaaattctacgccctcacgttcaacgtgggagacgccagagacggttgtgagggaccaatgattgtggaagcgttcgctggacagggcaaggtcatggtggactacgcttctaaaggaaaaggcgggtttagacgtgggaggcttgtgttcaaggcagtgtcggccaggacacgtgtcactttcttgagcacgttttaccacatgaaaagcgatcactctggctcgctatgtggtccggtgatcgatgatgttaggctggtagcggttgggaaactccgaggatga

SEQ ID NO: 91128 - protein, 370 aa, Arabidopsis thaliana
  peptide (1)..(370): Ceres Seq. ID no. 12726565
MMYQEAALLLALLFISSNVVLSAPVRDGLLPNGNFELGPKPSQMKGSVVKERTAVPNWNIIGFVEFIKSGQKQDDMVLVVPQGSSAVRLGNEASISQKISVLPGRLYSITFSAARTCAQDERLNISVTHESGVIPIQTMYGSDGWDSYSWAFKAGGPEIEIRFHNPGVEEHPACGPLIDAVAIKALFPPRFSGYNLIKNGNFEEGPYVFPTAKWGVLIPPFIEDDNSPLPGWMIESLKAVKYVDKAHFAVPEGHRAIELVGGKESAISQIVRTSLNKFYALTFNVGDARDGCEGPMIVEAFAGQGKVMVDYASKGKGGFRRGRLVFKAVSARTRVTFLSTFYHMKSDHSGSLCGPVIDDVRLVAVGKLRG

SEQ ID NO: 91129 - protein, 369 aa, Arabidopsis thaliana
  peptide (1)..(369): Ceres Seq. ID no. 12726566
MYQEAALLLALLFISSNVVLSAPVRDGLLPNGNFELGPKPSQMKGSVVKERTAVPNWNIIGFVEFIKSGQKQDDMVLVVPQGSSAVRLGNEASISQKISVLPGRLYSITFSAARTCAQDERLNISVTHESGVIPIQTMYGSDGWDSYSWAFKAGGPEIEIRFHNPGVEEHPACGPLIDAVAIKALFPPRFSGYNLIKNGNFEEGPYVFPTAKWGVLIPPFIEDDNSPLPGWMIESLKAVKYVDKAHFAVPEGHRAIELVGGKESAISQIVRTSLNKFYALTFNVGDARDGCEGPMIVEAFAGQGKVMVDYASKGKGGFRRGRLVFKAVSARTRVTFLSTFYHMKSDHSGSLCGPVIDDVRLVAVGKLRG

SEQ ID NO: 91130 - protein, 327 aa, Arabidopsis thaliana
  peptide (1)..(327): Ceres Seq. ID no. 12726567
MKGSVVKERTAVPNWNIIGFVEFIKSGQKQDDMVLVVPQGSSAVRLGNEASISQKISVLPGRLYSITFSAARTCAQDERLNISVTHESGVIPIQTMYGSDGWDSYSWAFKAGGPEIEIRFHNPGVEEHPACGPLIDAVAIKALFPPRFSGYNLIKNGNFEEGPYVFPTAKWGVLIPPFIEDDNSPLPGWMIESLKAVKYVDKAHFAVPEGHRAIELVGGKESAISQIVRTSLNKFYALTFNVGDARDGCEGPMIVEAFAGQGKVMVDYASKGKGGFRRGRLVFKAVSARTRVTFLSTFYHMKSDHSGSLCGPVIDDVRLVAVGKLRG

SEQ ID NO: 91131 - DNA, 1068 bp, Arabidopsis thaliana
  misc_feature (1)..(1068): Ceres Seq. ID no. 12726580
  misc_feature (1)..(1068): Ortholog of  Ceres SEQ ID NO 12636774 as cited in SEQ ID NO 372
  misc_feature (1)..(1068): Ortholog of  Ceres SEQ ID NO 14311866 as cited in SEQ ID NO 51178
  misc_feature (1)..(1068): Ortholog of  Ceres SEQ ID NO 13582350 as cited in SEQ ID NO 56734
  misc_feature (1)..(1068): Ortholog of  Ceres SEQ ID NO 12476493 as cited in SEQ ID NO 58163
  misc_feature (1)..(1068): Ortholog of  Ceres SEQ ID NO 13597295 as cited in SEQ ID NO 63743
  misc_feature (1)..(1068): Ortholog of  Ceres SEQ ID NO 13597233 as cited in SEQ ID NO 64370
atgccttcactagcagaagagatatgtattggtaacttaggcagtctccaaacactccccgagtcgttcacctggaaactcacagccgccgactcccttctgcgtccctcctccgccgtctcattcgacgcagtggaagagtccattcctgtgatcgacctctctaatcctgacgttaccaccctcattggagatgcctccaaaacatggggagcgtttcagatagccaaccacgggatttctcagaagcttctcgatgatatcgagtctctgtccaaaaccctattcgacatgccgtcagagaggaagcttgaagcggcttcctccgataaaggagttagtggctacggagaacctcgaatctccccctttttcgagaagaaaatgtggtctgaagggtttactattgccgatgactcctaccgcaaccatttcaatactctttggcctcatgatcacaccaagtactgcggtataatccaagaatacgtggacgaaatggaaaaattagcaagcagacttctgtattgcatattaggctcacttggtgtcaccgtggaagacattgaatgggctcacaagctagagaaatctggatcaaaagtgggcagaggcgccatacgactaaaccactacccggtttgtcctgaaccagaacgagccatgggtctagccgctcatacagactccactatcctaaccattctgcaccagagcaacacgggagggctacaagtgttcagggaagagtccggttgggtcacggttgagccggctcctggtgtcctcgtggtcaacattggtgatctctttcacatcttatcgaacgggaaaatcccaagcgtggttcatcgagccaaagttaaccatactcggtcaagaatttcgattgcgtacttatggggtggtccagctggtgatgtgcaaatcgcacctatctctaagttaaccggtccggctgaaccgtctctttaccggtcaattacatggaaagagtatctccaaataaagtatgaggttttcgacaaggccatggacgcaattagggtcgttaatcccaccaattaa

SEQ ID NO: 91132 - protein, 355 aa, Arabidopsis thaliana
  peptide (1)..(355): Ceres Seq. ID no. 12726581
MPSLAEEICIGNLGSLQTLPESFTWKLTAADSLLRPSSAVSFDAVEESIPVIDLSNPDVTTLIGDASKTWGAFQIANHGISQKLLDDIESLSKTLFDMPSERKLEAASSDKGVSGYGEPRISPFFEKKMWSEGFTIADDSYRNHFNTLWPHDHTKYCGIIQEYVDEMEKLASRLLYCILGSLGVTVEDIEWAHKLEKSGSKVGRGAIRLNHYPVCPEPERAMGLAAHTDSTILTILHQSNTGGLQVFREESGWVTVEPAPGVLVVNIGDLFHILSNGKIPSVVHRAKVNHTRSRISIAYLWGGPAGDVQIAPISKLTGPAEPSLYRSITWKEYLQIKYEVFDKAMDAIRVVNPTN

SEQ ID NO: 91133 - protein, 258 aa, Arabidopsis thaliana
  peptide (1)..(258): Ceres Seq. ID no. 12726582
MPSERKLEAASSDKGVSGYGEPRISPFFEKKMWSEGFTIADDSYRNHFNTLWPHDHTKYCGIIQEYVDEMEKLASRLLYCILGSLGVTVEDIEWAHKLEKSGSKVGRGAIRLNHYPVCPEPERAMGLAAHTDSTILTILHQSNTGGLQVFREESGWVTVEPAPGVLVVNIGDLFHILSNGKIPSVVHRAKVNHTRSRISIAYLWGGPAGDVQIAPISKLTGPAEPSLYRSITWKEYLQIKYEVFDKAMDAIRVVNPTN

SEQ ID NO: 91134 - protein, 227 aa, Arabidopsis thaliana
  peptide (1)..(227): Ceres Seq. ID no. 12726583
MWSEGFTIADDSYRNHFNTLWPHDHTKYCGIIQEYVDEMEKLASRLLYCILGSLGVTVEDIEWAHKLEKSGSKVGRGAIRLNHYPVCPEPERAMGLAAHTDSTILTILHQSNTGGLQVFREESGWVTVEPAPGVLVVNIGDLFHILSNGKIPSVVHRAKVNHTRSRISIAYLWGGPAGDVQIAPISKLTGPAEPSLYRSITWKEYLQIKYEVFDKAMDAIRVVNPTN

SEQ ID NO: 91135 - DNA, 1083 bp, Arabidopsis thaliana
  misc_feature (1)..(1083): Ceres Seq. ID no. 12726584
  misc_feature (1)..(1083): Ortholog of  Ceres SEQ ID NO 12636774 as cited in SEQ ID NO 372
  misc_feature (1)..(1083): Ortholog of  Ceres SEQ ID NO 14311866 as cited in SEQ ID NO 51178
  misc_feature (1)..(1083): Ortholog of  Ceres SEQ ID NO 12615466 as cited in SEQ ID NO 62761
  misc_feature (1)..(1083): Ortholog of  Ceres SEQ ID NO 13597295 as cited in SEQ ID NO 63743
  misc_feature (1)..(1083): Ortholog of  Ceres SEQ ID NO 13597439 as cited in SEQ ID NO 64081
  misc_feature (1)..(1083): Ortholog of  Ceres SEQ ID NO 13597233 as cited in SEQ ID NO 64370
  misc_feature (1)..(1083): Ortholog of  Ceres SEQ ID NO 13598327 as cited in SEQ ID NO 68040
acataaagccaaaatataaacacataagccttttagcatgagttcaacgttgagcgatgtgtttagatcgcatcccattcacatcccactctcaaacccacctgacttcaaatctctcccggattcttacacgtggactcctaaagatgatctcctcttctccgcctccgcctccgacgaaaccctgccgctcatcgacctctccgatatccacgtggccactcttgtgggccatgcttgtaccacgtggggagcgttccagatcaccaaccacggcgtcccctcgcgacttctcgacgacattgagttcctcaccggaagtcttttccggcttcccgtacagcggaagctcaaggcggctcggtcagagaatggcgtctccggctacggcgtagctcgtattgcttcgttctttaataagaagatgtggtccgaaggtttcaccgttattggctctcccctccacgatttccgtaaactctggcccagccaccacctcaaatactgtgaaattattgaagagtatgaagaacatatgcaaaagttggcagccaagttgatgtggttcgcattaggttcactgggagttgaagaaaaggacatacaatgggccgggcctaattcagactttcaaggaacccaagcagttatccaactaaaccattatccaaaatgtccagaaccagacagagccatgggcctcgcagcccatacagactcgaccctcatgacaattctgtaccagaacaacaccgccggtctccaagttttccgggatgacgtgggctgggttaccgcgccacctgtccctggctcgctggtggtcaacgtcggtgacttgctccacattttaaccaacggaatcttcccgagcgtgcttcaccgagccagggttaaccacgtccgatctcggttctcaatggcttacctgtggggtccaccatccgatataatgatctctccacttcccaaactggttgatcctctccaatctcctctctacccatctctcacttggaaacaataccttgctaccaaagctactcattttaatcaatctctttccattattagaaattaact

SEQ ID NO: 91136 - protein, 347 aa, Arabidopsis thaliana
  peptide (1)..(347): Ceres Seq. ID no. 12726585
MSSTLSDVFRSHPIHIPLSNPPDFKSLPDSYTWTPKDDLLFSASASDETLPLIDLSDIHVATLVGHACTTWGAFQITNHGVPSRLLDDIEFLTGSLFRLPVQRKLKAARSENGVSGYGVARIASFFNKKMWSEGFTVIGSPLHDFRKLWPSHHLKYCEIIEEYEEHMQKLAAKLMWFALGSLGVEEKDIQWAGPNSDFQGTQAVIQLNHYPKCPEPDRAMGLAAHTDSTLMTILYQNNTAGLQVFRDDVGWVTAPPVPGSLVVNVGDLLHILTNGIFPSVLHRARVNHVRSRFSMAYLWGPPSDIMISPLPKLVDPLQSPLYPSLTWKQYLATKATHFNQSLSIIRN

SEQ ID NO: 91137 - protein, 218 aa, Arabidopsis thaliana
  peptide (1)..(218): Ceres Seq. ID no. 12726586
MWSEGFTVIGSPLHDFRKLWPSHHLKYCEIIEEYEEHMQKLAAKLMWFALGSLGVEEKDIQWAGPNSDFQGTQAVIQLNHYPKCPEPDRAMGLAAHTDSTLMTILYQNNTAGLQVFRDDVGWVTAPPVPGSLVVNVGDLLHILTNGIFPSVLHRARVNHVRSRFSMAYLWGPPSDIMISPLPKLVDPLQSPLYPSLTWKQYLATKATHFNQSLSIIRN

SEQ ID NO: 91138 - protein, 181 aa, Arabidopsis thaliana
  peptide (1)..(181): Ceres Seq. ID no. 12726587
MQKLAAKLMWFALGSLGVEEKDIQWAGPNSDFQGTQAVIQLNHYPKCPEPDRAMGLAAHTDSTLMTILYQNNTAGLQVFRDDVGWVTAPPVPGSLVVNVGDLLHILTNGIFPSVLHRARVNHVRSRFSMAYLWGPPSDIMISPLPKLVDPLQSPLYPSLTWKQYLATKATHFNQSLSIIRN

SEQ ID NO: 91139 - DNA, 1885 bp, Arabidopsis thaliana
  misc_feature (1)..(1885): Ceres Seq. ID no. 12726588
  misc_feature (1)..(1885): Ortholog of  Ceres SEQ ID NO 13595870 as cited in SEQ ID NO 62101
  misc_feature (1)..(1885): Ortholog of  Ceres SEQ ID NO 13590241 as cited in SEQ ID NO 63878
  misc_feature (1)..(1885): Ortholog of  Ceres SEQ ID NO 13657939 as cited in SEQ ID NO 66349
  misc_feature (1)..(1885): Ortholog of  Ceres SEQ ID NO 13660597 as cited in SEQ ID NO 67655
actttgtcttccatcttcgccgacgagtcacatctccgaaatccggagccggagagggagaaagaaggagaatttgggttctccgagatcgaagctcttgcctcggaacccttgattttgttttggaataggctatttttttagtaaaagaggaaatggtgggaagtagtaattcgttagcgggtctacaagaccacttgaaattagcgagagaatatgcactagaaggatcctatgacacatctgtcatcttcttcgatggcgccattgctcagatcaacaagcatttaaacacccttgacgatcctttggcccggaccaaatggatgaacgttaaaaaggccataatggaagagacggaagttgtgaagcaattggatgcagagaggagagcatttaaagaagctcccactgggcgtcgcgctgcttctccacctatcaataccaaatcatcctttgtttttcagcccttggatgagtatccaacttcatccggtggtggtcctatggatgatcctgatgtgtggaggcctcctacccgtgatgttactagtcgaagacccgccagggctggtcaaactggtactagaaaatcacctcaagatggggcttgggctcgtggccctactacacggaccggtccagcttcccgtggtggcagaggtggggctactagtaagtcaactgcaggtgcccgctcttccactgccggaaagaagggagctgcctcaaaatctaacaaggctgagtctatgaatggtgatgctgaagatgggaagtcaaaaaggggattgtatgagggacctgatgaggacctggctgctatgcttgaaagggatgtgttggactcaactcctggtgtccgttgggatgatgttgcaggtttgtctgaagccaaaaggctgcttgaggaggcagttgtccttcctttatggatgcccgaatactttcagggtattcgaagaccatggaaaggagttctcatgtttggtcctcctgggacaggtaaaaccctgttggcaaaagctgttgcaactgagtgtggtaccaccttcttcaatgtatcttctgctacattagcttcaaaatggcgtggagagagtgagcgcatggtcagatgcctgtttgatctggctagggcatatgctccaagcacaatttttattgatgagatcgactctctctgcaattctcgggggggttctggagagcatgaatcatcaagaagggtgaaatcggaactcctagttcaagtagatggagtgagcaatacagcgacaaatgaagatggtagtcgcaaaatagtaatggtattggcagctaccaacttcccgtgggacatagatgaagctctcaggaggaggttggaaaaacgtatatatatcccacttccagattttgaaagtcgtaaggctcttatcaatatcaatctgagaacagttgaggtggcgagtgatgttaacattgaagatgtggcccggagaacggaagggtacagtggagacgatctgactaacgtgtgcagggacgcatcaatgaacgggatgcggcgtaagatagcggggaaaacgagagatgagataaagaacatgtcgaaagacgatatatcaaatgatccagtggcaatgtgtgatttcgaagaggccattaggaaagtgcaaccgagtgtgtcttcctctgatatcgagaaacacgagaagtggctctctgagtttggatctgcttaattaaacccactttttttaatttagtgtcaaaagatgtgtgccttttcttgtgtgttgttgtttattgtatcattattattatttgccagtcatttaacatattcttatgtttctatattccaaacttgtaaacctctacgaaaaaagaaaaggattat

SEQ ID NO: 91140 - protein, 523 aa, Arabidopsis thaliana
  peptide (1)..(523): Ceres Seq. ID no. 12726589
MVGSSNSLAGLQDHLKLAREYALEGSYDTSVIFFDGAIAQINKHLNTLDDPLARTKWMNVKKAIMEETEVVKQLDAERRAFKEAPTGRRAASPPINTKSSFVFQPLDEYPTSSGGGPMDDPDVWRPPTRDVTSRRPARAGQTGTRKSPQDGAWARGPTTRTGPASRGGRGGATSKSTAGARSSTAGKKGAASKSNKAESMNGDAEDGKSKRGLYEGPDEDLAAMLERDVLDSTPGVRWDDVAGLSEAKRLLEEAVVLPLWMPEYFQGIRRPWKGVLMFGPPGTGKTLLAKAVATECGTTFFNVSSATLASKWRGESERMVRCLFDLARAYAPSTIFIDEIDSLCNSRGGSGEHESSRRVKSELLVQVDGVSNTATNEDGSRKIVMVLAATNFPWDIDEALRRRLEKRIYIPLPDFESRKALININLRTVEVASDVNIEDVARRTEGYSGDDLTNVCRDASMNGMRRKIAGKTRDEIKNMSKDDISNDPVAMCDFEEAIRKVQPSVSSSDIEKHEKWLSEFGSA

SEQ ID NO: 91141 - protein, 466 aa, Arabidopsis thaliana
  peptide (1)..(466): Ceres Seq. ID no. 12726590
MNVKKAIMEETEVVKQLDAERRAFKEAPTGRRAASPPINTKSSFVFQPLDEYPTSSGGGPMDDPDVWRPPTRDVTSRRPARAGQTGTRKSPQDGAWARGPTTRTGPASRGGRGGATSKSTAGARSSTAGKKGAASKSNKAESMNGDAEDGKSKRGLYEGPDEDLAAMLERDVLDSTPGVRWDDVAGLSEAKRLLEEAVVLPLWMPEYFQGIRRPWKGVLMFGPPGTGKTLLAKAVATECGTTFFNVSSATLASKWRGESERMVRCLFDLARAYAPSTIFIDEIDSLCNSRGGSGEHESSRRVKSELLVQVDGVSNTATNEDGSRKIVMVLAATNFPWDIDEALRRRLEKRIYIPLPDFESRKALININLRTVEVASDVNIEDVARRTEGYSGDDLTNVCRDASMNGMRRKIAGKTRDEIKNMSKDDISNDPVAMCDFEEAIRKVQPSVSSSDIEKHEKWLSEFGSA

SEQ ID NO: 91142 - protein, 459 aa, Arabidopsis thaliana
  peptide (1)..(459): Ceres Seq. ID no. 12726591
MEETEVVKQLDAERRAFKEAPTGRRAASPPINTKSSFVFQPLDEYPTSSGGGPMDDPDVWRPPTRDVTSRRPARAGQTGTRKSPQDGAWARGPTTRTGPASRGGRGGATSKSTAGARSSTAGKKGAASKSNKAESMNGDAEDGKSKRGLYEGPDEDLAAMLERDVLDSTPGVRWDDVAGLSEAKRLLEEAVVLPLWMPEYFQGIRRPWKGVLMFGPPGTGKTLLAKAVATECGTTFFNVSSATLASKWRGESERMVRCLFDLARAYAPSTIFIDEIDSLCNSRGGSGEHESSRRVKSELLVQVDGVSNTATNEDGSRKIVMVLAATNFPWDIDEALRRRLEKRIYIPLPDFESRKALININLRTVEVASDVNIEDVARRTEGYSGDDLTNVCRDASMNGMRRKIAGKTRDEIKNMSKDDISNDPVAMCDFEEAIRKVQPSVSSSDIEKHEKWLSEFGSA

SEQ ID NO: 91143 - DNA, 1386 bp, Arabidopsis thaliana
  misc_feature (1)..(1386): Ceres Seq. ID no. 12726592
  misc_feature (1)..(1386): Ortholog of  Ceres SEQ ID NO 15177414 as cited in SEQ ID NO 57242
  misc_feature (1)..(1386): Ortholog of  Ceres SEQ ID NO 13594151 as cited in SEQ ID NO 58886
atggggaaggagaatgctgtttctggaaactctataccaatccatggtcgccctgtaactcgtgctcttgcctctgctctgcgtgcttcttctaagctgataacatcttctgaagtggctgctacaacacagaaccagggacgggttcttagagcaaagagtaaaagaacagccttggatgagaagaaagccaatgcacctaagaagcgagctgttcttaaggatatcactaatgttacctgcgagaattcttacacaagttgcttcagtgttgcggtggagaatatcaagcagataaagaagggacgacagagttcttcttcttccaaggtggcatcttcttcggctacttcacaagttacagatgcaaaggtagaagttgtgtcaaattcagcaggagcaagcttgtctgtttttacagatacaagcttaggcacaaacgaaacatcctatagcattatcgcaaagccaagctccagatcgcctccaagaccctttgggacagttgagagaagttgtggtggagcaagtagcccgaaattcgttgacattgattcagatgacaaagatcctctactctgtagcctttatgcacctgacatctactacaacctgcgtgttgctgagcttaaacgaagaccatttcctgattttatggagaaaacacaaagagatgtgactgagacaatgcggggaattcttgttgattggcttgtagaggtctcagaggaatacacacttgtacctgacactctttacctcacagtgtatctcatagactggtttctccatggaaactatgtggaaagacagagacttcaattgcttggcatcacttgtatgctcattgcttcgaagtatgaggaaatccatgcgccacgcattgaggagttctgcttcatcacggataacacttatacaagagatcaggtcctggaaatggagagccaagtactcaagcattttagctttcaaatttacacccccacttcaaaaacattcctcaggagatttcttcgagcagctcaagtttctttcccgaatcaaagtctggaaatggagtttctggcgaattacctaacggaattgacgttaatggactaccctttcttgaagttccttccttcgatcatcgctgcttcggctgtttttcttgccaagtggacattaaaccaatcaagccacccttggaatccaactcttgagcattacacaacgtacaaagcctccgatctcaaagcatctgtccacgccttgcaagatttacagcttaacaccaaaggatgttccttaaactctatacgcatgaagtatagacaggacaagttcaaatccgtggcggtattcagttctggagagctaccggacaagctattcatctcctaa

SEQ ID NO: 91144 - protein, 461 aa, Arabidopsis thaliana
  peptide (1)..(461): Ceres Seq. ID no. 12726593
MGKENAVSGNSIPIHGRPVTRALASALRASSKLITSSEVAATTQNQGRVLRAKSKRTALDEKKANAPKKRAVLKDITNVTCENSYTSCFSVAVENIKQIKKGRQSSSSSKVASSSATSQVTDAKVEVVSNSAGASLSVFTDTSLGTNETSYSIIAKPSSRSPPRPFGTVERSCGGASSPKFVDIDSDDKDPLLCSLYAPDIYYNLRVAELKRRPFPDFMEKTQRDVTETMRGILVDWLVEVSEEYTLVPDTLYLTVYLIDWFLHGNYVERQRLQLLGITCMLIASKYEEIHAPRIEEFCFITDNTYTRDQVLEMESQVLKHFSFQIYTPTSKTFLRRFLRAAQVSFPNQSLEMEFLANYLTELTLMDYPFLKFLPSIIAASAVFLAKWTLNQSSHPWNPTLEHYTTYKASDLKASVHALQDLQLNTKGCSLNSIRMKYRQDKFKSVAVFSSGELPDKLFIS

SEQ ID NO: 91145 - protein, 243 aa, Arabidopsis thaliana
  peptide (1)..(243): Ceres Seq. ID no. 12726594
MEKTQRDVTETMRGILVDWLVEVSEEYTLVPDTLYLTVYLIDWFLHGNYVERQRLQLLGITCMLIASKYEEIHAPRIEEFCFITDNTYTRDQVLEMESQVLKHFSFQIYTPTSKTFLRRFLRAAQVSFPNQSLEMEFLANYLTELTLMDYPFLKFLPSIIAASAVFLAKWTLNQSSHPWNPTLEHYTTYKASDLKASVHALQDLQLNTKGCSLNSIRMKYRQDKFKSVAVFSSGELPDKLFIS

SEQ ID NO: 91146 - protein, 232 aa, Arabidopsis thaliana
  peptide (1)..(232): Ceres Seq. ID no. 12726595
MRGILVDWLVEVSEEYTLVPDTLYLTVYLIDWFLHGNYVERQRLQLLGITCMLIASKYEEIHAPRIEEFCFITDNTYTRDQVLEMESQVLKHFSFQIYTPTSKTFLRRFLRAAQVSFPNQSLEMEFLANYLTELTLMDYPFLKFLPSIIAASAVFLAKWTLNQSSHPWNPTLEHYTTYKASDLKASVHALQDLQLNTKGCSLNSIRMKYRQDKFKSVAVFSSGELPDKLFIS

SEQ ID NO: 91147 - DNA, 1945 bp, Arabidopsis thaliana
  misc_feature (1)..(1945): Ceres Seq. ID no. 12726607
  misc_feature (1)..(1945): Ortholog of  Ceres SEQ ID NO 14310547 as cited in SEQ ID NO 55132
  misc_feature (1)..(1945): Ortholog of  Ceres SEQ ID NO 13596261 as cited in SEQ ID NO 67817
  misc_feature (1)..(1945): Ortholog of  Ceres SEQ ID NO 13662360 as cited in SEQ ID NO 68830
caatcggaagatagaagtttcccaaaacttatcaaatctctgtgtatcgctcgccgacgaggcaggaaggacgaccaattgagacgttgacccttaatccgatttgaacaatctctctctctctctctctctctctctcttggtcgagattcataaaagtctcttctttcgtcttcttcgatctcggataatcacaaagtttatcttcttctttcttttttaaaaataaaatcagagagcagatcttgcgaatggatagcagttactctgtcatttccaaaacttcttacgttgagttacagaaaccgacggttaatgggaaacccagaaacaagttgcttccttctgatgaagaaagcttcgtcaatgattttgacgatgcccgtaatggtgttgggggtgaagatgctgatgatctcgatttcgatgtcgctgattacccactcgttcatggcaaatcatccaatcaaggatctgggatttacggtgctgttttcaatctcaccacttctattatcggcgccgggatcatggcattgcccgccaccatgaaagttctcggcttggttctagggtttgttttgattatcctcatggctcttttgtctgagattagtgttgagcttctggttagattttctgttctttacaagtccaaatcctacggcgaggttgttcaattcgctttggggaaaaccgctagggttttgtctgagatttgtatcattgtcaacaatggtggcgttctcgttgtttacttgattattatgggcgatgttatgtctggttctctccatcacattggggttttggatcaatggttagggaatgggttctgggatcaccgtaaagtgttgattttgattgttatggtcatcttcttggctcctctctgtgctttgaacaagattgattccttgagcgttacatcagctgcttctgttgctcttgctgttgtctttgtggttgtctgttttgttgtcgccaccatcaagcttatcgaaggaactatcgaccctccaaggttgtctcctgactttggttccaaacaagcaattttggaccttcttgtggtcattccgattatgtcaaacgcatacgtttgtcacttcaatgttcagccgatatacaacgagcttgaaggtcgatcacctcataagatgaaccgagttgggagaatcacaacagccatttgtgttgttgtctacgcttcaactgctgtatcgggttatctcctcttcggcaaggacaccgaatcagatatcttgaccaactttgatcaagatctcggtatccggttcagctctgcggtgaattacattgtcagaatcggctacattcttcatctagttctcgtcttccctgtgatccatttctccttgagagaaaccgtcaataccttactgtttgaaggctcgcctcctctatccgaaagcaaaaagagatctttgggactcactgtggtcttgctggctcttatttacattggctcaacgatgataccaaacatatggactgctttcaaattcacaggcgcaacatcagctgtttcacttggttttacattccctgctctgatcgcattgcggttagggaaacagagcaattcgttaagcttcgtggaaagatcagtgtcatggctgatgctaatcttggccgtagtggttagcattgttggaaccattggcaacatttacagcctcgagagcaaatcagattgatacttatagcagttttccaggatcttgtagatttatatagtcagagattctcagtccaataccgaaccggaaatcttcagcgactgctacatgcacctttaggatgtcgatcaatggcgtttgttcaggctaagcctaaagatttccggtttgtgaattatatgtatacagacacctgattcttatgattttattatatatacgcattttttttctgtttttct

SEQ ID NO: 91148 - protein, 489 aa, Arabidopsis thaliana
  peptide (1)..(489): Ceres Seq. ID no. 12726608
MDSSYSVISKTSYVELQKPTVNGKPRNKLLPSDEESFVNDFDDARNGVGGEDADDLDFDVADYPLVHGKSSNQGSGIYGAVFNLTTSIIGAGIMALPATMKVLGLVLGFVLIILMALLSEISVELLVRFSVLYKSKSYGEVVQFALGKTARVLSEICIIVNNGGVLVVYLIIMGDVMSGSLHHIGVLDQWLGNGFWDHRKVLILIVMVIFLAPLCALNKIDSLSVTSAASVALAVVFVVVCFVVATIKLIEGTIDPPRLSPDFGSKQAILDLLVVIPIMSNAYVCHFNVQPIYNELEGRSPHKMNRVGRITTAICVVVYASTAVSGYLLFGKDTESDILTNFDQDLGIRFSSAVNYIVRIGYILHLVLVFPVIHFSLRETVNTLLFEGSPPLSESKKRSLGLTVVLLALIYIGSTMIPNIWTAFKFTGATSAVSLGFTFPALIALRLGKQSNSLSFVERSVSWLMLILAVVVSIVGTIGNIYSLESKSD

SEQ ID NO: 91149 - protein, 396 aa, Arabidopsis thaliana
  peptide (1)..(396): Ceres Seq. ID no. 12726609
MALPATMKVLGLVLGFVLIILMALLSEISVELLVRFSVLYKSKSYGEVVQFALGKTARVLSEICIIVNNGGVLVVYLIIMGDVMSGSLHHIGVLDQWLGNGFWDHRKVLILIVMVIFLAPLCALNKIDSLSVTSAASVALAVVFVVVCFVVATIKLIEGTIDPPRLSPDFGSKQAILDLLVVIPIMSNAYVCHFNVQPIYNELEGRSPHKMNRVGRITTAICVVVYASTAVSGYLLFGKDTESDILTNFDQDLGIRFSSAVNYIVRIGYILHLVLVFPVIHFSLRETVNTLLFEGSPPLSESKKRSLGLTVVLLALIYIGSTMIPNIWTAFKFTGATSAVSLGFTFPALIALRLGKQSNSLSFVERSVSWLMLILAVVVSIVGTIGNIYSLESKSD

SEQ ID NO: 91150 - protein, 390 aa, Arabidopsis thaliana
  peptide (1)..(390): Ceres Seq. ID no. 12726610
MKVLGLVLGFVLIILMALLSEISVELLVRFSVLYKSKSYGEVVQFALGKTARVLSEICIIVNNGGVLVVYLIIMGDVMSGSLHHIGVLDQWLGNGFWDHRKVLILIVMVIFLAPLCALNKIDSLSVTSAASVALAVVFVVVCFVVATIKLIEGTIDPPRLSPDFGSKQAILDLLVVIPIMSNAYVCHFNVQPIYNELEGRSPHKMNRVGRITTAICVVVYASTAVSGYLLFGKDTESDILTNFDQDLGIRFSSAVNYIVRIGYILHLVLVFPVIHFSLRETVNTLLFEGSPPLSESKKRSLGLTVVLLALIYIGSTMIPNIWTAFKFTGATSAVSLGFTFPALIALRLGKQSNSLSFVERSVSWLMLILAVVVSIVGTIGNIYSLESKSD

SEQ ID NO: 91151 - DNA, 2007 bp, Arabidopsis thaliana
  misc_feature (1)..(2007): Ceres Seq. ID no. 12726614
  misc_feature (1)..(2007): Ortholog of  Ceres SEQ ID NO 13597411 as cited in SEQ ID NO 64125
gagtgagtctgattcatctcctctgtttaagcaaagcacttttctaaaatcccacaggagaagagagatcggaagagatgacgaagctggcggaaaaatcgggaagcagaccaccgtgggtgggattagcggcagccgcatgggttcaggtctcggcgggaagtggttcgacgttcccgctttactcctccgctctcaaatcggttttgggttttagccagcagcaggtcacgatccttggcgttgcttgtgatttgggtgaaaacatgggtcttcttcctggatacgccagtaacaagcttcctccatggtcgatgcttctcatcggagcttcctcttgtttcctcggcttcggcgttctttggctctccgtcagccaaatcgttcttggcttgcctttttggctgctttttgtagctctagctttagctaccaatagcaactcgtggttcggtacagcatctcttgtcaccaatatgaggaattttcctatgagccgaggccctgtggctggacttctcaaaggttatattgggatcagtggtgcagcattcactgtcttgttcagcatggtgcttcaccattcagctatggatctgcttctgtttcttacggttggtattccggttatatgcttaactgtgatgtatttcatccgcccctgtattccggctactggtgaagacccttctgagcccatgtatttcgcttttctgcttgtcactagtatactgtttgctgcttatcttgttgtgacgactgttttgagtgaggtgtttatactgcccagcatactcaaatatgttcttgtggctatcatggtgttacttttgttgtcgcctcttgcggttcccatcaagatgacacttttccgttcaaatgccaagagctctccactggggtcttcagacaatctagccaaagaggaaggtactcatgaagaaccgttgctgacaccttctacctcagcttcaaaccttgggcctatctttgagggagatgatgagtcggatatggaaatacttcttgctgaagcagaaggtgccgtgaagaagaagagaaaacccaggagaggtgaggatttcaagtttggccaagtttttgtcaaggcagatttctggctcctttggtttgtctacttcctcggcatgggttcaggtgttacagtctcgaacaacttggcacagatcggatttgcttttggtattaaggacacaacaatactcctgtgtcttttcagtttcttcaacttcataggccgtcttgcttcaggtgccatttctgagcactttgtgaggtcaagaacgcttccaagaacactatggatgggagccgcgcagctagttatggtgttcacattcctcctcttcgccatggctatcgaccacaccatttacgttgcgactgctctaatcggaatatgcatggggtttcagttcttatctatcgcaaccatctccgagctatttggtcttagacattttggaatcaacttcaacttcatactgctgggaaacccgcttggtgccaccattttctcggccattctcgcaggatacatctatgacaaggaggctgataagcaagggaagatgacctgcattggtccagattgcttccgagtaacattcttggttctagccggtgtttgtgggcttggaaccctgctgagcattattttgacagtgagaattcgcccggtttatcaagctctatatgcgtctggctcattccggttgcagccgcaatcaacgggtcattgatatatccagagagcgagaggctgtttagatgaaagaatatatataatataactacactcatagatgctatctacttttcattattattataggctcctactgtatcgtggggcatttttgtttgggtgtattctaagatttgtaactcttgtgttattccgctgtaaccggccaaaaaccggttggaagaacctatatgtatcggcttcttgatgaggttgtaaggttgttgtttgatagttgt

SEQ ID NO: 91152 - protein, 561 aa, Arabidopsis thaliana
  peptide (1)..(561): Ceres Seq. ID no. 12726615
MTKLAEKSGSRPPWVGLAAAAWVQVSAGSGSTFPLYSSALKSVLGFSQQQVTILGVACDLGENMGLLPGYASNKLPPWSMLLIGASSCFLGFGVLWLSVSQIVLGLPFWLLFVALALATNSNSWFGTASLVTNMRNFPMSRGPVAGLLKGYIGISGAAFTVLFSMVLHHSAMDLLLFLTVGIPVICLTVMYFIRPCIPATGEDPSEPMYFAFLLVTSILFAAYLVVTTVLSEVFILPSILKYVLVAIMVLLLLSPLAVPIKMTLFRSNAKSSPLGSSDNLAKEEGTHEEPLLTPSTSASNLGPIFEGDDESDMEILLAEAEGAVKKKRKPRRGEDFKFGQVFVKADFWLLWFVYFLGMGSGVTVSNNLAQIGFAFGIKDTTILLCLFSFFNFIGRLASGAISEHFVRSRTLPRTLWMGAAQLVMVFTFLLFAMAIDHTIYVATALIGICMGFQFLSIATISELFGLRHFGINFNFILLGNPLGATIFSAILAGYIYDKEADKQGKMTCIGPDCFRVTFLVLAGVCGLGTLLSIILTVRIRPVYQALYASGSFRLQPQSTGH

SEQ ID NO: 91153 - protein, 498 aa, Arabidopsis thaliana
  peptide (1)..(498): Ceres Seq. ID no. 12726616
MGLLPGYASNKLPPWSMLLIGASSCFLGFGVLWLSVSQIVLGLPFWLLFVALALATNSNSWFGTASLVTNMRNFPMSRGPVAGLLKGYIGISGAAFTVLFSMVLHHSAMDLLLFLTVGIPVICLTVMYFIRPCIPATGEDPSEPMYFAFLLVTSILFAAYLVVTTVLSEVFILPSILKYVLVAIMVLLLLSPLAVPIKMTLFRSNAKSSPLGSSDNLAKEEGTHEEPLLTPSTSASNLGPIFEGDDESDMEILLAEAEGAVKKKRKPRRGEDFKFGQVFVKADFWLLWFVYFLGMGSGVTVSNNLAQIGFAFGIKDTTILLCLFSFFNFIGRLASGAISEHFVRSRTLPRTLWMGAAQLVMVFTFLLFAMAIDHTIYVATALIGICMGFQFLSIATISELFGLRHFGINFNFILLGNPLGATIFSAILAGYIYDKEADKQGKMTCIGPDCFRVTFLVLAGVCGLGTLLSIILTVRIRPVYQALYASGSFRLQPQSTGH

SEQ ID NO: 91154 - protein, 482 aa, Arabidopsis thaliana
  peptide (1)..(482): Ceres Seq. ID no. 12726617
MLLIGASSCFLGFGVLWLSVSQIVLGLPFWLLFVALALATNSNSWFGTASLVTNMRNFPMSRGPVAGLLKGYIGISGAAFTVLFSMVLHHSAMDLLLFLTVGIPVICLTVMYFIRPCIPATGEDPSEPMYFAFLLVTSILFAAYLVVTTVLSEVFILPSILKYVLVAIMVLLLLSPLAVPIKMTLFRSNAKSSPLGSSDNLAKEEGTHEEPLLTPSTSASNLGPIFEGDDESDMEILLAEAEGAVKKKRKPRRGEDFKFGQVFVKADFWLLWFVYFLGMGSGVTVSNNLAQIGFAFGIKDTTILLCLFSFFNFIGRLASGAISEHFVRSRTLPRTLWMGAAQLVMVFTFLLFAMAIDHTIYVATALIGICMGFQFLSIATISELFGLRHFGINFNFILLGNPLGATIFSAILAGYIYDKEADKQGKMTCIGPDCFRVTFLVLAGVCGLGTLLSIILTVRIRPVYQALYASGSFRLQPQSTGH

SEQ ID NO: 91155 - DNA, 1233 bp, Arabidopsis thaliana
  misc_feature (1)..(1233): Ceres Seq. ID no. 12726693
  misc_feature (1)..(1233): Ortholog of  Ceres SEQ ID NO 13659759 as cited in SEQ ID NO 67663
atggcgaagaaagctgtgttgattggaatcaattaccctggaaccaaggcggagctacggggatgcgtcaacgatgtccggagagtgcacaaatctctcgtggatcggtttggattctccgagagaaacatcactgagctgattgatactgacgagtcttccaccaaacctacagggaagaatattcgaagggcattgttgaatctagttgaatccgctaaaccgggtgatgttcttgtcgtccattacagtggacacgggacgaggttgccggcggagactggagaagacgatgatactggttatgatgagtgtattgttccttgtgatatgaatcttatcaccgatgatgagtttagagatcttgtggagaaagtaccaaaggaagcacacattacaatcatctcagactcttgtcacagtggtggtctcatcgatgaagctaaagagcagatcggagagagcacgaagaagaagccaaagaaagaatctggaggctcttcaggacttggaatcaaaggctttgtgcgtgaagctgtggaagaagcactggaatctaaagggatcgccattcctcaccacaaagatgagaaagacgaaaacaagactaaagagcttaaactagaagatggggcaaaagtccatgtcgtgaacaaatctctgcctctacaaactctaatcgatatcctcaagcaaaatacaggtaacaatgatatcgaagttgggaaaatcagaccaacccttttcaatgtgtttggagaagatgcatccccaaaggttaagaagttcatgaaagtgattctaacaaagctgcaagaaggtaaaactgaaggtgggatattgggaatgattgggaaactagctcaagagtttcttaagcataaactaaacgatgacgaagagtatgtgaaacccgcgatgaagacacatgttgggaacaagcaagaggtctatgcaggcgcgagcaatggttctcttgcggataacggtattttgattagtggttgccaaacagatcaaacttctgcagacgcgagtcctcaaggtcatcctgaaatggcttatggagcattcaccaatgctgtgcagatcatacttgaggagacaaagggtatgattacatacaaagaacttgttttgaaggcaaggaagcttcttaagaaacaaggcttttctcaacgaccaggactatattgcagtgatagttttgtgaatgctccgtttatttgttaa

SEQ ID NO: 91156 - protein, 410 aa, Arabidopsis thaliana
  peptide (1)..(410): Ceres Seq. ID no. 12726694
MAKKAVLIGINYPGTKAELRGCVNDVRRVHKSLVDRFGFSERNITELIDTDESSTKPTGKNIRRALLNLVESAKPGDVLVVHYSGHGTRLPAETGEDDDTGYDECIVPCDMNLITDDEFRDLVEKVPKEAHITIISDSCHSGGLIDEAKEQIGESTKKKPKKESGGSSGLGIKGFVREAVEEALESKGIAIPHHKDEKDENKTKELKLEDGAKVHVVNKSLPLQTLIDILKQNTGNNDIEVGKIRPTLFNVFGEDASPKVKKFMKVILTKLQEGKTEGGILGMIGKLAQEFLKHKLNDDEEYVKPAMKTHVGNKQEVYAGASNGSLADNGILISGCQTDQTSADASPQGHPEMAYGAFTNAVQIILEETKGMITYKELVLKARKLLKKQGFSQRPGLYCSDSFVNAPFIC

SEQ ID NO: 91157 - protein, 300 aa, Arabidopsis thaliana
  peptide (1)..(300): Ceres Seq. ID no. 12726695
MNLITDDEFRDLVEKVPKEAHITIISDSCHSGGLIDEAKEQIGESTKKKPKKESGGSSGLGIKGFVREAVEEALESKGIAIPHHKDEKDENKTKELKLEDGAKVHVVNKSLPLQTLIDILKQNTGNNDIEVGKIRPTLFNVFGEDASPKVKKFMKVILTKLQEGKTEGGILGMIGKLAQEFLKHKLNDDEEYVKPAMKTHVGNKQEVYAGASNGSLADNGILISGCQTDQTSADASPQGHPEMAYGAFTNAVQIILEETKGMITYKELVLKARKLLKKQGFSQRPGLYCSDSFVNAPFIC

SEQ ID NO: 91158 - DNA, 1641 bp, Arabidopsis thaliana
  misc_feature (1)..(1641): Ceres Seq. ID no. 12726700
  misc_feature (1)..(1641): Ortholog of  Ceres SEQ ID NO 13585332 as cited in SEQ ID NO 60654
  misc_feature (1)..(1641): Ortholog of  Ceres SEQ ID NO 13502874 as cited in SEQ ID NO 66298
  misc_feature (1)..(1641): Ortholog of  Ceres SEQ ID NO 12614124 as cited in SEQ ID NO 68392
atggattattatctgaataatgttatcttctcagttgttgtcacattttcgatcactctgaatattgtgtttctcataaaaagcgttgtcgcccgttttcttggtcgtcgtaagaaactgcctccatgcccacggggatttccgatcattgggaacttagtaggaatgctcaagaaccgaccaacctctaaatggatagttcgtgtaatgaacgatatgaagacggatatagcttgcttccggtttggtcgtgtccacgtcattgtcataacgtccgatgtgattgcccgagaagtcgttcgagagaaagacgcagtttttgcggacaggccagattcttactctgccgagtacattagtggcgggtacaatggggtagtgttcgacgagtatggagagagacaaatgaagatgaagaaagtgatgtcgtcggagttaatgtctacaaaggctttaaacttgttactcaaagttagaaacttagaatccgacaacctcctcgcgtatgttcataacctatacaacaaagatgagtccaagacaaaacacggcgccgtagtgaacgtgagagatattgtgtgcactcacacacacaatgtgaagatgagactcttgtttggtcggagacatttcaaggagacgacgatggacgggagtctcggacttatggagaaagaacattttgacgcaattttcgcggctcttgattgtttctttagcttttacgtagccgattactaccctttcttaagaggatggaacctccagggagaggaggctgagttaagagaagccgttgatgtgattgctaggtacaataagatgattatcgatgagaagatagagttgtggagggggcagaataaagactacaatcgtgcggagacgaagaatgatgttcctatgatcaaggattggctcgacattctcttcactcttaaagatgagaatgggaagccgttgcttaccccgcaagaaatcacacatctctctgtggatcttgatgtagtagggattgataatgcagtgaatgtaatagagtggacacttgcggaaatgttgaaccagagagagattctagaaaaagcggtggaagagatcgatatggttgtcggaaaagaaagacttgttcaagaatccgacgtaccaaatctaaactacgtcaaagcttgttgcagagagaccctgagacttcaccctaccaatcctttccttgtccctcacatggcacgtcatgacacaactctcgctggctatttcatcccaaaaggcagtcatattctagtgagtcgtccgggtgttggtcgaaaccctaagacatgggatgagccactcatctacaggcctgagcgccatataaccggcaacgaagtggtgttgactgaaccagacttacgacttgtttcatttggaactggtagacgcggctgcgttggagctaagcttggaacgtccatgattgttacgttgttgggtaggcttctccaagggttcgactggaccattcctcctggtacgacggacagagtcgagctagtcgagtcaaaagaaaatctgttcatggctaatcctttgatggcttgtgtgaagcccagattagatccaaacatgtacccgaaactctggaccggtccagcttga

SEQ ID NO: 91159 - protein, 546 aa, Arabidopsis thaliana
  peptide (1)..(546): Ceres Seq. ID no. 12726701
MDYYLNNVIFSVVVTFSITLNIVFLIKSVVARFLGRRKKLPPCPRGFPIIGNLVGMLKNRPTSKWIVRVMNDMKTDIACFRFGRVHVIVITSDVIAREVVREKDAVFADRPDSYSAEYISGGYNGVVFDEYGERQMKMKKVMSSELMSTKALNLLLKVRNLESDNLLAYVHNLYNKDESKTKHGAVVNVRDIVCTHTHNVKMRLLFGRRHFKETTMDGSLGLMEKEHFDAIFAALDCFFSFYVADYYPFLRGWNLQGEEAELREAVDVIARYNKMIIDEKIELWRGQNKDYNRAETKNDVPMIKDWLDILFTLKDENGKPLLTPQEITHLSVDLDVVGIDNAVNVIEWTLAEMLNQREILEKAVEEIDMVVGKERLVQESDVPNLNYVKACCRETLRLHPTNPFLVPHMARHDTTLAGYFIPKGSHILVSRPGVGRNPKTWDEPLIYRPERHITGNEVVLTEPDLRLVSFGTGRRGCVGAKLGTSMIVTLLGRLLQGFDWTIPPGTTDRVELVESKENLFMANPLMACVKPRLDPNMYPKLWTGPA

SEQ ID NO: 91160 - protein, 491 aa, Arabidopsis thaliana
  peptide (1)..(491): Ceres Seq. ID no. 12726702
MLKNRPTSKWIVRVMNDMKTDIACFRFGRVHVIVITSDVIAREVVREKDAVFADRPDSYSAEYISGGYNGVVFDEYGERQMKMKKVMSSELMSTKALNLLLKVRNLESDNLLAYVHNLYNKDESKTKHGAVVNVRDIVCTHTHNVKMRLLFGRRHFKETTMDGSLGLMEKEHFDAIFAALDCFFSFYVADYYPFLRGWNLQGEEAELREAVDVIARYNKMIIDEKIELWRGQNKDYNRAETKNDVPMIKDWLDILFTLKDENGKPLLTPQEITHLSVDLDVVGIDNAVNVIEWTLAEMLNQREILEKAVEEIDMVVGKERLVQESDVPNLNYVKACCRETLRLHPTNPFLVPHMARHDTTLAGYFIPKGSHILVSRPGVGRNPKTWDEPLIYRPERHITGNEVVLTEPDLRLVSFGTGRRGCVGAKLGTSMIVTLLGRLLQGFDWTIPPGTTDRVELVESKENLFMANPLMACVKPRLDPNMYPKLWTGPA

SEQ ID NO: 91161 - protein, 477 aa, Arabidopsis thaliana
  peptide (1)..(477): Ceres Seq. ID no. 12726703
MNDMKTDIACFRFGRVHVIVITSDVIAREVVREKDAVFADRPDSYSAEYISGGYNGVVFDEYGERQMKMKKVMSSELMSTKALNLLLKVRNLESDNLLAYVHNLYNKDESKTKHGAVVNVRDIVCTHTHNVKMRLLFGRRHFKETTMDGSLGLMEKEHFDAIFAALDCFFSFYVADYYPFLRGWNLQGEEAELREAVDVIARYNKMIIDEKIELWRGQNKDYNRAETKNDVPMIKDWLDILFTLKDENGKPLLTPQEITHLSVDLDVVGIDNAVNVIEWTLAEMLNQREILEKAVEEIDMVVGKERLVQESDVPNLNYVKACCRETLRLHPTNPFLVPHMARHDTTLAGYFIPKGSHILVSRPGVGRNPKTWDEPLIYRPERHITGNEVVLTEPDLRLVSFGTGRRGCVGAKLGTSMIVTLLGRLLQGFDWTIPPGTTDRVELVESKENLFMANPLMACVKPRLDPNMYPKLWTGPA

SEQ ID NO: 91162 - DNA, 3747 bp, Arabidopsis thaliana
  misc_feature (1)..(3747): Ceres Seq. ID no. 12726712
  misc_feature (1)..(3747): Ortholog of  Ceres SEQ ID NO 13593889 as cited in SEQ ID NO 53305
atggataaagctagacatcaacagctttttcagcattccatggaacctggttatagaaacgagactgttcctcaaccatttatgcctgatcaaacagggagcgcgagtgctaatatgcgacctcccaattctaatggttcagatgttaaggcggtgcataacttctccatacaaacaggtgaggaattctctcttgagtttatgcgtgatcgggtgattcctcagaggtcttccaatcccaatggagctggcgacatgaactataacactggttatatggagcttcgaggcttgatagggataagtcacacaggatctgagtgtgcttcagatgtctcaaggttcagcactgtggaaaatggcaccagtgatattgagaggactaactcttcgcttcacgagtttggaaataaactaaatcatgtccagtcagcaccacaagctttactaagtaaagatagcagtgtaggaaatttacatggatacaagaacacgtcttcttcagcctcaggtagtgtaacagcaaaggtgaagatcctttgcagtttcggtgggaaaatacttccacgtccaggtgattcaaagcttcgatacgttggaggtgaaacacacattatatccataagaaaggatatatcttggcaggagcttaggcaaaaaatccttgaaatctattaccaaacacgtgttgtaaagtatcagcttcctggtgaagatcttgacgcgttggtgtctgtatcatctgaagaagatctccagaatatgctggaagaatataatgagatggaaaaccgtgggggatctcagaagcttaggatgtttcttttctccatcagtgatatggatgatgctcttctgggggttaacaaaaatgacggcgactctgagtttcaatatgttgtagctgtaaatggcatggacattggatcaggaaagaactcgacccttcttgggcttgacagctcttcagcaaacaacttagctgagcttgatgtgcggaacactgaggggatcaataccattgctggagatgttgttggagtcggcgcatcacagttaatggtgaatggtttccaacaaacgtctgctcaacagtctgagtctattccaccaagctcatcgcttcattattctcaatctattccactgaatgctgcatatcagttgcagcaatctgttccgccaagctctgctcttcattatccccagtccattaccccaggttcctctcttcagtatccccaatctattacgccaggctcctcttatcagtatccacaatccatcatacctggttctgccagctcctatggaatatacccacaatattatgggcatgtggttcaacatggagaaagagaacggtttcctctctatcctgatcacagttctaactactccgctatcggggaaactaccagttccataccgatccaagggcatgtcagtcagcaaggtggctgggctgaagggtatccgtaccctggcagcacacccaaaagcacacaagcgctagcagaggagcaaaaagtatcatctgatatgaaaattcgtgaggaagttgagcctgaaaaccgtaaaactccggggaatgatcaccagaatcctccccaaatagatgatgttgaggtgaggaatcacaatcaggtccgggagatggcagttgcaacaactccacctagccaggatgcacatttactaccccctagtagagatccacggcagaacactactgcaaaacctgctacctaccgtgatgctgttattactgggcaggttcctctatctggtattgaagatcagctttcaacttcaagcagtacctatgcccctgttcatagcgactctgagtcaaatttaattgatcttaactacccggagcctgagcagtcttcccaaagggtatattgctcagagagaatacctcgtgaacagctagaattgctaaatcgtttgtcgaagtccgataactcattaagctctcagttcgtaacgtctgagtcaccagcaaacactgcacagcaagattcaggaaaagaagcggttggaaagtcacatgacgaattcaagactgttaatgatgatgccaatcaccatacgcacaaagatgtggaaacaatctttgaaaaagtaggagtatcagatgaaactttggaatccgagcccctgcacaagattgtaaatcctgacgatgcaaacaagaacagagtagtcaatggggcagatactgaaattggtgtttccaacttgagccatgtaaacgcagccatgagtcatgttattcctgaagagcaagcttcgctgcagggagatattcttattgatatcaatgaccggtttcctcgtgacttcctctctgaaatattctcacaggcaatctcagaggatacatccactgtccgtccatatcctcacgatggagctgctgttagcatgaatgtgcaaaatcacgatcgtaaaaactggtcatattttcagcagctggctgaagatcagtttatccaaagagatgttgtacttgaccaagctgattctcgcattccatctgaccgtaaagatggtggagagagctccagattgccttatgtctcgccattgagtagagatggtatttcaacaaaccttgctaatcctcagttgactttaggtcaagattatgggggtaatttttctgaaaaggatgggggtggcactggcagcattccccctgctctagagaatgaacagatgaaggtcactgagagtgaggaatttggtgccatggtggagaatcttaggacgccggattctgaaccaaaggatgaaaagacagaaacaaggcatgctgcgcttcctccacttggctcagagtttgactacagtggcttgcagatcattaagaatgaagatcttgaggagttgagggagcttggttctggtacttttggaacggtgtatcatgggaagtggagaggatcagatgtcgctatcaagaggataaagaagagttgctttgctgggcggtcatcagagcaagagagattgactggtgaattttggggggaagctgaaattctttcaaagcttcatcatccgaacgtggtagcattttatggtgttgtaaaagacgggcctggagggaccttggcgactgtgacagagtacatggttgatggttctctgaggcatgttctggtccggaaggacaggcatcttgatcgtcgtaagagactaatcattgccatggatgctgcatttggaatggaatatttacactccaaaaacactgttcactttgatttgaaatgtgacaatttacttgtgaacttgaaagatccttctcgcccaatctgcaaggttggtgactttggtttgtcaaaaatcaagagaaatacgttggtatctggtggtgtacgtggaaccttaccgtggatggcaccagagcttctaaacgggagcagtagcaaagtttctgaaaaggttgatgttttctctttcggtatcgttctgtgggagattctaaccggagaggaaccatatgccaatatgcactatggggcaataataggtgggatagtgaacaacacactgagaccaaccataccaggcttctgtgacgatgaatggagaacactaatggaggaatgttgggcaccaaacccaatggcaagaccatctttcacagagatagctggtcgcttacgagtaatgtcatcagcagcaacttcaactcaatccaagccatcagctcacagggcttccaaatga

SEQ ID NO: 91163 - protein, 1248 aa, Arabidopsis thaliana
  peptide (1)..(1248): Ceres Seq. ID no. 12726713
MDKARHQQLFQHSMEPGYRNETVPQPFMPDQTGSASANMRPPNSNGSDVKAVHNFSIQTGEEFSLEFMRDRVIPQRSSNPNGAGDMNYNTGYMELRGLIGISHTGSECASDVSRFSTVENGTSDIERTNSSLHEFGNKLNHVQSAPQALLSKDSSVGNLHGYKNTSSSASGSVTAKVKILCSFGGKILPRPGDSKLRYVGGETHIISIRKDISWQELRQKILEIYYQTRVVKYQLPGEDLDALVSVSSEEDLQNMLEEYNEMENRGGSQKLRMFLFSISDMDDALLGVNKNDGDSEFQYVVAVNGMDIGSGKNSTLLGLDSSSANNLAELDVRNTEGINTIAGDVVGVGASQLMVNGFQQTSAQQSESIPPSSSLHYSQSIPLNAAYQLQQSVPPSSALHYPQSITPGSSLQYPQSITPGSSYQYPQSIIPGSASSYGIYPQYYGHVVQHGERERFPLYPDHSSNYSAIGETTSSIPIQGHVSQQGGWAEGYPYPGSTPKSTQALAEEQKVSSDMKIREEVEPENRKTPGNDHQNPPQIDDVEVRNHNQVREMAVATTPPSQDAHLLPPSRDPRQNTTAKPATYRDAVITGQVPLSGIEDQLSTSSSTYAPVHSDSESNLIDLNYPEPEQSSQRVYCSERIPREQLELLNRLSKSDNSLSSQFVTSESPANTAQQDSGKEAVGKSHDEFKTVNDDANHHTHKDVETIFEKVGVSDETLESEPLHKIVNPDDANKNRVVNGADTEIGVSNLSHVNAAMSHVIPEEQASLQGDILIDINDRFPRDFLSEIFSQAISEDTSTVRPYPHDGAAVSMNVQNHDRKNWSYFQQLAEDQFIQRDVVLDQADSRIPSDRKDGGESSRLPYVSPLSRDGISTNLANPQLTLGQDYGGNFSEKDGGGTGSIPPALENEQMKVTESEEFGAMVENLRTPDSEPKDEKTETRHAALPPLGSEFDYSGLQIIKNEDLEELRELGSGTFGTVYHGKWRGSDVAIKRIKKSCFAGRSSEQERLTGEFWGEAEILSKLHHPNVVAFYGVVKDGPGGTLATVTEYMVDGSLRHVLVRKDRHLDRRKRLIIAMDAAFGMEYLHSKNTVHFDLKCDNLLVNLKDPSRPICKVGDFGLSKIKRNTLVSGGVRGTLPWMAPELLNGSSSKVSEKVDVFSFGIVLWEILTGEEPYANMHYGAIIGGIVNNTLRPTIPGFCDDEWRTLMEECWAPNPMARPSFTEIAGRLRVMSSAATSTQSKPSAHRASK

SEQ ID NO: 91164 - protein, 1235 aa, Arabidopsis thaliana
  peptide (1)..(1235): Ceres Seq. ID no. 12726714
MEPGYRNETVPQPFMPDQTGSASANMRPPNSNGSDVKAVHNFSIQTGEEFSLEFMRDRVIPQRSSNPNGAGDMNYNTGYMELRGLIGISHTGSECASDVSRFSTVENGTSDIERTNSSLHEFGNKLNHVQSAPQALLSKDSSVGNLHGYKNTSSSASGSVTAKVKILCSFGGKILPRPGDSKLRYVGGETHIISIRKDISWQELRQKILEIYYQTRVVKYQLPGEDLDALVSVSSEEDLQNMLEEYNEMENRGGSQKLRMFLFSISDMDDALLGVNKNDGDSEFQYVVAVNGMDIGSGKNSTLLGLDSSSANNLAELDVRNTEGINTIAGDVVGVGASQLMVNGFQQTSAQQSESIPPSSSLHYSQSIPLNAAYQLQQSVPPSSALHYPQSITPGSSLQYPQSITPGSSYQYPQSIIPGSASSYGIYPQYYGHVVQHGERERFPLYPDHSSNYSAIGETTSSIPIQGHVSQQGGWAEGYPYPGSTPKSTQALAEEQKVSSDMKIREEVEPENRKTPGNDHQNPPQIDDVEVRNHNQVREMAVATTPPSQDAHLLPPSRDPRQNTTAKPATYRDAVITGQVPLSGIEDQLSTSSSTYAPVHSDSESNLIDLNYPEPEQSSQRVYCSERIPREQLELLNRLSKSDNSLSSQFVTSESPANTAQQDSGKEAVGKSHDEFKTVNDDANHHTHKDVETIFEKVGVSDETLESEPLHKIVNPDDANKNRVVNGADTEIGVSNLSHVNAAMSHVIPEEQASLQGDILIDINDRFPRDFLSEIFSQAISEDTSTVRPYPHDGAAVSMNVQNHDRKNWSYFQQLAEDQFIQRDVVLDQADSRIPSDRKDGGESSRLPYVSPLSRDGISTNLANPQLTLGQDYGGNFSEKDGGGTGSIPPALENEQMKVTESEEFGAMVENLRTPDSEPKDEKTETRHAALPPLGSEFDYSGLQIIKNEDLEELRELGSGTFGTVYHGKWRGSDVAIKRIKKSCFAGRSSEQERLTGEFWGEAEILSKLHHPNVVAFYGVVKDGPGGTLATVTEYMVDGSLRHVLVRKDRHLDRRKRLIIAMDAAFGMEYLHSKNTVHFDLKCDNLLVNLKDPSRPICKVGDFGLSKIKRNTLVSGGVRGTLPWMAPELLNGSSSKVSEKVDVFSFGIVLWEILTGEEPYANMHYGAIIGGIVNNTLRPTIPGFCDDEWRTLMEECWAPNPMARPSFTEIAGRLRVMSSAATSTQSKPSAHRASK

SEQ ID NO: 91165 - protein, 1221 aa, Arabidopsis thaliana
  peptide (1)..(1221): Ceres Seq. ID no. 12726715
MPDQTGSASANMRPPNSNGSDVKAVHNFSIQTGEEFSLEFMRDRVIPQRSSNPNGAGDMNYNTGYMELRGLIGISHTGSECASDVSRFSTVENGTSDIERTNSSLHEFGNKLNHVQSAPQALLSKDSSVGNLHGYKNTSSSASGSVTAKVKILCSFGGKILPRPGDSKLRYVGGETHIISIRKDISWQELRQKILEIYYQTRVVKYQLPGEDLDALVSVSSEEDLQNMLEEYNEMENRGGSQKLRMFLFSISDMDDALLGVNKNDGDSEFQYVVAVNGMDIGSGKNSTLLGLDSSSANNLAELDVRNTEGINTIAGDVVGVGASQLMVNGFQQTSAQQSESIPPSSSLHYSQSIPLNAAYQLQQSVPPSSALHYPQSITPGSSLQYPQSITPGSSYQYPQSIIPGSASSYGIYPQYYGHVVQHGERERFPLYPDHSSNYSAIGETTSSIPIQGHVSQQGGWAEGYPYPGSTPKSTQALAEEQKVSSDMKIREEVEPENRKTPGNDHQNPPQIDDVEVRNHNQVREMAVATTPPSQDAHLLPPSRDPRQNTTAKPATYRDAVITGQVPLSGIEDQLSTSSSTYAPVHSDSESNLIDLNYPEPEQSSQRVYCSERIPREQLELLNRLSKSDNSLSSQFVTSESPANTAQQDSGKEAVGKSHDEFKTVNDDANHHTHKDVETIFEKVGVSDETLESEPLHKIVNPDDANKNRVVNGADTEIGVSNLSHVNAAMSHVIPEEQASLQGDILIDINDRFPRDFLSEIFSQAISEDTSTVRPYPHDGAAVSMNVQNHDRKNWSYFQQLAEDQFIQRDVVLDQADSRIPSDRKDGGESSRLPYVSPLSRDGISTNLANPQLTLGQDYGGNFSEKDGGGTGSIPPALENEQMKVTESEEFGAMVENLRTPDSEPKDEKTETRHAALPPLGSEFDYSGLQIIKNEDLEELRELGSGTFGTVYHGKWRGSDVAIKRIKKSCFAGRSSEQERLTGEFWGEAEILSKLHHPNVVAFYGVVKDGPGGTLATVTEYMVDGSLRHVLVRKDRHLDRRKRLIIAMDAAFGMEYLHSKNTVHFDLKCDNLLVNLKDPSRPICKVGDFGLSKIKRNTLVSGGVRGTLPWMAPELLNGSSSKVSEKVDVFSFGIVLWEILTGEEPYANMHYGAIIGGIVNNTLRPTIPGFCDDEWRTLMEECWAPNPMARPSFTEIAGRLRVMSSAATSTQSKPSAHRASK

SEQ ID NO: 91166 - DNA, 1941 bp, Arabidopsis thaliana
  misc_feature (1)..(1941): Ceres Seq. ID no. 12726723
  misc_feature (1)..(1941): Ortholog of  Ceres SEQ ID NO 15174879 as cited in SEQ ID NO 53786
atgccgattctgactcttcttcttcttattctgggtttgtttataagcccttctgtttcagactcgagaggagacacagtggctcagatatgcaacaacagaacaacgacgccgcaacagagaagtctcttcgtcaccaatttcctcgccgccatggacgcggtctctccactagtggaagctaaaggttacggacaagtggtcaacggtaccggaaacttaaccgtctacgcttacggagagtgtataaaagatcttgataagaaagattgcgacttgtgtttcgctcagatcaaagctaaagttcctcgttgcttacctttccaaaaaggtactcgtggtggtcaagtcttctcagatggttgctacatcaggtacgatgactacaatttctataacgagacgttaagcttgcaagaccggacagtttgtgctccaaaggagattaccggagtaaaccggacggtatttcgggataacgctgcagagttggttaagaacatgagtgtggaggcggtgagaaatggtggattctatgctggttttgtggatagacataacgtgacggttcatggtctggctcagtgttgggagactcttaatagaagtggttgtgttgagtgtttgagtaaagcttcagtgaggattggttcttgtttggttaatgaagaaggtcgagttcttagtgctggttgctatatgaggttttctactcaaaagttttataacaattctggaaattctacatcagatggtaatggtggtcataaccatttgggtgtgattttggcggtgacatcttcggttgtggcttttgttctgttggtctctgccgctggtttcttgcttaaaaagagacacgccaagaagcaaagagagaagaagcaactagggtcattattcatgcttgcgaacaaatctaatctctgtttctcctatgagaatctcgagagggctaccgattacttcagcgacaaaaataagttaggacaaggaggatctggctctgtctataagggagttcttactaatggtaagactgttgcagtaaagagactgttcttcaacacaaagcaatgggtggatcatttcttcaacgaagttaatctaataagccaagtagaccacaagaaccttgttaagctcttgggatgcagcataactggaccagagagccttctggtctatgaatacattgcaaatcaaagcctccacgactatcttttcgtaagaaaagatgttcaaccgttgaattgggcaaagagattcaagattatacttggtacagcagaaggaatggcgtatcttcacgaggagtcaaatcttagaatcatacatagagatattaagctgagtaatatccttttggaagatgattttactccaagaattgctgattttggattggctagattgttcccagaggacaagactcatatcagcactgccatcgccggtacactaggctacatggcaccagaatatgtagtacgaggaaaactaactgagaaagcagacgtttatagttttggagttcttatgattgaagttataaccggaaaacgtaacaatgccttcgtacaagacgctggttcgatcctacaatcggtatggagtctgtacagaacaagcaatgtggaagaggcagtggatccaatcttaggtgataacttcaacaagatagaagcgtcacggctacttcaaattgggcttctctgtgttcaagcagcgtttgatcagcggcctgcgatgtctgtggttgtgaaaatgatgaaagggagtttggagattcatacgccgacgcaaccaccgtttctgaatccaggaagtgtagtagagatgagaaagatgatgatgactcccacgacgaatcagtctaattcttcaggatcaaggagtgactacataaccgagggttcgagtttctttgaacctagatga

SEQ ID NO: 91167 - protein, 646 aa, Arabidopsis thaliana
  peptide (1)..(646): Ceres Seq. ID no. 12726724
MPILTLLLLILGLFISPSVSDSRGDTVAQICNNRTTTPQQRSLFVTNFLAAMDAVSPLVEAKGYGQVVNGTGNLTVYAYGECIKDLDKKDCDLCFAQIKAKVPRCLPFQKGTRGGQVFSDGCYIRYDDYNFYNETLSLQDRTVCAPKEITGVNRTVFRDNAAELVKNMSVEAVRNGGFYAGFVDRHNVTVHGLAQCWETLNRSGCVECLSKASVRIGSCLVNEEGRVLSAGCYMRFSTQKFYNNSGNSTSDGNGGHNHLGVILAVTSSVVAFVLLVSAAGFLLKKRHAKKQREKKQLGSLFMLANKSNLCFSYENLERATDYFSDKNKLGQGGSGSVYKGVLTNGKTVAVKRLFFNTKQWVDHFFNEVNLISQVDHKNLVKLLGCSITGPESLLVYEYIANQSLHDYLFVRKDVQPLNWAKRFKIILGTAEGMAYLHEESNLRIIHRDIKLSNILLEDDFTPRIADFGLARLFPEDKTHISTAIAGTLGYMAPEYVVRGKLTEKADVYSFGVLMIEVITGKRNNAFVQDAGSILQSVWSLYRTSNVEEAVDPILGDNFNKIEASRLLQIGLLCVQAAFDQRPAMSVVVKMMKGSLEIHTPTQPPFLNPGSVVEMRKMMMTPTTNQSNSSGSRSDYITEGSSFFEPR

SEQ ID NO: 91168 - protein, 595 aa, Arabidopsis thaliana
  peptide (1)..(595): Ceres Seq. ID no. 12726725
MDAVSPLVEAKGYGQVVNGTGNLTVYAYGECIKDLDKKDCDLCFAQIKAKVPRCLPFQKGTRGGQVFSDGCYIRYDDYNFYNETLSLQDRTVCAPKEITGVNRTVFRDNAAELVKNMSVEAVRNGGFYAGFVDRHNVTVHGLAQCWETLNRSGCVECLSKASVRIGSCLVNEEGRVLSAGCYMRFSTQKFYNNSGNSTSDGNGGHNHLGVILAVTSSVVAFVLLVSAAGFLLKKRHAKKQREKKQLGSLFMLANKSNLCFSYENLERATDYFSDKNKLGQGGSGSVYKGVLTNGKTVAVKRLFFNTKQWVDHFFNEVNLISQVDHKNLVKLLGCSITGPESLLVYEYIANQSLHDYLFVRKDVQPLNWAKRFKIILGTAEGMAYLHEESNLRIIHRDIKLSNILLEDDFTPRIADFGLARLFPEDKTHISTAIAGTLGYMAPEYVVRGKLTEKADVYSFGVLMIEVITGKRNNAFVQDAGSILQSVWSLYRTSNVEEAVDPILGDNFNKIEASRLLQIGLLCVQAAFDQRPAMSVVVKMMKGSLEIHTPTQPPFLNPGSVVEMRKMMMTPTTNQSNSSGSRSDYITEGSSFFEPR

SEQ ID NO: 91169 - protein, 479 aa, Arabidopsis thaliana
  peptide (1)..(479): Ceres Seq. ID no. 12726726
MSVEAVRNGGFYAGFVDRHNVTVHGLAQCWETLNRSGCVECLSKASVRIGSCLVNEEGRVLSAGCYMRFSTQKFYNNSGNSTSDGNGGHNHLGVILAVTSSVVAFVLLVSAAGFLLKKRHAKKQREKKQLGSLFMLANKSNLCFSYENLERATDYFSDKNKLGQGGSGSVYKGVLTNGKTVAVKRLFFNTKQWVDHFFNEVNLISQVDHKNLVKLLGCSITGPESLLVYEYIANQSLHDYLFVRKDVQPLNWAKRFKIILGTAEGMAYLHEESNLRIIHRDIKLSNILLEDDFTPRIADFGLARLFPEDKTHISTAIAGTLGYMAPEYVVRGKLTEKADVYSFGVLMIEVITGKRNNAFVQDAGSILQSVWSLYRTSNVEEAVDPILGDNFNKIEASRLLQIGLLCVQAAFDQRPAMSVVVKMMKGSLEIHTPTQPPFLNPGSVVEMRKMMMTPTTNQSNSSGSRSDYITEGSSFFEPR

SEQ ID NO: 91170 - DNA, 1233 bp, Arabidopsis thaliana
  misc_feature (1)..(1233): Ceres Seq. ID no. 12726727
  misc_feature (1)..(1233): Ortholog of  Ceres SEQ ID NO 13597334 as cited in SEQ ID NO 64244
  misc_feature (1)..(1233): Ortholog of  Ceres SEQ ID NO 14303165 as cited in SEQ ID NO 65181
  misc_feature (1)..(1233): Ortholog of  Ceres SEQ ID NO 15224550 as cited in SEQ ID NO 0
atgttctcctctagctttctcagattgattcttttactctgtctcgtctcttcttccttctcctccaccacttcttcctccaactccactgccgccgatcaaactctccggccgcaagaagagctccagaagctaacactgattagacaagaactcgacaaaatcaacaagccggctgtgaaaactattcagagctcagatggagataaaatagattgtgtttcaactcatcagcaaccagctttcgatcatcctctcttacaaggacaaaaaccattggatccgcctgagataccaaaaggatacagcgaagatgatggatcatatgaaaactcccagctttggagtttatccggtgagtcttgtccggaaggtacgattccgataagaagaacaacggaacaagacatgttaagagcaagttctgtccaaagatttggtcggaaaatcaggcgcgtgaagagagattccacaaataacggacacgaacatgcggtgggatatgtaaccgggagacaatattacggggcaaaagcaagtattaacgtgtggtcgccacgtgttacgagccaatacgaatttagtctttctcagatttgggttattgccggttcgttcacacacgatcttaataccattgaagccggttggcaaattagcccggagttgtacggcgatacttacccaagattctttacctattggacgtccgatgcatatcgaacaacgggttgctacaatttgctatgttccggtttcgttcaaaccaaccgtcgaatcgcgataggagctgcgatttctcctagatcttcgtataaaggtggacaattcgatataagcttattaatttggaaggatccgaagcacggtcactggtggctacaattcgggtcaggtgcattagtcggttattggccagcgtttttattcacgcatctaaagcaacatggaagcatggtccaattcgggggcgagattgtgaacaaccgacccggcggttcacacactacgactcaaatgggtagtggacattttgccggtgaaggttttggtaaagcatcttatttccggaatctccaaattgttgactgggacaacactcttatacccgcttcgaatctaaagattctcgcagaccatcccaattgttatgatataagaggtgggacgaatcgtgtgtggggtaactatttttactatggaggtccaggaaaaaaccctagatgtccatga

SEQ ID NO: 91171 - protein, 410 aa, Arabidopsis thaliana
  peptide (1)..(410): Ceres Seq. ID no. 12726728
MFSSSFLRLILLLCLVSSSFSSTTSSSNSTAADQTLRPQEELQKLTLIRQELDKINKPAVKTIQSSDGDKIDCVSTHQQPAFDHPLLQGQKPLDPPEIPKGYSEDDGSYENSQLWSLSGESCPEGTIPIRRTTEQDMLRASSVQRFGRKIRRVKRDSTNNGHEHAVGYVTGRQYYGAKASINVWSPRVTSQYEFSLSQIWVIAGSFTHDLNTIEAGWQISPELYGDTYPRFFTYWTSDAYRTTGCYNLLCSGFVQTNRRIAIGAAISPRSSYKGGQFDISLLIWKDPKHGHWWLQFGSGALVGYWPAFLFTHLKQHGSMVQFGGEIVNNRPGGSHTTTQMGSGHFAGEGFGKASYFRNLQIVDWDNTLIPASNLKILADHPNCYDIRGGTNRVWGNYFYYGGPGKNPRCP

SEQ ID NO: 91172 - protein, 274 aa, Arabidopsis thaliana
  peptide (1)..(274): Ceres Seq. ID no. 12726729
MLRASSVQRFGRKIRRVKRDSTNNGHEHAVGYVTGRQYYGAKASINVWSPRVTSQYEFSLSQIWVIAGSFTHDLNTIEAGWQISPELYGDTYPRFFTYWTSDAYRTTGCYNLLCSGFVQTNRRIAIGAAISPRSSYKGGQFDISLLIWKDPKHGHWWLQFGSGALVGYWPAFLFTHLKQHGSMVQFGGEIVNNRPGGSHTTTQMGSGHFAGEGFGKASYFRNLQIVDWDNTLIPASNLKILADHPNCYDIRGGTNRVWGNYFYYGGPGKNPRCP

SEQ ID NO: 91173 - DNA, 1782 bp, Arabidopsis thaliana
  misc_feature (1)..(1782): Ceres Seq. ID no. 12726730
  misc_feature (1)..(1782): Ortholog of  Ceres SEQ ID NO 13600098 as cited in SEQ ID NO 0
aagtctttcttacttgccctgctctggaacgtgactttggaggtaacgaaactgtgtcgtgagttgatctaagaggggaagtgaggaatcattttgcttttagctttgaaaagtaaatcctggaaatgtctctcaaggcgttagactacgagtccttgaatgaaaacgtgaagaattgtcagtatgcagtcagaggtgaactttatcttcgtgcttctgagcttcagaaagaaggcaaaaagattattttcacaaatgttggaaaccctcatgctttaggacagaaacctctgacttttcctcgtcaggtggtttctttatgccaagcaccatttctgttagatgatccaaatgttggtatgatattcccagcagatgctattgcaagagctaagcattatctttccttgacttctggtggtcttggtgcttacagtgactcaagaggtcttccgggagttcggaaagaagtcgctgagttcattgaacggcgtgatggatatccaagcgatccagaactcatatttctaactgatggagcgagcaaaggtgtgatgcaaatcttgaattgtgtcatacgcggtcagaaagacggaattctggttccagttccacagtatccactctactcggctactatatctctgttaggtggtactcttgttccttactatcttgaagagtctgaaaactggggacttgatgttaacaaccttcgccaatctgttgctcaagctcgctctcaaggaataacagtaagggcaatggtgattattaaccccggaaacccaactggccagtgtcttagcgaagctaacataagagagatactacggttctgttgtgatgagagattagttcttctcggagacgaagtgtatcagcaaaatatataccaagatgaacgtccctttatcagttccaagaaggttttgatggatatgggagcaccgatcagcaaggaagttcagctcatatctttccacaccgtttccaaaggatactggggcgaatgtgggcaacggggaggttactttgagatgacaaatatccctcccaggaccgttgaggagatatacaaggtggcctctatagctctcagccccaacgtctctgcgcagatatttatgggtttaatggttagcccaccaaagcctggagacatttcatatgaccaattcgttcgtgagagcaagggaatactagaatcactgagaagaagagcaaggatgatgactgatggattcaacagctgcaaaaacgtcgtctgtaatttcacagaaggtgctatgtattcattccctcaaataaagttgccgtcgaaagcaatccaagcagcaaaacaagccggaaaagtccctgacgttttctactgccttaagctcttagaagccacaggaatctccacagttccaggctctggatttggacaaaaagaaggggtgtttcatttaaggacaacaattctgccagcagaagaagaaatgccagagattatggacagtttcaaaaagttcaatgatgagtttatgtctcagtacgctgataactttggttactccagaatgtgaaaaagaaaggacttagagtcagagtcagagatcacttcttcttctttcacgacattattattgtctattcacactcttaaaaagcaataagtactggtcctactctgtgtcaaactcttcttggtgctcttaaaacctttgtatctattgttaccaatttgtgtgactcacacacacacacacacaaatctctaatgttcaattatatggt

SEQ ID NO: 91174 - protein, 481 aa, Arabidopsis thaliana; identical to SEQ ID NO: 41378
  peptide (1)..(481): Ceres Seq. ID no. 12726731

SEQ ID NO: 91175 - protein, 403 aa, Arabidopsis thaliana; identical to SEQ ID NO: 41379
  peptide (1)..(403): Ceres Seq. ID no. 12726732

SEQ ID NO: 91176 - protein, 338 aa, Arabidopsis thaliana; identical to SEQ ID NO: 41380
  peptide (1)..(338): Ceres Seq. ID no. 12726733

SEQ ID NO: 91177 - DNA, 1329 bp, Arabidopsis thaliana
  misc_feature (1)..(1329): Ceres Seq. ID no. 12726744
  misc_feature (1)..(1329): Ortholog of  Ceres SEQ ID NO 15226186 as cited in SEQ ID NO 0
atggaaaacgacgacgaagaaacagacgcagaggtttctataggtacagagattcctgatcatgagcaaatcggagatattccttctcaccagctcattcctcaccacgatgacgatgatcatgaggaggaaacgttggagttcaaaacagtaacgattgaaaccaagatgccagtcttaaacatcaacgaagagcggattttagaagctcaaggctcgatggaaagctcgcatagtagtctacataacgctatgtttcacttagagcaaagagtatctgttgatggtattgaatgtcctgaaggagtactcactgttgataagttgaagtttgagttacaagaagagagaaaagcacttcacgcgttatacgaggagctggaggtagagaggaatgcgtctgctgttgctgccagtgaaacaatggcgatgatcaataggttgcatgaggagaaagctgcgatgcagatggaagcgttgcagtatcagagaatgatggaggagcaagctgagtttgatcaagaagctttgcagttgttgaatgagcttatggtgaatagagagaaggagaatgctgagcttgagaaggagctagaggtgtatagaaagagaatggaggagtatgaagctaaagagaaaatggggatgttgaggaggagattgagagattcctctgttgattcgtatagaaataatggcgattctgatgagaatagcaatggagagttacagtttaagaacgttgaaggggttacggattggaaatatagagagaatgagatggagaatacgccggtggatgttgtacttcgtcttgatgagtgtttagatgattatgatggagagaggctttcgattcttgggagattgaagtttcttgaagagaaactcacagatcttaataacgaagaggacgacgaggaggaggctaaaacgtttgagagtaatggtagcatcaatggaaatgagcatattcatggcaaagaaacaaacgggaagcacagagttatcaagtcaaagagattacttcccctgtttgatgcggtcgatggagagatggaaaacgggttaagtaacggaaaccatcacgaaaacgggtttgatgattcggagaagggtgagaatgtgacgatagaagaagaagtggatgagctttacgagaggttagaagctctagaggcagatagagagttcttaagacattgtgttggttcattgaaaaaaggagacaaaggtgtacatctcctccatgagattctgcaacatcttcgtgatctaaggaatatcgatcttactcgcgtcagagaaaacggagacatgagtttatga

SEQ ID NO: 91178 - protein, 442 aa, Arabidopsis thaliana; identical to SEQ ID NO: 71516
  peptide (1)..(442): Ceres Seq. ID no. 12726745

SEQ ID NO: 91179 - protein, 386 aa, Arabidopsis thaliana; identical to SEQ ID NO: 71517
  peptide (1)..(386): Ceres Seq. ID no. 12726746

SEQ ID NO: 91180 - protein, 369 aa, Arabidopsis thaliana
  peptide (1)..(369): Ceres Seq. ID no. 12726747
MESSHSSLHNAMFHLEQRVSVDGIECPEGVLTVDKLKFELQEERKALHALYEELEVERNASAVAASETMAMINRLHEEKAAMQMEALQYQRMMEEQAEFDQEALQLLNELMVNREKENAELEKELEVYRKRMEEYEAKEKMGMLRRRLRDSSVDSYRNNGDSDENSNGELQFKNVEGVTDWKYRENEMENTPVDVVLRLDECLDDYDGERLSILGRLKFLEEKLTDLNNEEDDEEEAKTFESNGSINGNEHIHGKETNGKHRVIKSKRLLPLFDAVDGEMENGLSNGNHHENGFDDSEKGENVTIEEEVDELYERLEALEADREFLRHCVGSLKKGDKGVHLLHEILQHLRDLRNIDLTRVRENGDMSL

SEQ ID NO: 91181 - DNA, 525 bp, Arabidopsis thaliana
  misc_feature (1)..(525): Ceres Seq. ID no. 12726748
  misc_feature (1)..(525): Ortholog of  Ceres SEQ ID NO 13596338 as cited in SEQ ID NO 68005
  misc_feature (1)..(525): Ortholog of  Ceres SEQ ID NO 15179357 as cited in SEQ ID NO 0
atggagaaaacagaggaagaggttgagatgaaggaactggtagggcttgtgagaatcctagtgaagagagggatcgatcttgctcgtcgagacgctctaagcagcgacccttttgtcgtcataaccatgggtccacagaagctgaaatcttttactgtgaagaataactgcaacccagagtggaacgaagagttgactcttgcgatcgaagatcccaatgaacctgtgaagctgatggtgtatgataaagatacatttacagcggacgacaagatgggagatgcgcagatagatatgaaaccgttcctagacgttcacaaactcggtttgaaagaacttccacatggaaaagagctcaagagaattgtgcccaccagagataactgcttgtctgaagatagcataatcgtctccgataatggcaagatcgttcaggacatgattcttctgttgaagaatgtcgaatgcggcaaggtcgagatccagcttgaatggcttaaaaatccaggtggtagtggactctga

SEQ ID NO: 91182 - protein, 174 aa, Arabidopsis thaliana
  peptide (1)..(174): Ceres Seq. ID no. 12726749
MEKTEEEVEMKELVGLVRILVKRGIDLARRDALSSDPFVVITMGPQKLKSFTVKNNCNPEWNEELTLAIEDPNEPVKLMVYDKDTFTADDKMGDAQIDMKPFLDVHKLGLKELPHGKELKRIVPTRDNCLSEDSIIVSDNGKIVQDMILLLKNVECGKVEIQLEWLKNPGGSGL

SEQ ID NO: 91183 - protein, 165 aa, Arabidopsis thaliana
  peptide (1)..(165): Ceres Seq. ID no. 12726750
MKELVGLVRILVKRGIDLARRDALSSDPFVVITMGPQKLKSFTVKNNCNPEWNEELTLAIEDPNEPVKLMVYDKDTFTADDKMGDAQIDMKPFLDVHKLGLKELPHGKELKRIVPTRDNCLSEDSIIVSDNGKIVQDMILLLKNVECGKVEIQLEWLKNPGGSGL

SEQ ID NO: 91184 - protein, 132 aa, Arabidopsis thaliana
  peptide (1)..(132): Ceres Seq. ID no. 12726751
MGPQKLKSFTVKNNCNPEWNEELTLAIEDPNEPVKLMVYDKDTFTADDKMGDAQIDMKPFLDVHKLGLKELPHGKELKRIVPTRDNCLSEDSIIVSDNGKIVQDMILLLKNVECGKVEIQLEWLKNPGGSGL

SEQ ID NO: 91185 - DNA, 531 bp, Arabidopsis thaliana
  misc_feature (1)..(531): Ceres Seq. ID no. 12726771
  misc_feature (1)..(531): Ortholog of  Ceres SEQ ID NO 13595497 as cited in SEQ ID NO 51127
atgagagattttgacataaaccaaacaccaaagacggaagaagatcgtgagtggatgatcggtgcaacaccacatgtcaacgaagatgatagcaactcgggtggccggcggcgcaaaaagctccgtctaacgaaagaacaatcacatcttcttgaagagagtttcatacaaaaccataccttaacccctaagcaaaaaaaagatttggccacctttttgaagcttagtcaaaggcaagttgaggtgtggtttcaaaatcgaagagctcggagtaagctaaagcacacggaaatggaatgtgagtatctaaaaagatggttcggatcgttgaaggaacaaaatcgacggctacaaatagaagttgaagaactacgagcgctaaagccatcatcgacctcggctttaaccatgtgtcctcggtgtgaacgtgtgactgatgcagtagataatgactctaatgccgttcaagagggggcagttcttagcagccggtcacggatgacaatttcctcttcctcttccctctgttga

SEQ ID NO: 91186 - protein, 176 aa, Arabidopsis thaliana; identical to SEQ ID NO: 44157
  peptide (1)..(176): Ceres Seq. ID no. 12726772

SEQ ID NO: 91187 - protein, 158 aa, Arabidopsis thaliana; identical to SEQ ID NO: 44158
  peptide (1)..(158): Ceres Seq. ID no. 12726773

SEQ ID NO: 91188 - DNA, 588 bp, Arabidopsis thaliana
  misc_feature (1)..(588): Ceres Seq. ID no. 12726786
  misc_feature (1)..(588): Ortholog of  Ceres SEQ ID NO 13594390 as cited in SEQ ID NO 51060
  misc_feature (1)..(588): Ortholog of  Ceres SEQ ID NO 14309565 as cited in SEQ ID NO 52731
atgggaaatagcttgggaaccaagaaaacagcgacaatcatgaacatcaatggcgagagtttcaaactgaaaacgcctgtggaagctggtacagtggttaaagattttccaggccacgttctcttggaatccgaagcagtgaagcgtttaggaatcagagcaaagcccttggagcctcaccaaaacttggaatccaaaaggatttacttcatggttgaacttccaagaacatggaaagagagaactccaagaagggttcggtcgggaatccagatgagtgcgaaggagagattagagaatctgaagctgtctcgtagatcatcatctgatctctcggtaatgaagaagaagacagaggttaatgatgaagagagagaagtgagtagcgtgaagttgaagttaccaaagtggaaaattgagaaactgaggaaagagagtgagagtggctctgatttctccaacaagatcacacaactttgtctccttcacataccaagtggtttgattcatcaaagacaacatttgcttcgtaatggaggaagaaactttgggattgaagaaaaagaagaaggtgccaaaatcacatga

SEQ ID NO: 91189 - protein, 195 aa, Arabidopsis thaliana
  peptide (1)..(195): Ceres Seq. ID no. 12726787
MGNSLGTKKTATIMNINGESFKLKTPVEAGTVVKDFPGHVLLESEAVKRLGIRAKPLEPHQNLESKRIYFMVELPRTWKERTPRRVRSGIQMSAKERLENLKLSRRSSSDLSVMKKKTEVNDEEREVSSVKLKLPKWKIEKLRKESESGSDFSNKITQLCLLHIPSGLIHQRQHLLRNGGRNFGIEEKEEGAKIT

SEQ ID NO: 91190 - protein, 182 aa, Arabidopsis thaliana
  peptide (1)..(182): Ceres Seq. ID no. 12726788
MNINGESFKLKTPVEAGTVVKDFPGHVLLESEAVKRLGIRAKPLEPHQNLESKRIYFMVELPRTWKERTPRRVRSGIQMSAKERLENLKLSRRSSSDLSVMKKKTEVNDEEREVSSVKLKLPKWKIEKLRKESESGSDFSNKITQLCLLHIPSGLIHQRQHLLRNGGRNFGIEEKEEGAKIT

SEQ ID NO: 91191 - protein, 125 aa, Arabidopsis thaliana
  peptide (1)..(125): Ceres Seq. ID no. 12726789
MVELPRTWKERTPRRVRSGIQMSAKERLENLKLSRRSSSDLSVMKKKTEVNDEEREVSSVKLKLPKWKIEKLRKESESGSDFSNKITQLCLLHIPSGLIHQRQHLLRNGGRNFGIEEKEEGAKIT

SEQ ID NO: 91192 - DNA, 1773 bp, Arabidopsis thaliana
  misc_feature (1)..(1773): Ceres Seq. ID no. 12726794
  misc_feature (1)..(1773): Ortholog of  Ceres SEQ ID NO 13657789 as cited in SEQ ID NO 66154
acaaccgaccgagtcggagatcgaagttttgaacctaagaatctcgttgtcttcttcttctgcagagcctccaaagtctaaatcttttggttacgtctctcaaaccccaacctttatactcactctctttctttttctctcttacctccattggcttcttcttgagatctcgtcaggctctgatcccaatctatgttcgatctcactctcaccgagatctcatcttcctccattttttcaaagatccatatatgagctctaaaaccacagatttcaatctgtgaatccgtatatatgctcaatcggagccagattctaacaaatcaaagaaaggaagaagaagtgaagaacaatgggagctgaaaagaaatggcttttcacactcttctctgtagtattcctctcagtgttccttctcttactttattctatctctgctttcacctctaaaccattcccttcttcaattcgtcacggtgctcattacccacctgcttttgcttattacataaccggtggtcgtggagataatgaccggatctctcggttattgcttgcggtttatcatcctaggaatcggtatcttatccatctgggtgctgaagctactgatgcagagaggctagctcttctctctgatttgaaatctgttcctgctgtgaatgcttttgggaatgttgatgttttagggaaagttgatcgtttgtctgagaatggtgcttctaagattgcttctactcttcacgctgtttctattcttcttaagcttgatcctacttggaattggtttattgagcttagtgctttggattatcctctcataactcaagatgacctatctcatgtgtttgcctcggtgaacagaagtctcaattttattgatcacactagtgaccttgcttggaaagaatctcagagaatcaagcctattgttgttgatccagcactttacttagctagaagaactcagctcttcactgctaccgaaaagcgaccaacaccagatgcattcaaagtctttacaggctcgccttggattgtactaagcagacctttcctagaatactgcatcttcggttgggataatttaccaagaatccttctcatgtattttaacaatgtcattctctctgaagaatgctacttccacacggtgatatgcaacgcaccggagttcagtaacacgacagtcaacggggacttacgatacatgatatgggacagtccaccaaaaatggaaccacatttccttactatatcggatttcgaccaaatggctcaaagcggagcagctttcgctagacaattcaagaaagatgatccagtactcgacatggtcgatagagagatcctgaaacgtggacgttacagagtcactcctggcgcttggtgctcgagccacagtagctggtggacagatccttgctcggagtgggatgaagtaaacattgtcaaagctggacctcaagctaagaagctagacgaaacaataacgaattttcttgatgatttgaattcacaatcgaatcaatgcaagtgattatacgacacacgagactacattgttttcagtctctgtaaggttaaattctttgggcaacaacacagtggctgctgtatttatacgaggagaaggagaaagagaagagaaaggagatatttttattctctttcccagattttgtaattcctttgttaaagccattagagaacttttgttcgcaaatttgataaacctttgttcctctgttgtatcttagttaattgaaagtt

SEQ ID NO: 91193 - protein, 395 aa, Arabidopsis thaliana
  peptide (1)..(395): Ceres Seq. ID no. 12726795
MGAEKKWLFTLFSVVFLSVFLLLLYSISAFTSKPFPSSIRHGAHYPPAFAYYITGGRGDNDRISRLLLAVYHPRNRYLIHLGAEATDAERLALLSDLKSVPAVNAFGNVDVLGKVDRLSENGASKIASTLHAVSILLKLDPTWNWFIELSALDYPLITQDDLSHVFASVNRSLNFIDHTSDLAWKESQRIKPIVVDPALYLARRTQLFTATEKRPTPDAFKVFTGSPWIVLSRPFLEYCIFGWDNLPRILLMYFNNVILSEECYFHTVICNAPEFSNTTVNGDLRYMIWDSPPKMEPHFLTISDFDQMAQSGAAFARQFKKDDPVLDMVDREILKRGRYRVTPGAWCSSHSSWWTDPCSEWDEVNIVKAGPQAKKLDETITNFLDDLNSQSNQCK

SEQ ID NO: 91194 - DNA, 1543 bp, Arabidopsis thaliana
  misc_feature (1)..(1543): Ceres Seq. ID no. 12726796
  misc_feature (1)..(1543): Ortholog of  Ceres SEQ ID NO 13660287 as cited in SEQ ID NO 67316
  misc_feature (1)..(1543): Ortholog of  Ceres SEQ ID NO 14307892 as cited in SEQ ID NO 67490
agtatataaagtatagggttgattcggagaaagaggttaaagtattagattgaaacaacaaatctcaggggaagaagaagagagaatggattcggcggagaagggcttgcttgttgtgagcgacagagaagaagtaaacaagaaagatgggtttttgcgggaaacgaagaaacttagttacatcgccggtccgatgattgcagtgaactcgtctatgtatgttcttcaggtgatatctataatgatggttggtcatctcggtgagcttttcctctctagcaccgccattgctgtttctttctgcagcgtcaccggtttcagcgtcgtttttggattggctagtgcgttggaaactttatgtggtcaagctaatggagctaagcaatatgagaagcttggtgttcatacttacacaggaattgtctctttgtttcttgtgtgtattcctctctctcttctctggacatacattggtgatatactttctcttattggacaagatgctatggttgctcaagaagctgggaagtttgcaacttggctcatacccgcgctctttggttacgctactttgcagccgcttgttcggtttttccaagcacagtctctgattttgcctttggttatgagttcagtctcttctctctgtatccacattgtcctctgttggagcttggtctttaagtttggtcttggaagcctcggtgcagctattgcgatcggtgtttcttactggctaaacgtgactgttcttggattatacatgacgttttcttctagctgtagcaagagccgtgcaactatctccatgagtttgtttgaaggaatgggagagtttttccggtttggaatcccatctgcatctatgatttgccttgagtggtggtcattcgaatttttagtcctgctctctggtattttaccaaatccgaagctagaagcctctgttctctcagtctgtctttcaacacaatcctccttgtaccaaatcccagagagtctcggtgcagcagcaagtacaagagttgcaaacgagttaggagctggaaacccgaaacaagctcgaatggcggtttacacagcgatggttataacaggtgtagaatcaataatggtgggtgcaatagtctttggtgcaagaaatgtatttggttacctattcagttctgaaactgaagttgtagactatgtaaaatcaatggctccactgctttctttatcggtcatattcgatgcccttcacgcagctctctcgggtgtggctagaggatcagggaggcaagatattggggcatacgtaaacctagcagcatactatctctttggaataccaactgctatactattagcttttgggtttaaaatgagaggaagaggactctggattggaatcacagttgggtcatgtgtacaagctgttttgctcggtcttatcgtaatcctcactaattggaaaaaacaggcgagaaaggctagagaaagagtgatgggtgatgagtatgaagagaaagaaagtgaagaagaacatgaatacatcagctaa

SEQ ID NO: 91195 - protein, 485 aa, Arabidopsis thaliana
  peptide (1)..(485): Ceres Seq. ID no. 12726797
MDSAEKGLLVVSDREEVNKKDGFLRETKKLSYIAGPMIAVNSSMYVLQVISIMMVGHLGELFLSSTAIAVSFCSVTGFSVVFGLASALETLCGQANGAKQYEKLGVHTYTGIVSLFLVCIPLSLLWTYIGDILSLIGQDAMVAQEAGKFATWLIPALFGYATLQPLVRFFQAQSLILPLVMSSVSSLCIHIVLCWSLVFKFGLGSLGAAIAIGVSYWLNVTVLGLYMTFSSSCSKSRATISMSLFEGMGEFFRFGIPSASMICLEWWSFEFLVLLSGILPNPKLEASVLSVCLSTQSSLYQIPESLGAAASTRVANELGAGNPKQARMAVYTAMVITGVESIMVGAIVFGARNVFGYLFSSETEVVDYVKSMAPLLSLSVIFDALHAALSGVARGSGRQDIGAYVNLAAYYLFGIPTAILLAFGFKMRGRGLWIGITVGSCVQAVLLGLIVILTNWKKQARKARERVMGDEYEEKESEEEHEYIS

SEQ ID NO: 91196 - protein, 449 aa, Arabidopsis thaliana
  peptide (1)..(449): Ceres Seq. ID no. 12726798
MIAVNSSMYVLQVISIMMVGHLGELFLSSTAIAVSFCSVTGFSVVFGLASALETLCGQANGAKQYEKLGVHTYTGIVSLFLVCIPLSLLWTYIGDILSLIGQDAMVAQEAGKFATWLIPALFGYATLQPLVRFFQAQSLILPLVMSSVSSLCIHIVLCWSLVFKFGLGSLGAAIAIGVSYWLNVTVLGLYMTFSSSCSKSRATISMSLFEGMGEFFRFGIPSASMICLEWWSFEFLVLLSGILPNPKLEASVLSVCLSTQSSLYQIPESLGAAASTRVANELGAGNPKQARMAVYTAMVITGVESIMVGAIVFGARNVFGYLFSSETEVVDYVKSMAPLLSLSVIFDALHAALSGVARGSGRQDIGAYVNLAAYYLFGIPTAILLAFGFKMRGRGLWIGITVGSCVQAVLLGLIVILTNWKKQARKARERVMGDEYEEKESEEEHEYIS

SEQ ID NO: 91197 - protein, 442 aa, Arabidopsis thaliana
  peptide (1)..(442): Ceres Seq. ID no. 12726799
MYVLQVISIMMVGHLGELFLSSTAIAVSFCSVTGFSVVFGLASALETLCGQANGAKQYEKLGVHTYTGIVSLFLVCIPLSLLWTYIGDILSLIGQDAMVAQEAGKFATWLIPALFGYATLQPLVRFFQAQSLILPLVMSSVSSLCIHIVLCWSLVFKFGLGSLGAAIAIGVSYWLNVTVLGLYMTFSSSCSKSRATISMSLFEGMGEFFRFGIPSASMICLEWWSFEFLVLLSGILPNPKLEASVLSVCLSTQSSLYQIPESLGAAASTRVANELGAGNPKQARMAVYTAMVITGVESIMVGAIVFGARNVFGYLFSSETEVVDYVKSMAPLLSLSVIFDALHAALSGVARGSGRQDIGAYVNLAAYYLFGIPTAILLAFGFKMRGRGLWIGITVGSCVQAVLLGLIVILTNWKKQARKARERVMGDEYEEKESEEEHEYIS

SEQ ID NO: 91198 - DNA, 1056 bp, Arabidopsis thaliana
  misc_feature (1)..(1056): Ceres Seq. ID no. 12726800
  misc_feature (1)..(1056): Ortholog of  Ceres SEQ ID NO 13593963 as cited in SEQ ID NO 59580
atggcgaaaccaaacatagacgaattgaatcaaatccttactagttatcaaaacaccatcaacgatactctccagttgttcgagcaagttccgtctccgacacaagacaaattatattggaacgatgtccttcagatttctgatcatctctccaaacaagctactatagtgggaatgctatggatcactggagaacctccaaaagctgaagcaatgaaggagactatggaagcatacttcaacgctcttcaaggatttttgctgcattgtcatggaagcatggttggtgctgggactacactctcttcgaccatacacgcttctgtgaagcaaattgttgattccagcttcagattgttgcagggttctgtttccttatacgagggatcatatgagaaaggaaggaagcccacgattccgcagcttgcaggagcagtgtgggaagcatgttctaatttaaagaacgtgcctgaaacaaacatcaaagcgattggaagagcgatggcacatgtagctgtttctatgaaggatgtgcttagggagatgaaagaactgaagcctgcttcttcttcacctgatcataatgtttcgacaaactcggatgacgatgatttaggcgatgaactgtctcctgaagaatttgaagttgctaaaatggtagcagatattgtgtctgagacgctcgttgttataaaagagcttatccgtgctatcacatgcatgatcaagctggagaatccaaaggataatagtgagtttgtggattcgtttgagaagttactgaagttgtgtcaaggaattggtgtacagattgatgagcttggagcttgtgtttacccgccgcaagagtttggtctcatgaaacaaacagtggagaacatgagggaaagtattggtgagattgagtctgatgttaagagttccaagaattcttcatcagaagctttatcaggatcatgcagaaggctgcagagtttgattgaacatatggtaaccgagttggacacaagaatcgaagctgaagtagtttacaaaatgcagaatgttactctttag

SEQ ID NO: 91199 - protein, 351 aa, Arabidopsis thaliana
  peptide (1)..(351): Ceres Seq. ID no. 12726801
MAKPNIDELNQILTSYQNTINDTLQLFEQVPSPTQDKLYWNDVLQISDHLSKQATIVGMLWITGEPPKAEAMKETMEAYFNALQGFLLHCHGSMVGAGTTLSSTIHASVKQIVDSSFRLLQGSVSLYEGSYEKGRKPTIPQLAGAVWEACSNLKNVPETNIKAIGRAMAHVAVSMKDVLREMKELKPASSSPDHNVSTNSDDDDLGDELSPEEFEVAKMVADIVSETLVVIKELIRAITCMIKLENPKDNSEFVDSFEKLLKLCQGIGVQIDELGACVYPPQEFGLMKQTVENMRESIGEIESDVKSSKNSSSEALSGSCRRLQSLIEHMVTELDTRIEAEVVYKMQNVTL

SEQ ID NO: 91200 - protein, 293 aa, Arabidopsis thaliana; identical to SEQ ID NO: 88757
  peptide (1)..(293): Ceres Seq. ID no. 12726802

SEQ ID NO: 91201 - protein, 280 aa, Arabidopsis thaliana
  peptide (1)..(280): Ceres Seq. ID no. 12726803
MKETMEAYFNALQGFLLHCHGSMVGAGTTLSSTIHASVKQIVDSSFRLLQGSVSLYEGSYEKGRKPTIPQLAGAVWEACSNLKNVPETNIKAIGRAMAHVAVSMKDVLREMKELKPASSSPDHNVSTNSDDDDLGDELSPEEFEVAKMVADIVSETLVVIKELIRAITCMIKLENPKDNSEFVDSFEKLLKLCQGIGVQIDELGACVYPPQEFGLMKQTVENMRESIGEIESDVKSSKNSSSEALSGSCRRLQSLIEHMVTELDTRIEAEVVYKMQNVTL

SEQ ID NO: 91202 - DNA, 1383 bp, Arabidopsis thaliana
  misc_feature (1)..(1383): Ceres Seq. ID no. 12726804
  misc_feature (1)..(1383): Ortholog of  Ceres SEQ ID NO 13503610 as cited in SEQ ID NO 62416
  misc_feature (1)..(1383): Ortholog of  Ceres SEQ ID NO 13657610 as cited in SEQ ID NO 66165
  misc_feature (1)..(1383): Ortholog of  Ceres SEQ ID NO 13598312 as cited in SEQ ID NO 68448
  misc_feature (1)..(1383): Ortholog of  Ceres SEQ ID NO 13596100 as cited in SEQ ID NO 68573
atggaatcgagctttcatttcatcaatgaagctctccttatcactcagacctttatcacttttcaccaattcctggtagcatcagcctgtgttctcatagctgtctttggttactatttcttcaaaccaagatgtattatatacctcattgacttctcatgttatcaacctcctgacttcttgcgagctccggtctctaatttcattgagcatcttaccatttccggtgtttttgatcaagaaagtcttgatctccagcagaagattttagagcgatcagggattagtgatgacgcgagcgtgcctgcgacagtccatgagattccaccaaacgcttctatctctgcagctagagaagaaactcatgagatcctcttcgctattgtccaagatcttttctcaaagcatgagatagatccaaagagtattgacatccttgtgtctaactgcagcctattctgtccttctccatccataacttctatgatcattaacaagtttggcatgaggagtgacataaagagcttcagtttgagcggtatgggctgcagcgccgggattctttcggttaatctcgtaaaagatcttatgaagattcatggtgattctttggccctagtgttgagtatggaagctgttagtccaaatggttacagagggaagtgtaagtcgatgctcattgccaacactatcttcagaatgggtggggctgcgattcttctttccaataggaagcaagattcgcataaggcgaaatacaaactccagcatattatcagaactcatgttggttcagacactgaatcgtacgagagtgtaatgcagcaagttgatgaagaaggaaaagtgggagtagcattgtccaagcagcttgtgagggtagcatcaaaggccttaaagatcaacgtggtgcagttaggccctcgagtgctaccttattcagagcagctcaaatacataatctcattcatccaaagaaaatggggaatgcacaaggagatatacacaccaaacttcaagaaagcttttgagcatttctgtatacatgccggaggaagggcgataattgaaggcgtggagaagcatctgaagctggacaaggaagacgtagaagcttcaaggtcaactctatatcgttatgggaacacatcttcgtcttcgttgtggtatgagctgcaatacctggaagcaaaaggtagaatgaaaatgggagataaagtatggcagattgggtttggaagtggctttaaggctaacagtgctgtctggaaatgcatctccgagatcgattcaagaggcaggaatgcatggtctgatcgaatccatttgtatcctgtctgtggagatacttcaagtgcattgaagacagagcttctttcttga

SEQ ID NO: 91203 - protein, 460 aa, Arabidopsis thaliana
  peptide (1)..(460): Ceres Seq. ID no. 12726805
MESSFHFINEALLITQTFITFHQFLVASACVLIAVFGYYFFKPRCIIYLIDFSCYQPPDFLRAPVSNFIEHLTISGVFDQESLDLQQKILERSGISDDASVPATVHEIPPNASISAAREETHEILFAIVQDLFSKHEIDPKSIDILVSNCSLFCPSPSITSMIINKFGMRSDIKSFSLSGMGCSAGILSVNLVKDLMKIHGDSLALVLSMEAVSPNGYRGKCKSMLIANTIFRMGGAAILLSNRKQDSHKAKYKLQHIIRTHVGSDTESYESVMQQVDEEGKVGVALSKQLVRVASKALKINVVQLGPRVLPYSEQLKYIISFIQRKWGMHKEIYTPNFKKAFEHFCIHAGGRAIIEGVEKHLKLDKEDVEASRSTLYRYGNTSSSSLWYELQYLEAKGRMKMGDKVWQIGFGSGFKANSAVWKCISEIDSRGRNAWSDRIHLYPVCGDTSSALKTELLS

SEQ ID NO: 91204 - protein, 299 aa, Arabidopsis thaliana
  peptide (1)..(299): Ceres Seq. ID no. 12726806
MIINKFGMRSDIKSFSLSGMGCSAGILSVNLVKDLMKIHGDSLALVLSMEAVSPNGYRGKCKSMLIANTIFRMGGAAILLSNRKQDSHKAKYKLQHIIRTHVGSDTESYESVMQQVDEEGKVGVALSKQLVRVASKALKINVVQLGPRVLPYSEQLKYIISFIQRKWGMHKEIYTPNFKKAFEHFCIHAGGRAIIEGVEKHLKLDKEDVEASRSTLYRYGNTSSSSLWYELQYLEAKGRMKMGDKVWQIGFGSGFKANSAVWKCISEIDSRGRNAWSDRIHLYPVCGDTSSALKTELLS

SEQ ID NO: 91205 - protein, 292 aa, Arabidopsis thaliana
  peptide (1)..(292): Ceres Seq. ID no. 12726807
MRSDIKSFSLSGMGCSAGILSVNLVKDLMKIHGDSLALVLSMEAVSPNGYRGKCKSMLIANTIFRMGGAAILLSNRKQDSHKAKYKLQHIIRTHVGSDTESYESVMQQVDEEGKVGVALSKQLVRVASKALKINVVQLGPRVLPYSEQLKYIISFIQRKWGMHKEIYTPNFKKAFEHFCIHAGGRAIIEGVEKHLKLDKEDVEASRSTLYRYGNTSSSSLWYELQYLEAKGRMKMGDKVWQIGFGSGFKANSAVWKCISEIDSRGRNAWSDRIHLYPVCGDTSSALKTELLS

SEQ ID NO: 91206 - DNA, 1016 bp, Arabidopsis thaliana
  misc_feature (1)..(1016): Ceres Seq. ID no. 12726812
  misc_feature (1)..(1016): Ortholog of  Ceres SEQ ID NO 12625265 as cited in SEQ ID NO 62349
  misc_feature (1)..(1016): Ortholog of  Ceres SEQ ID NO 13596555 as cited in SEQ ID NO 62840
atgaagaagcgaacgatgtccgcgtggggatcggcgattttaatcttcataatacttatgatcgtcactcccacaatccctcaatctcaggcttaccacaatttcgccgatcaacgctccttcctcgggattccaaattttttaaacgtcatctccaacttccctttcctcatcatcggccttattggtcttatcctctgcttttacccagaagattactttagctttagtttgcgaggtgagaaaataggatggacttgcttttacatcggtgtagctgctgttgcttttggatcttcttactatcatcttcacccaaacgatgctactctcctctgggatcgtcttcccatgactattgctttcacatcaatcatggctatatttgtaatcgagaggattgatgagcataagggtacttactccattgctcctttacttcttgctggtcttgttagcattttgtattggaggtttttcgatgaccttaggccatatgctttggttcagtttgttccttgcattgtgattccgttgatggctattttattgcctccaatgtatacacattccacttattggctatgggctgcagggttctatctcttagccaaggtggaagaagctgcggataagcctatatatagctggactcatcatattattagtgggcattctctgaagcatctgtgtgccgctatggtccctgtcttccttaccctcatgcttgcgaaaagaaccgttcaaactgagaggattagcttgtataagacatggaagaaaggatccgaggaagaacggttcgagcatagctactccaacgttgcagtcgaagagactcggtagattattttgttgactcgtaaaatgtaagatgatctttttcttttgatagtttgtgtgtttacggttactggctaatagaattagatatagaaggtacagatttatgatccagttggaaactaatgttagcgatctgtaatcttatcaaaatgctgcactctaccattcat

SEQ ID NO: 91207 - protein, 281 aa, Arabidopsis thaliana
  peptide (1)..(281): Ceres Seq. ID no. 12726813
MKKRTMSAWGSAILIFIILMIVTPTIPQSQAYHNFADQRSFLGIPNFLNVISNFPFLIIGLIGLILCFYPEDYFSFSLRGEKIGWTCFYIGVAAVAFGSSYYHLHPNDATLLWDRLPMTIAFTSIMAIFVIERIDEHKGTYSIAPLLLAGLVSILYWRFFDDLRPYALVQFVPCIVIPLMAILLPPMYTHSTYWLWAAGFYLLAKVEEAADKPIYSWTHHIISGHSLKHLCAAMVPVFLTLMLAKRTVQTERISLYKTWKKGSEEERFEHSYSNVAVEETR

SEQ ID NO: 91208 - protein, 276 aa, Arabidopsis thaliana
  peptide (1)..(276): Ceres Seq. ID no. 12726814
MSAWGSAILIFIILMIVTPTIPQSQAYHNFADQRSFLGIPNFLNVISNFPFLIIGLIGLILCFYPEDYFSFSLRGEKIGWTCFYIGVAAVAFGSSYYHLHPNDATLLWDRLPMTIAFTSIMAIFVIERIDEHKGTYSIAPLLLAGLVSILYWRFFDDLRPYALVQFVPCIVIPLMAILLPPMYTHSTYWLWAAGFYLLAKVEEAADKPIYSWTHHIISGHSLKHLCAAMVPVFLTLMLAKRTVQTERISLYKTWKKGSEEERFEHSYSNVAVEETR

SEQ ID NO: 91209 - protein, 262 aa, Arabidopsis thaliana
  peptide (1)..(262): Ceres Seq. ID no. 12726815
MIVTPTIPQSQAYHNFADQRSFLGIPNFLNVISNFPFLIIGLIGLILCFYPEDYFSFSLRGEKIGWTCFYIGVAAVAFGSSYYHLHPNDATLLWDRLPMTIAFTSIMAIFVIERIDEHKGTYSIAPLLLAGLVSILYWRFFDDLRPYALVQFVPCIVIPLMAILLPPMYTHSTYWLWAAGFYLLAKVEEAADKPIYSWTHHIISGHSLKHLCAAMVPVFLTLMLAKRTVQTERISLYKTWKKGSEEERFEHSYSNVAVEETR

SEQ ID NO: 91210 - DNA, 957 bp, Arabidopsis thaliana
  misc_feature (1)..(957): Ceres Seq. ID no. 12726819
  misc_feature (1)..(957): Ortholog of  Ceres SEQ ID NO 13594482 as cited in SEQ ID NO 51285
  misc_feature (1)..(957): Ortholog of  Ceres SEQ ID NO 13655381 as cited in SEQ ID NO 63359
atgttctaccaatcgtcgtcgtctctcacgcaaattcttcattcgttctgtggaaacacagaaatggagactccatatccgaaactcatcgatccttcaaagactcgaataggatggattggcatcgggataatgggatcggccatggtttctcatattatcgccgcaggctattctgtcacagtttacgctcgcgacctccggaaaacaaaagatctgcaaaccaaaggagctcgcatagccaatagccccaaagagttagcggagatgagcgacgttgtgttcacgattgttggaaacttcaacgatgtccgatcattgcttctcggtgacgatggtgtactctctggtcttacgcccggtggagtaacagtggacatgactagtagcaaaccaggattggcgcgtgaaatacacgcagaagcgaggcgtaggaattgttgggcggtggatgcgccggtatcaggtggagacgctggagcacgagaggggacgttagggattttcgccggcggagattcagagattgtggagtggttgtccccggtgatgaagaatatagggactgttacttatatgggagaagcagggagtgggcaaagctgcaagatagggaatcagattgctggtgcgagcaacctggttggacttgctgaagggatagtgttcgctgagaaagcgggtttagatacagtgaaatggctcgaggcggtgaaggatggtgcagctggatcggcggttatgcggctgtttggggagatgattgtgaagagggattatagggcgactggctttgcggagtatatggtgaaagatttgggaatggctgcagaggcggcgatgcctggtgctgctctgagcaagcagttgttcactggaatggtggctaatggagatggcaagttaggtattcaaggcgtcgtctctgttattagaagacttaacggcatatcctga

SEQ ID NO: 91211 - protein, 318 aa, Arabidopsis thaliana; identical to SEQ ID NO: 77113
  peptide (1)..(318): Ceres Seq. ID no. 12726820

SEQ ID NO: 91212 - protein, 297 aa, Arabidopsis thaliana; identical to SEQ ID NO: 77114
  peptide (1)..(297): Ceres Seq. ID no. 12726821

SEQ ID NO: 91213 - protein, 274 aa, Arabidopsis thaliana; identical to SEQ ID NO: 77115
  peptide (1)..(274): Ceres Seq. ID no. 12726822

SEQ ID NO: 91214 - DNA, 959 bp, Arabidopsis thaliana
  misc_feature (1)..(959): Ceres Seq. ID no. 12726846
  misc_feature (1)..(959): Ortholog of  Ceres SEQ ID NO 13595270 as cited in SEQ ID NO 56714
  misc_feature (1)..(959): Ortholog of  Ceres SEQ ID NO 14309148 as cited in SEQ ID NO 0
atcaaaaagatcaatcaaaatcaacaatcatcttcttctgatttctcacctctttcttctacttctcatcataattctgttagttctttgataagcccatttcgtgcctatcagacgacaactaaaccctacacgcttacataaaaacgcgacctttgagaattttgtccggcgacagaaatggcggggttagggttacggctaaaggcggcaaaatggacgttgaggagcggatcaggtgctgtatcgagagaatggtcgtcggagatggggaaaggtgttcgtcgattctctactgaaacagagaacgatgttccaacttcaggaatcagtagaccactcgctgagattctcaaggagcttaacaaaaaggttccagattcagtcatccgaactcgagttgaagatgggtgctccatcaaatacatcccttggcacattgtgaatcggatcatgaatatgcatgctccagaatggtcaggagaagttcgaagtgtcacttactctcctgatggcaacactgttactgtggcttatcgtgtgactctctacggcactgatgctgagatatttagggaatcaacaggtaccacatctgtagatgacaaaggctatggtgatgctgtgcaaaaggcggaagcaatggcatttcgccgtgcgtgtgcaagatttggattagggcttcatctttatcacgaggatgctttgtaaagggtaatctttctttaaccatgggaaagtatattattttggtgttcccactgcctagtagtagtagtctttgaaggtaaaactcagggaagcttaagtttttggtatcttagatatgtatcagctgatattgatcgctttatgatttgaaatcggttaatgaaatgaccttcagaggactctttgttgcatttctgtaacttaacttgaggttgcaactttaaccagtaaaagttatctgtttgtgg

SEQ ID NO: 91215 - protein, 176 aa, Arabidopsis thaliana
  peptide (1)..(176): Ceres Seq. ID no. 12726847
MAGLGLRLKAAKWTLRSGSGAVSREWSSEMGKGVRRFSTETENDVPTSGISRPLAEILKELNKKVPDSVIRTRVEDGCSIKYIPWHIVNRIMNMHAPEWSGEVRSVTYSPDGNTVTVAYRVTLYGTDAEIFRESTGTTSVDDKGYGDAVQKAEAMAFRRACARFGLGLHLYHEDAL

SEQ ID NO: 91216 - protein, 147 aa, Arabidopsis thaliana
  peptide (1)..(147): Ceres Seq. ID no. 12726848
MGKGVRRFSTETENDVPTSGISRPLAEILKELNKKVPDSVIRTRVEDGCSIKYIPWHIVNRIMNMHAPEWSGEVRSVTYSPDGNTVTVAYRVTLYGTDAEIFRESTGTTSVDDKGYGDAVQKAEAMAFRRACARFGLGLHLYHEDAL

SEQ ID NO: 91217 - DNA, 2070 bp, Arabidopsis thaliana
  misc_feature (1)..(2070): Ceres Seq. ID no. 12726871
  misc_feature (1)..(2070): Ortholog of  Ceres SEQ ID NO 13660894 as cited in SEQ ID NO 67475
atggaagtagtgtcgtctctcggaatccgagacctcccggcgtccctctccgtgacgacgagtctcaaccaccgtcctcatcgttccgataaagatggcgctccggcgaaatctccgattagaccaagcagaactagacgaccttccacttctcccgccaaaaagccgaaaccttttagggaaagagatgctttcccttcttctcttcctctccactccaagaacccctacattatccacagagatattcaaatttttgcgaggcagaacaatctcgaagtcgctctcacgattcttgattatctcgaacagagagggattcctgtaaatgcgacaactttctctgctcttttagaggcgtgtgttcgccggaagtcgttgcttcacggtaaacaagtccatgttcatatacgtattaatgggttggagagtaatgagtttctaaggaccaagcttgttcatatgtatactgcttgtggttcggttaaagatgcacagaaggtgttcgatgaaagtactagctcaaatgtttactcttggaatgcgttgcttagagggactgttatatcagggaagaagcggtatcaagatgttctttctacgtttacagaaatgagagagcttggtgttgatttgaatgtttatagtttatctaatgtgtttaagagttttgctggtgcatctgctttgagacagggattgaagacgcatgcacttgcgattaagaatggtttgtttaatagtgtctttcttaagacttctcttgttgatatgtattttaagtgtggtaaagtagggcttgcacgtcgagtttttgatgagattgtagagagagatatagttgtttggggggcgatgattgctggattggctcacaataaaaggcagtgggaagcgttgggactgtttaggacgatgattagtgaagaaaagatatatccaaactcagttatacttacaacgattcttcccgtacttggggatgttaaggcactgaaactggggaaggaggtccatgcccatgtattgaaatcgaagaattacgtggaacagccgtttgttcactctggtttgattgatttatactgcaagtgtggggatatggcttctgggagacgtgtgttctatggatccaaacagaggaatgccatatcttggactgcattgatgtctggatacgcagccaacggtagatttgatcaagctttgaggtcgattgtttggatgcagcaggaaggttttaggccagatgttgttacaattgctactgttcttcctgtttgcgcagagctgagggctataaagcaaggaaaggagattcattgttatgctttaaagaatctcttcttgccgaatgtatccctggtcacttccttgatggtgatgtactcaaagtgcggtgttccagagtatcctatcagactgtttgacaggttggaacaaaggaatgtgaaagcatggaccgctatgattgactgctatgtggaaaattgtgatttaagagcagggattgaggtattcagattgatgctgttatcaaaacacaggccagattctgttacgatgggtagggttttgactgtttgcagtgatctcaaagcattaaagttggggaaagagcttcatgggcacattctgaaaaaggaatttgagtcgatcccatttgtttctgcaagaatcatcaagatgtatggaaaatgtggagatctcagaagtgctaatttctctttcgatgctgttgctgtcaagggctctctgacatggaccgccattatagaggcttatggatgcaatgaactcttcagggatgcaataaactgttttgagcaaatggtatcaagagggtttactcccaacaccttcacatttacagcagttttatctatttgcagtcaagccggatttgttgatgaagcttatcgcttcttcaacttgatgctccggatgtacaatttgcagccatcagaagagcattattcactggtcattgaacttctcaatcggtgtggtcgtgttgaagaggcacaaagacttgcggtcatgagttcctcgtcatccctacagacctga

SEQ ID NO: 91218 - protein, 689 aa, Arabidopsis thaliana
  peptide (1)..(689): Ceres Seq. ID no. 12726872
MEVVSSLGIRDLPASLSVTTSLNHRPHRSDKDGAPAKSPIRPSRTRRPSTSPAKKPKPFRERDAFPSSLPLHSKNPYIIHRDIQIFARQNNLEVALTILDYLEQRGIPVNATTFSALLEACVRRKSLLHGKQVHVHIRINGLESNEFLRTKLVHMYTACGSVKDAQKVFDESTSSNVYSWNALLRGTVISGKKRYQDVLSTFTEMRELGVDLNVYSLSNVFKSFAGASALRQGLKTHALAIKNGLFNSVFLKTSLVDMYFKCGKVGLARRVFDEIVERDIVVWGAMIAGLAHNKRQWEALGLFRTMISEEKIYPNSVILTTILPVLGDVKALKLGKEVHAHVLKSKNYVEQPFVHSGLIDLYCKCGDMASGRRVFYGSKQRNAISWTALMSGYAANGRFDQALRSIVWMQQEGFRPDVVTIATVLPVCAELRAIKQGKEIHCYALKNLFLPNVSLVTSLMVMYSKCGVPEYPIRLFDRLEQRNVKAWTAMIDCYVENCDLRAGIEVFRLMLLSKHRPDSVTMGRVLTVCSDLKALKLGKELHGHILKKEFESIPFVSARIIKMYGKCGDLRSANFSFDAVAVKGSLTWTAIIEAYGCNELFRDAINCFEQMVSRGFTPNTFTFTAVLSICSQAGFVDEAYRFFNLMLRMYNLQPSEEHYSLVIELLNRCGRVEEAQRLAVMSSSSSLQT

SEQ ID NO: 91219 - protein, 535 aa, Arabidopsis thaliana
  peptide (1)..(535): Ceres Seq. ID no. 12726873
MYTACGSVKDAQKVFDESTSSNVYSWNALLRGTVISGKKRYQDVLSTFTEMRELGVDLNVYSLSNVFKSFAGASALRQGLKTHALAIKNGLFNSVFLKTSLVDMYFKCGKVGLARRVFDEIVERDIVVWGAMIAGLAHNKRQWEALGLFRTMISEEKIYPNSVILTTILPVLGDVKALKLGKEVHAHVLKSKNYVEQPFVHSGLIDLYCKCGDMASGRRVFYGSKQRNAISWTALMSGYAANGRFDQALRSIVWMQQEGFRPDVVTIATVLPVCAELRAIKQGKEIHCYALKNLFLPNVSLVTSLMVMYSKCGVPEYPIRLFDRLEQRNVKAWTAMIDCYVENCDLRAGIEVFRLMLLSKHRPDSVTMGRVLTVCSDLKALKLGKELHGHILKKEFESIPFVSARIIKMYGKCGDLRSANFSFDAVAVKGSLTWTAIIEAYGCNELFRDAINCFEQMVSRGFTPNTFTFTAVLSICSQAGFVDEAYRFFNLMLRMYNLQPSEEHYSLVIELLNRCGRVEEAQRLAVMSSSSSLQT

SEQ ID NO: 91220 - protein, 485 aa, Arabidopsis thaliana
  peptide (1)..(485): Ceres Seq. ID no. 12726874
MRELGVDLNVYSLSNVFKSFAGASALRQGLKTHALAIKNGLFNSVFLKTSLVDMYFKCGKVGLARRVFDEIVERDIVVWGAMIAGLAHNKRQWEALGLFRTMISEEKIYPNSVILTTILPVLGDVKALKLGKEVHAHVLKSKNYVEQPFVHSGLIDLYCKCGDMASGRRVFYGSKQRNAISWTALMSGYAANGRFDQALRSIVWMQQEGFRPDVVTIATVLPVCAELRAIKQGKEIHCYALKNLFLPNVSLVTSLMVMYSKCGVPEYPIRLFDRLEQRNVKAWTAMIDCYVENCDLRAGIEVFRLMLLSKHRPDSVTMGRVLTVCSDLKALKLGKELHGHILKKEFESIPFVSARIIKMYGKCGDLRSANFSFDAVAVKGSLTWTAIIEAYGCNELFRDAINCFEQMVSRGFTPNTFTFTAVLSICSQAGFVDEAYRFFNLMLRMYNLQPSEEHYSLVIELLNRCGRVEEAQRLAVMSSSSSLQT

SEQ ID NO: 91221 - DNA, 888 bp, Arabidopsis thaliana
  misc_feature (1)..(888): Ceres Seq. ID no. 12726881
  misc_feature (1)..(888): Ortholog of  Ceres SEQ ID NO 13648488 as cited in SEQ ID NO 20419
  misc_feature (1)..(888): Ortholog of  Ceres SEQ ID NO 15171378 as cited in SEQ ID NO 51582
atgacgacttatctcccatttccgatgaccacgagactcatactctctagcttcgtctctctcgtcgtactcactctcttcttcatcaccagaaccggtttctcaccgtcatcttcatttcatcagcctctgaacaacactctccggatctccacttcctccaccggcagtaaattacagagtccaagaagttgtaataagatccctccttccctcgccgatgctctcgtccactatgcctcctccaatgtcactccccagcaaactctctccgaaatctccgtcaccaagaaggaattagagaagaaatctccgtgcaacttcttggtatttggtcttggtcacgatagcttgatgtgggcgacgttaaatcacggaggaagaaccatcttcttagacgaggacgagtcatggattcaccaaatcgctgagaaattcccgtctcttgaatcgtaccacgtccggtacaagaccaaggtaagagacgcggaagctctcatggctgctacgaaagacagagaagaatgccgccgcgtgtcaactgatcttagggtttccacttgcgagcttgcgttgaagggcttaccggaggtggtttacgagacagagtgggatctaatcatggtggatgctccgacggggtttcatgaagaagctccgggacggatgtcggcgatttacacggcggggatgatcgcgaggagacggaaggatgaggaagagacaacggctgtgtttgtgcatgatgtggataggaaagtggaggatgagttctcaatggagtttttgtgtagagattacatgacgaagcaagagggaagactccgtcatttcacggtgcctagtcaccgtaactatggtgtctccggcgttaaattctgtccttaa

SEQ ID NO: 91222 - protein, 295 aa, Arabidopsis thaliana
  peptide (1)..(295): Ceres Seq. ID no. 12726882
MTTYLPFPMTTRLILSSFVSLVVLTLFFITRTGFSPSSSFHQPLNNTLRISTSSTGSKLQSPRSCNKIPPSLADALVHYASSNVTPQQTLSEISVTKKELEKKSPCNFLVFGLGHDSLMWATLNHGGRTIFLDEDESWIHQIAEKFPSLESYHVRYKTKVRDAEALMAATKDREECRRVSTDLRVSTCELALKGLPEVVYETEWDLIMVDAPTGFHEEAPGRMSAIYTAGMIARRRKDEEETTAVFVHDVDRKVEDEFSMEFLCRDYMTKQEGRLRHFTVPSHRNYGVSGVKFCP

SEQ ID NO: 91223 - protein, 287 aa, Arabidopsis thaliana
  peptide (1)..(287): Ceres Seq. ID no. 12726883
MTTRLILSSFVSLVVLTLFFITRTGFSPSSSFHQPLNNTLRISTSSTGSKLQSPRSCNKIPPSLADALVHYASSNVTPQQTLSEISVTKKELEKKSPCNFLVFGLGHDSLMWATLNHGGRTIFLDEDESWIHQIAEKFPSLESYHVRYKTKVRDAEALMAATKDREECRRVSTDLRVSTCELALKGLPEVVYETEWDLIMVDAPTGFHEEAPGRMSAIYTAGMIARRRKDEEETTAVFVHDVDRKVEDEFSMEFLCRDYMTKQEGRLRHFTVPSHRNYGVSGVKFCP

SEQ ID NO: 91224 - protein, 177 aa, Arabidopsis thaliana
  peptide (1)..(177): Ceres Seq. ID no. 12726884
MWATLNHGGRTIFLDEDESWIHQIAEKFPSLESYHVRYKTKVRDAEALMAATKDREECRRVSTDLRVSTCELALKGLPEVVYETEWDLIMVDAPTGFHEEAPGRMSAIYTAGMIARRRKDEEETTAVFVHDVDRKVEDEFSMEFLCRDYMTKQEGRLRHFTVPSHRNYGVSGVKFCP

SEQ ID NO: 91225 - DNA, 2273 bp, Arabidopsis thaliana
  misc_feature (1)..(2273): Ceres Seq. ID no. 12726893
  misc_feature (1)..(2273): Ortholog of  Ceres SEQ ID NO 13594100 as cited in SEQ ID NO 58827
aaaataaaataaattctctctttctggtctgaagaaaattacgattattttcttatgtctccagttgaacccgccggtataatgaagaaatctcatcgtcagaaatctcagagattatgggcaaagctagtgatgagaaagtggttgaacataagtggtagagatcctgagtatggtgctgatactgataacgaatccgaaaacgaagatgctcgtgaagacaacgatgactctagctccgatgaagaaggtggtagtggctcgagaggaagagaatcaaaagtttatgagaacgcggaggacgcaatcgcagccgcttcagccgttgtagacgcagcagcagcagcggcggagtttattagcaatgatgctccaatgaagttaagaagaaggaattcagaaacattaagagcacagtacattaacaacaaagaaataagagtttgtgttggtacgtggaacgttggaggaatctcaccaccatctgatcttgacattgacgactggattgaaattaaccaaccagctgatatctacgttcttgggttacaagagattgttcctttaaatgctggaaacattcttggagctgaagatgatcgtcctgttgctaaatgggaagaagtgattagagaagcattgaacagagttagaccaaaactctccggggttaagagttatagtgatccaccatctccgggtaggtttaaaccttttgaggaaacacatgatattatagaggaagaagtagcttttgagagtgatagtgatgctggtgttgagattcatccgattgacgaggaggaagaagaggaaaccgatagactttgggcgttaaaacatgacggtggagttatcggcgaagttaagactcttgttgacccgaataccggtttgccggttgttgagatcaagagacagttttcgattcctaagaagctagacagacaactttgtttacgtgctgatagctttaaggggataagcgacgatgattctactcaaaccggtatgaaaacgataaaccggatgttaagcgggaaagaacggatcggtttgagttggcctgagccaccattgaacatgttaggaccttgtgttctcgatagacagccgtcgataaagacagtgaagtctttaaaaacagccaagtctttcaaggcttatagttcgtttaagtctgtagccggaaacaacaacgggattccccctgaggttttagctctagcggaaatggacctgaagttgctaatggagaggaaacgaagaccggcttatgtgaggctagtgagtaaacaaatggttgggattcttttgaccatttgggttaaacgaagcttgcggaaacatattcaaaacgtacgagtctctactgttggtgttggcgttatgggatatattggtaacaagggagctgtgtctgtgagcatgtcgataaaccagacgttcttttgtttcataaacacgcatttaacggcaggagaaagagaggttgatcagataaagaggaatgctgatgtacacgagatacataaaagaacagtctttcactctgtctcagctcttggacttcccaagcttatctatgatcacgaaagaataatctggctaggtgatctcaactatcggcttagttcatcgtatgagaaaaccagagacctcatttccaagagagaatggtctaaattacttgaatatgaccagctggtaaaggaatacagaaaaggtagagcatttgatggatggtcagaaggaactctacattttccaccaacttataagtaccaagcgaattccgatgagtacaccgcaaacgatggaaaggcgccgaaaagaacaccagcttggtgtgacagagtactatcctacgggaaaggaatgaggttggttcattacaggagaaccgaacagaaattctcagatcatcgtccggttacagcgatatacatggctgaagtcgaagtgttttctgcgaggaaacttcagcgagcgttgacatttacggatgcagagattgaagacgagggacttgtagccgttctcgtttaaaagaagagatttggtgcttgtttgtttgtttgatcttgcatatgaagtattggcgaaagagacattctctttctacggataggtttttgaatctcatgtcgttatactgatgcatcacactgagaaaacgttcatattcttatagtttttatcttcttgttttgtgtgttggtttactcttgtaaatttagttgatatatataatgaaatcaagaacattttac

SEQ ID NO: 91226 - protein, 664 aa, Arabidopsis thaliana
  peptide (1)..(664): Ceres Seq. ID no. 12726894
MSPVEPAGIMKKSHRQKSQRLWAKLVMRKWLNISGRDPEYGADTDNESENEDAREDNDDSSSDEEGGSGSRGRESKVYENAEDAIAAASAVVDAAAAAAEFISNDAPMKLRRRNSETLRAQYINNKEIRVCVGTWNVGGISPPSDLDIDDWIEINQPADIYVLGLQEIVPLNAGNILGAEDDRPVAKWEEVIREALNRVRPKLSGVKSYSDPPSPGRFKPFEETHDIIEEEVAFESDSDAGVEIHPIDEEEEEETDRLWALKHDGGVIGEVKTLVDPNTGLPVVEIKRQFSIPKKLDRQLCLRADSFKGISDDDSTQTGMKTINRMLSGKERIGLSWPEPPLNMLGPCVLDRQPSIKTVKSLKTAKSFKAYSSFKSVAGNNNGIPPEVLALAEMDLKLLMERKRRPAYVRLVSKQMVGILLTIWVKRSLRKHIQNVRVSTVGVGVMGYIGNKGAVSVSMSINQTFFCFINTHLTAGEREVDQIKRNADVHEIHKRTVFHSVSALGLPKLIYDHERIIWLGDLNYRLSSSYEKTRDLISKREWSKLLEYDQLVKEYRKGRAFDGWSEGTLHFPPTYKYQANSDEYTANDGKAPKRTPAWCDRVLSYGKGMRLVHYRRTEQKFSDHRPVTAIYMAEVEVFSARKLQRALTFTDAEIEDEGLVAVLV

SEQ ID NO: 91227 - protein, 655 aa, Arabidopsis thaliana
  peptide (1)..(655): Ceres Seq. ID no. 12726895
MKKSHRQKSQRLWAKLVMRKWLNISGRDPEYGADTDNESENEDAREDNDDSSSDEEGGSGSRGRESKVYENAEDAIAAASAVVDAAAAAAEFISNDAPMKLRRRNSETLRAQYINNKEIRVCVGTWNVGGISPPSDLDIDDWIEINQPADIYVLGLQEIVPLNAGNILGAEDDRPVAKWEEVIREALNRVRPKLSGVKSYSDPPSPGRFKPFEETHDIIEEEVAFESDSDAGVEIHPIDEEEEEETDRLWALKHDGGVIGEVKTLVDPNTGLPVVEIKRQFSIPKKLDRQLCLRADSFKGISDDDSTQTGMKTINRMLSGKERIGLSWPEPPLNMLGPCVLDRQPSIKTVKSLKTAKSFKAYSSFKSVAGNNNGIPPEVLALAEMDLKLLMERKRRPAYVRLVSKQMVGILLTIWVKRSLRKHIQNVRVSTVGVGVMGYIGNKGAVSVSMSINQTFFCFINTHLTAGEREVDQIKRNADVHEIHKRTVFHSVSALGLPKLIYDHERIIWLGDLNYRLSSSYEKTRDLISKREWSKLLEYDQLVKEYRKGRAFDGWSEGTLHFPPTYKYQANSDEYTANDGKAPKRTPAWCDRVLSYGKGMRLVHYRRTEQKFSDHRPVTAIYMAEVEVFSARKLQRALTFTDAEIEDEGLVAVLV

SEQ ID NO: 91228 - protein, 638 aa, Arabidopsis thaliana
  peptide (1)..(638): Ceres Seq. ID no. 12726896
MRKWLNISGRDPEYGADTDNESENEDAREDNDDSSSDEEGGSGSRGRESKVYENAEDAIAAASAVVDAAAAAAEFISNDAPMKLRRRNSETLRAQYINNKEIRVCVGTWNVGGISPPSDLDIDDWIEINQPADIYVLGLQEIVPLNAGNILGAEDDRPVAKWEEVIREALNRVRPKLSGVKSYSDPPSPGRFKPFEETHDIIEEEVAFESDSDAGVEIHPIDEEEEEETDRLWALKHDGGVIGEVKTLVDPNTGLPVVEIKRQFSIPKKLDRQLCLRADSFKGISDDDSTQTGMKTINRMLSGKERIGLSWPEPPLNMLGPCVLDRQPSIKTVKSLKTAKSFKAYSSFKSVAGNNNGIPPEVLALAEMDLKLLMERKRRPAYVRLVSKQMVGILLTIWVKRSLRKHIQNVRVSTVGVGVMGYIGNKGAVSVSMSINQTFFCFINTHLTAGEREVDQIKRNADVHEIHKRTVFHSVSALGLPKLIYDHERIIWLGDLNYRLSSSYEKTRDLISKREWSKLLEYDQLVKEYRKGRAFDGWSEGTLHFPPTYKYQANSDEYTANDGKAPKRTPAWCDRVLSYGKGMRLVHYRRTEQKFSDHRPVTAIYMAEVEVFSARKLQRALTFTDAEIEDEGLVAVLV

SEQ ID NO: 91229 - DNA, 1386 bp, Arabidopsis thaliana
  misc_feature (1)..(1386): Ceres Seq. ID no. 12726903
  misc_feature (1)..(1386): Ortholog of  Ceres SEQ ID NO 14311005 as cited in SEQ ID NO 53519
atggcttcatcatcatcccaacgacgctgcgtttttgttgggaacattccttacgacgcgaccgaggaacaacttagagaaatttgtggagaagttggacctgttgtctcgtttagattagttacggatagagaaactggtaaaccaaaaggctacggattttgtgagtataaagacgaagaaacagcattaagtgctcgtcgtaatcttcagagttatgaaatcaatggtcgtcaattaagagttgattttgctgagaatgacaaaggcactgacaaaacccgtgatcagagtcaaggaggacctggtttgccatctactactactgtgacagagtctcaaaagcagattggagggccagtagattcaaatatgcatcagccagttggtctccaccttgctacaacagctgcatctgttatagcgggtgcgctaggtggtcctcaggtcggttcgcagtttacgcaaagtaatctgcaggttccagctagtgatcccctggctcttcatctagccaagatgtcaagaagtcagcttactgaaattatatcgtccattaagttaatggctacacaaaataaggaacatgctagacagttgttggtttcaagacctcagttgctaaaagctgttttcctggcgcaggtaatgcttgggattgtgagtccgcaagtgttacagtcgccaaatattgttcaggccccaagtcatatgacagggtcttcaattcaagatgcgcaattatctggtcaaaaccttttaccgccactggcacaaaggtcacagcagctaagtcgtgctccccatagtcagtatcctgtccagcaatcttctaaacaaccttttagtcagattccacaactagtagcacaaccaggtccttcttctgtgaatcctcctcctagatcccaagttaaagtcgaaaacgctccattccaacgccagcaagtggttccagcttccaccaacataggttatagtagtcagaattcagttccgaataatgctatccagccatctcaagtaccccaccaagcattaccaaattctgtgatgcagcaaggtgggcaaacggtatcattaaattttggcaaaagaataaacgagggtcctcctcatcaatcaatgaacagaccatcaaagatgatgaaagtggaggataggagaactacttcactccctggaggtcatgtgtctaattcaatgcttccgaatcaagcacaagctccccagacacatatctctcccgatgttcagtcaacattgctccagcaagtaatgaaccttacgccagaacagttgagattactgactccagagcaacaacaagaggtcttaaagctgcaacaagccctcaagcaagaccacatgatgcagccttcatag

SEQ ID NO: 91230 - protein, 461 aa, Arabidopsis thaliana
  peptide (1)..(461): Ceres Seq. ID no. 12726904
MASSSSQRRCVFVGNIPYDATEEQLREICGEVGPVVSFRLVTDRETGKPKGYGFCEYKDEETALSARRNLQSYEINGRQLRVDFAENDKGTDKTRDQSQGGPGLPSTTTVTESQKQIGGPVDSNMHQPVGLHLATTAASVIAGALGGPQVGSQFTQSNLQVPASDPLALHLAKMSRSQLTEIISSIKLMATQNKEHARQLLVSRPQLLKAVFLAQVMLGIVSPQVLQSPNIVQAPSHMTGSSIQDAQLSGQNLLPPLAQRSQQLSRAPHSQYPVQQSSKQPFSQIPQLVAQPGPSSVNPPPRSQVKVENAPFQRQQVVPASTNIGYSSQNSVPNNAIQPSQVPHQALPNSVMQQGGQTVSLNFGKRINEGPPHQSMNRPSKMMKVEDRRTTSLPGGHVSNSMLPNQAQAPQTHISPDVQSTLLQQVMNLTPEQLRLLTPEQQQEVLKLQQALKQDHMMQPS

SEQ ID NO: 91231 - protein, 337 aa, Arabidopsis thaliana
  peptide (1)..(337): Ceres Seq. ID no. 12726905
MHQPVGLHLATTAASVIAGALGGPQVGSQFTQSNLQVPASDPLALHLAKMSRSQLTEIISSIKLMATQNKEHARQLLVSRPQLLKAVFLAQVMLGIVSPQVLQSPNIVQAPSHMTGSSIQDAQLSGQNLLPPLAQRSQQLSRAPHSQYPVQQSSKQPFSQIPQLVAQPGPSSVNPPPRSQVKVENAPFQRQQVVPASTNIGYSSQNSVPNNAIQPSQVPHQALPNSVMQQGGQTVSLNFGKRINEGPPHQSMNRPSKMMKVEDRRTTSLPGGHVSNSMLPNQAQAPQTHISPDVQSTLLQQVMNLTPEQLRLLTPEQQQEVLKLQQALKQDHMMQPS

SEQ ID NO: 91232 - protein, 288 aa, Arabidopsis thaliana
  peptide (1)..(288): Ceres Seq. ID no. 12726906
MSRSQLTEIISSIKLMATQNKEHARQLLVSRPQLLKAVFLAQVMLGIVSPQVLQSPNIVQAPSHMTGSSIQDAQLSGQNLLPPLAQRSQQLSRAPHSQYPVQQSSKQPFSQIPQLVAQPGPSSVNPPPRSQVKVENAPFQRQQVVPASTNIGYSSQNSVPNNAIQPSQVPHQALPNSVMQQGGQTVSLNFGKRINEGPPHQSMNRPSKMMKVEDRRTTSLPGGHVSNSMLPNQAQAPQTHISPDVQSTLLQQVMNLTPEQLRLLTPEQQQEVLKLQQALKQDHMMQPS

SEQ ID NO: 91233 - DNA, 2388 bp, Arabidopsis thaliana
  misc_feature (1)..(2388): Ceres Seq. ID no. 12726907
  misc_feature (1)..(2388): Ortholog of  Ceres SEQ ID NO 13598023 as cited in SEQ ID NO 66487
agtagagaaccatattatttgccatttcttagaagaatccactgcatgatattcaaaatctcaccaacaaccattggcgaagaagaaaagaaaaagaagataactctgtagattttgaaagagatgcttcggcttccttcttctatgccaatcgtttcttttcccgccaatcccaatctgctgattaatccacaaccatcttggccgtcgcgaagaggaaactccgccgttgttgtctccgctgcgtctagagatgtagatagtttcactagtaaatccggttatttgttcagtctcagtgccgatgaggctgattctttgtcggagtacaattttcccaggattgatgggatgtataagaagaaacctctgattctgcttcgtagattagctcagatcggaactacgtttagttattggtttgggcttcgcttagctgatgaggctttggaacgctctgatcaaatgttcaaggtacgagcagcggagcttaggaaattgcttgtggagctaggtccggcgtacgtcaaaatcgctcaagctgtttcatctcgtcctgatttgatacctcctatatacttggatgaactctccctgctacaagatcaaataactccgttttcaaccgaagttgctttcaatatgattgaggatgaacttggtcttcctatagatgagcttttctctgagatttctcctgagcctgttgctgcagcgtcccttggacaggtatatcaagctaggctccgtagaagtggaaaggttgttgctgtcaaagtgcagcgccctggtgtacgagctgcaattgctttggacacattaattcttcggtatatagcgggtttgattaaaaaggctggaagattcaactctgatctcgaggcagttgttgatgaatgggcaacaagtctgtttaaggagatggattacttgaatgaagctcaaaacggaataaaatttaggaagttgtatggtggcatcaaagatgtcttggttccaaagatgtacacagagtacagtaccagcaaagttcttgtaatggaatgggtggagggtcagaagcttaatgaagttaatgacctttatttagttgaggttggcgtttactgttcgtttaatcaacttctggagtatggattttaccatgccgatccccaccctgggaattttcttcgcacgtatgatgggcaacttgcatacttagattttggtatgatgggggactttaggccagaattacgtgatggattcatggaagcatgtcttcatcttgtaaatcgtgacttcaaagcgctggctaaagactttgtaactctggggcttcttccaccaacagcagaaaagagcgctgtgacaaaggctttaaccgatgtttttcaagatgcaatttctagaggagttcgcaatataagcttcggtgacctgcttggcgacttgggaaaaacaatgtaccgattcaaattcagaatacccccttatttttctctagttatccgcagtcttgctgttttggagggcattgccatcggtataagcccaaactacaaggttctaggcagtacatacccttggattgctagaaagattctaaccgacagctctccacaactgaaaagctctctgcaaaatcttttatatgaggaaggtgttttccgaattgaccgtcttgagtctttgctttctgagtctcttaggacagagacagcattagttcagaaaccagtggtggggacagaatctaatattgccatgaagcaaatgcttgcttttactttcacggaacagggttcttttgtaagagaaatccttcttcgagaattcgctaagggtcttgatgcatatggattggcaactttggactcttttacattttctggttcaggaccatcgagttccttgacagaagaagacatgacaaaccttagaactttctatcgcctcatctcattgttctcagggatgcaaaaggctaaaagccaagtaaaagcggtgagtaaatatggtgaggcgctcacgcctctagacgaagcatcactggtcatgtatcagcttccatcagcacaagagatgcttccgattctctccatattacctgagcttccacaggaatcacaacagaggttgcttcagttgccaggtgacttggttggaagattggtgactcgggcttttgctagaaccattcgcaggatttttctttgatgtccgattacaaataaaaacttgcagattttagacaagactactgtgatttgagttatttataatttttacataaacttgaagagaatcagaggaatggctgttttgatcccacaacagcatatttataaaagaaaagcatcaacatcttcttcatcaaataaaacaatctcagtttttgttttg

SEQ ID NO: 91234 - protein, 692 aa, Arabidopsis thaliana
  peptide (1)..(692): Ceres Seq. ID no. 12726908
MLRLPSSMPIVSFPANPNLLINPQPSWPSRRGNSAVVVSAASRDVDSFTSKSGYLFSLSADEADSLSEYNFPRIDGMYKKKPLILLRRLAQIGTTFSYWFGLRLADEALERSDQMFKVRAAELRKLLVELGPAYVKIAQAVSSRPDLIPPIYLDELSLLQDQITPFSTEVAFNMIEDELGLPIDELFSEISPEPVAAASLGQVYQARLRRSGKVVAVKVQRPGVRAAIALDTLILRYIAGLIKKAGRFNSDLEAVVDEWATSLFKEMDYLNEAQNGIKFRKLYGGIKDVLVPKMYTEYSTSKVLVMEWVEGQKLNEVNDLYLVEVGVYCSFNQLLEYGFYHADPHPGNFLRTYDGQLAYLDFGMMGDFRPELRDGFMEACLHLVNRDFKALAKDFVTLGLLPPTAEKSAVTKALTDVFQDAISRGVRNISFGDLLGDLGKTMYRFKFRIPPYFSLVIRSLAVLEGIAIGISPNYKVLGSTYPWIARKILTDSSPQLKSSLQNLLYEEGVFRIDRLESLLSESLRTETALVQKPVVGTESNIAMKQMLAFTFTEQGSFVREILLREFAKGLDAYGLATLDSFTFSGSGPSSSLTEEDMTNLRTFYRLISLFSGMQKAKSQVKAVSKYGEALTPLDEASLVMYQLPSAQEMLPILSILPELPQESQQRLLQLPGDLVGRLVTRAFARTIRRIFL

SEQ ID NO: 91235 - protein, 685 aa, Arabidopsis thaliana
  peptide (1)..(685): Ceres Seq. ID no. 12726909
MPIVSFPANPNLLINPQPSWPSRRGNSAVVVSAASRDVDSFTSKSGYLFSLSADEADSLSEYNFPRIDGMYKKKPLILLRRLAQIGTTFSYWFGLRLADEALERSDQMFKVRAAELRKLLVELGPAYVKIAQAVSSRPDLIPPIYLDELSLLQDQITPFSTEVAFNMIEDELGLPIDELFSEISPEPVAAASLGQVYQARLRRSGKVVAVKVQRPGVRAAIALDTLILRYIAGLIKKAGRFNSDLEAVVDEWATSLFKEMDYLNEAQNGIKFRKLYGGIKDVLVPKMYTEYSTSKVLVMEWVEGQKLNEVNDLYLVEVGVYCSFNQLLEYGFYHADPHPGNFLRTYDGQLAYLDFGMMGDFRPELRDGFMEACLHLVNRDFKALAKDFVTLGLLPPTAEKSAVTKALTDVFQDAISRGVRNISFGDLLGDLGKTMYRFKFRIPPYFSLVIRSLAVLEGIAIGISPNYKVLGSTYPWIARKILTDSSPQLKSSLQNLLYEEGVFRIDRLESLLSESLRTETALVQKPVVGTESNIAMKQMLAFTFTEQGSFVREILLREFAKGLDAYGLATLDSFTFSGSGPSSSLTEEDMTNLRTFYRLISLFSGMQKAKSQVKAVSKYGEALTPLDEASLVMYQLPSAQEMLPILSILPELPQESQQRLLQLPGDLVGRLVTRAFARTIRRIFL

SEQ ID NO: 91236 - protein, 616 aa, Arabidopsis thaliana
  peptide (1)..(616): Ceres Seq. ID no. 12726910
MYKKKPLILLRRLAQIGTTFSYWFGLRLADEALERSDQMFKVRAAELRKLLVELGPAYVKIAQAVSSRPDLIPPIYLDELSLLQDQITPFSTEVAFNMIEDELGLPIDELFSEISPEPVAAASLGQVYQARLRRSGKVVAVKVQRPGVRAAIALDTLILRYIAGLIKKAGRFNSDLEAVVDEWATSLFKEMDYLNEAQNGIKFRKLYGGIKDVLVPKMYTEYSTSKVLVMEWVEGQKLNEVNDLYLVEVGVYCSFNQLLEYGFYHADPHPGNFLRTYDGQLAYLDFGMMGDFRPELRDGFMEACLHLVNRDFKALAKDFVTLGLLPPTAEKSAVTKALTDVFQDAISRGVRNISFGDLLGDLGKTMYRFKFRIPPYFSLVIRSLAVLEGIAIGISPNYKVLGSTYPWIARKILTDSSPQLKSSLQNLLYEEGVFRIDRLESLLSESLRTETALVQKPVVGTESNIAMKQMLAFTFTEQGSFVREILLREFAKGLDAYGLATLDSFTFSGSGPSSSLTEEDMTNLRTFYRLISLFSGMQKAKSQVKAVSKYGEALTPLDEASLVMYQLPSAQEMLPILSILPELPQESQQRLLQLPGDLVGRLVTRAFARTIRRIFL

SEQ ID NO: 91237 - DNA, 2459 bp, Arabidopsis thaliana
  misc_feature (1)..(2459): Ceres Seq. ID no. 12726915
  misc_feature (1)..(2459): Ortholog of  Ceres SEQ ID NO 15178310 as cited in SEQ ID NO 1089
  misc_feature (1)..(2459): Ortholog of  Ceres SEQ ID NO 15178931 as cited in SEQ ID NO 1125
  misc_feature (1)..(2459): Ortholog of  Ceres SEQ ID NO 13596648 as cited in SEQ ID NO 63080
  misc_feature (1)..(2459): Ortholog of  Ceres SEQ ID NO 14303173 as cited in SEQ ID NO 66550
  misc_feature (1)..(2459): Ortholog of  Ceres SEQ ID NO 13584744 as cited in SEQ ID NO 69137
  misc_feature (1)..(2459): Ortholog of  Ceres SEQ ID NO 15179672 as cited in SEQ ID NO 0
aacaacacactaatcatagtttctctggcaggcttgttgttgcggcttaataaaaagctcttttgttattattacttcacgtagattttccccaaaaagctcttatttttttgtttaaaaaaaaaagtttcatctttattcaacttttgttttacagtgtgtgtgtgagagagagagtgtggtttgattgaggaaagacgacgacgagaacgccggagaattaggattttgattttattttttactctttgtttgttttaatgctaatgggtttttaaaagggttatcgaaaaaatgagtgagtttgtgttgaggttgtctctgtaaagtgttaatggtggtgattttcggaagttagggttttctcggatctgaagagatcaaatcaagattcgaaatttagcattgttgtttgaaatggagtcgagttatgtggtgtttatcttactttcactgatcttacttccgaatcattcactgtggcttgcttctgctaatttggaaggtgatgctttgcatactttgagggttactctagttgatccaaacaatgtcttgcagagctgggatcctacgctagtgaatccttgcacatggttccatgtcacttgcaacaacgagaacagtgtcataagagttgatttggggaatgcagagttatctggccatttagttccagagcttggtgtgctcaagaatttgcagtatttggagctttacagtaacaacataactggcccgattcctagtaatcttggaaatctgacaaacttagtgagtttggatctttacttaaacagcttctccggtcctattccggaatcattgggaaagctttcaaagctgagatttctccggcttaacaacaacagtctcactgggtcaattcctatgtcactgaccaatattactacccttcaagtgttagatctatcaaataacagactctctggttcagttcctgacaatggctccttctcactcttcacacccatcagttttgctaataacttagacctatgtggacctgttacaagtcacccatgtcctggatctcccccgttttctcctccaccaccttttattcaacctcccccagtttccaccccgagtgggtatggtataactggagcaatagctggtggagttgctgcaggtgctgctttgctctttgctgctcctgcaatagcctttgcttggtggcgacgaagaaagccactagatattttcttcgatgtccctgccgaagaagatccagaagttcatctgggacagctcaagaggttttctttgcgggagctacaagtggcgagtgatgggtttagtaacaagaacattttgggcagaggtgggtttgggaaagtctacaagggacgcttggcagacggaactcttgttgctgtcaagagactgaaggaagagcgaactccaggtggagagctccagtttcaaacagaagtagagatgataagtatggcagttcatcgaaacctgttgagattacgaggtttctgtatgacaccgaccgagagattgcttgtgtatccttacatggccaatggaagtgttgcttcgtgtctcagagagaggccaccgtcacaacctccgcttgattggccaacgcggaagagaatcgcgctaggctcagctcgaggtttgtcttacctacatgatcactgcgatccgaagatcattcaccgtgacgtaaaagcagcaaacatcctcttagacgaagaattcgaagcggttgttggagatttcgggttggcaaagctaatggactataaagacactcacgtgacaacagcagtccgtggcaccatcggtcacatcgctccagaatatctctcaaccggaaaatcttcagagaaaaccgacgttttcggatacggaatcatgcttctagaactaatcacaggacaaagagctttcgatctcgctcggctagctaacgacgacgacgtcatgttacttgactgggtgaaaggattgttgaaggagaagaagctagagatgttagtggatccagatcttcaaacaaactacgaggagagagaactggaacaagtgatacaagtggcgttgctatgcacgcaaggatcaccaatggaaagaccaaagatgtctgaagttgtaaggatgctggaaggagatgggcttgcggagaaatgggacgaatggcaaaaagttgagattttgagggaagagattgatttgagtcctaatcctaactctgattggattcttgattctacttacaatttgcacgccgttgagttatctggtccaaggtaaaaaaaaaaaacataaaattattgaacaataacaaattttacaaggtaggtagtttttttacccgtaagttttcgttttttttaattgttaatgtaaaatgaaatctagcattcaaagatttgtgattttgtgctatggttcgattaaaagggaaaaaaattgta

SEQ ID NO: 91238 - protein, 625 aa, Arabidopsis thaliana
  peptide (1)..(625): Ceres Seq. ID no. 12726916
MESSYVVFILLSLILLPNHSLWLASANLEGDALHTLRVTLVDPNNVLQSWDPTLVNPCTWFHVTCNNENSVIRVDLGNAELSGHLVPELGVLKNLQYLELYSNNITGPIPSNLGNLTNLVSLDLYLNSFSGPIPESLGKLSKLRFLRLNNNSLTGSIPMSLTNITTLQVLDLSNNRLSGSVPDNGSFSLFTPISFANNLDLCGPVTSHPCPGSPPFSPPPPFIQPPPVSTPSGYGITGAIAGGVAAGAALLFAAPAIAFAWWRRRKPLDIFFDVPAEEDPEVHLGQLKRFSLRELQVASDGFSNKNILGRGGFGKVYKGRLADGTLVAVKRLKEERTPGGELQFQTEVEMISMAVHRNLLRLRGFCMTPTERLLVYPYMANGSVASCLRERPPSQPPLDWPTRKRIALGSARGLSYLHDHCDPKIIHRDVKAANILLDEEFEAVVGDFGLAKLMDYKDTHVTTAVRGTIGHIAPEYLSTGKSSEKTDVFGYGIMLLELITGQRAFDLARLANDDDVMLLDWVKGLLKEKKLEMLVDPDLQTNYEERELEQVIQVALLCTQGSPMERPKMSEVVRMLEGDGLAEKWDEWQKVEILREEIDLSPNPNSDWILDSTYNLHAVELSGPR

SEQ ID NO: 91239 - protein, 467 aa, Arabidopsis thaliana
  peptide (1)..(467): Ceres Seq. ID no. 12726917
MSLTNITTLQVLDLSNNRLSGSVPDNGSFSLFTPISFANNLDLCGPVTSHPCPGSPPFSPPPPFIQPPPVSTPSGYGITGAIAGGVAAGAALLFAAPAIAFAWWRRRKPLDIFFDVPAEEDPEVHLGQLKRFSLRELQVASDGFSNKNILGRGGFGKVYKGRLADGTLVAVKRLKEERTPGGELQFQTEVEMISMAVHRNLLRLRGFCMTPTERLLVYPYMANGSVASCLRERPPSQPPLDWPTRKRIALGSARGLSYLHDHCDPKIIHRDVKAANILLDEEFEAVVGDFGLAKLMDYKDTHVTTAVRGTIGHIAPEYLSTGKSSEKTDVFGYGIMLLELITGQRAFDLARLANDDDVMLLDWVKGLLKEKKLEMLVDPDLQTNYEERELEQVIQVALLCTQGSPMERPKMSEVVRMLEGDGLAEKWDEWQKVEILREEIDLSPNPNSDWILDSTYNLHAVELSGPR

SEQ ID NO: 91240 - DNA, 1413 bp, Arabidopsis thaliana
  misc_feature (1)..(1413): Ceres Seq. ID no. 12726922
  misc_feature (1)..(1413): Ortholog of  Ceres SEQ ID NO 13599231 as cited in SEQ ID NO 984
atgaaatccattttccgttccatttctatccgccgtcattccggccaccgaaccttcgccgatacgtcggcggtggaagatacctacaaattcgtaagagacagaggactcgaccacgcggtagaaagagagaagaatctcagaccacttctcagtatcaaagacctaatcagatcggagccagcaaaatcagttccgatctcagttatcacctcacagaaagattcactacgagttcctcttcgtccaatcgagttcatacgtagcttcccttccgttttccaagagtttctccccggaggaattggtattcatcctcacatcagcctcacgccggagattctaaaccacgatgccgatgagcaattggtttacggtagtgagacttataagcaaggattagctgataggcttttgaaattgctgatgattaataggattaacaaaattccattagagattctagatttgttgaaatgggatttaggtttacctaaggattatgttgaaactatggtacctgagtttcctgattactttagagttatcaaatcgaagttaagaggatgtagtggtgagctagagctggtttgttggagcaatgagcatgctgtatctgtgttggagaagaaagctagaacattacgtaaaggagagtatacgaaaggatcggcgattgcttttccgatgaagttttcgaatggttttgtggttgataagaagatgaagaaatggattgatgattggcagaagttgccgtatatttctccttatgagaatgcacttcatctgtctgcgactagcgatgagtctgataagtgggcggcggctgttttgcacgagatcatgaacctttttgtgtcgaagaaggttgagaaagatgctattttgcatcttggtgagtttatgggattgagatcgaggtttaagagagttctccataatcatcctggtatcttttacttgtctagtaagcttaggactcacactgtggttcttagagatggttacaagagggggatgttgatagagagtaatgaattggtgacaagcaggaaccgttacatgaaactcatgaatacagttaagaaagataacaaggcagtttcttcgagcagcaagaaagaagataaggggaaagtggaaggggaagtttgtgatactgatgcgaaggctgagaatgatgacatttctggttctgatgtcgaggatgatcgtcaaggagactttgttgatgatgacgaggacgatgatgaagtggatcaaaaccaggatctggagcgtggtcgtagaaattcaagtccaagatctggtaggaggagttttggaaactcaggttcaagagataaggcacaatcgaggcggagcaagatcagtttaaagactgagaagaagaggagtcggatgtattag

SEQ ID NO: 91241 - protein, 470 aa, Arabidopsis thaliana
  peptide (1)..(470): Ceres Seq. ID no. 12726923
MKSIFRSISIRRHSGHRTFADTSAVEDTYKFVRDRGLDHAVEREKNLRPLLSIKDLIRSEPAKSVPISVITSQKDSLRVPLRPIEFIRSFPSVFQEFLPGGIGIHPHISLTPEILNHDADEQLVYGSETYKQGLADRLLKLLMINRINKIPLEILDLLKWDLGLPKDYVETMVPEFPDYFRVIKSKLRGCSGELELVCWSNEHAVSVLEKKARTLRKGEYTKGSAIAFPMKFSNGFVVDKKMKKWIDDWQKLPYISPYENALHLSATSDESDKWAAAVLHEIMNLFVSKKVEKDAILHLGEFMGLRSRFKRVLHNHPGIFYLSSKLRTHTVVLRDGYKRGMLIESNELVTSRNRYMKLMNTVKKDNKAVSSSSKKEDKGKVEGEVCDTDAKAENDDISGSDVEDDRQGDFVDDDEDDDEVDQNQDLERGRRNSSPRSGRRSFGNSGSRDKAQSRRSKISLKTEKKRSRMY

SEQ ID NO: 91242 - protein, 328 aa, Arabidopsis thaliana
  peptide (1)..(328): Ceres Seq. ID no. 12726924
MINRINKIPLEILDLLKWDLGLPKDYVETMVPEFPDYFRVIKSKLRGCSGELELVCWSNEHAVSVLEKKARTLRKGEYTKGSAIAFPMKFSNGFVVDKKMKKWIDDWQKLPYISPYENALHLSATSDESDKWAAAVLHEIMNLFVSKKVEKDAILHLGEFMGLRSRFKRVLHNHPGIFYLSSKLRTHTVVLRDGYKRGMLIESNELVTSRNRYMKLMNTVKKDNKAVSSSSKKEDKGKVEGEVCDTDAKAENDDISGSDVEDDRQGDFVDDDEDDDEVDQNQDLERGRRNSSPRSGRRSFGNSGSRDKAQSRRSKISLKTEKKRSRMY

SEQ ID NO: 91243 - protein, 299 aa, Arabidopsis thaliana
  peptide (1)..(299): Ceres Seq. ID no. 12726925
MVPEFPDYFRVIKSKLRGCSGELELVCWSNEHAVSVLEKKARTLRKGEYTKGSAIAFPMKFSNGFVVDKKMKKWIDDWQKLPYISPYENALHLSATSDESDKWAAAVLHEIMNLFVSKKVEKDAILHLGEFMGLRSRFKRVLHNHPGIFYLSSKLRTHTVVLRDGYKRGMLIESNELVTSRNRYMKLMNTVKKDNKAVSSSSKKEDKGKVEGEVCDTDAKAENDDISGSDVEDDRQGDFVDDDEDDDEVDQNQDLERGRRNSSPRSGRRSFGNSGSRDKAQSRRSKISLKTEKKRSRMY

SEQ ID NO: 91244 - DNA, 1489 bp, Arabidopsis thaliana
  misc_feature (1)..(1489): Ceres Seq. ID no. 12726940
  misc_feature (1)..(1489): Ortholog of  Ceres SEQ ID NO 13654285 as cited in SEQ ID NO 68661
atagtttcttcctgcaatcacaccattcatatccacttgtttttatccttctcaatcattctctcttctctctccctctctgttctcaaactccattttagtagcaagcttagatctcctccttccacagtcactttctcttctttctctgcttttgtttcttcaatcgatttgcttcagatttccccagattatatagaattcgatgtcaagacacagaattcacatgggttttgtctaaaaatcataaaaatcatatctttttacggatttgaagatgaatcagaattcctctgttgcggaggcgacgcttcagcttaattccggtgaaaaaccatcgccgggatcgattccgtttatctcctctggtcaacacggaaacataagcacttcagcgacgagttcgacaagcacaagctcaggtagtgctcttgccgtagttaaatccgccgtgaaaaaaccaactaaagatcggcatactaaagtcgatggtcgtggacggcgaattcgtatgccggcgatgtgcgccgctagagtttttcagttaacaagagagttaggtcataaatctgatggagaaaccatcgagtggcttctccaacaagctgagccagctatcatcgcttctactggtactggtacgatcccggcgaatttctcaacacttaacgcttctttacgcagtggtggtggctccaccttgttttctcaggcgtcgaaatcttcttcttcgccactctcgtttcatagcactggaatgtctctttatgaagacaataacggtactaacggatcatcggtagatccttctaggaagttactgaattcagccgcaaacgcggctgttttcggttttcatcatcagatgtatccaccaataatgtcgacggagagaaatccgaacactttagtgaaaccttatagagaagattactttaaggagccgagttctgcagcggaaccaagcgagagttctcagaaagcgagtcagtttcaggagcaagagttagctcagggtcgtgggacggctaatgtggtgcctcaacctatgtgggcggttgcgccagggactacgaatggaggtagtgcgttctggatgcttccgatgagcggttcgggtgggcgggagcagatgcagcagcagcctggtcaccaaatgtgggcgtttaatccagggaattatccagttgggacaggacgagtagtaactgcaccaatggggtcaatgatgttgggaggtcaacagctaggattaggagtggcagagggcaacatggcggctgcaatgcgtggcagtagaggcgatggtttggccatgactctagatcaacatcagcatcagctccaacatcaagagccaaaccagagtcaagctagtgaaaatggtggtgatgacaaaaagtgatcaatccttttctctagttccacctcatgacattgtaatgaccacactcgagtttgaagattcgcaatctgcggtttggctatt

SEQ ID NO: 91245 - protein, 375 aa, Arabidopsis thaliana
  peptide (1)..(375): Ceres Seq. ID no. 12726941
MNQNSSVAEATLQLNSGEKPSPGSIPFISSGQHGNISTSATSSTSTSSGSALAVVKSAVKKPTKDRHTKVDGRGRRIRMPAMCAARVFQLTRELGHKSDGETIEWLLQQAEPAIIASTGTGTIPANFSTLNASLRSGGGSTLFSQASKSSSSPLSFHSTGMSLYEDNNGTNGSSVDPSRKLLNSAANAAVFGFHHQMYPPIMSTERNPNTLVKPYREDYFKEPSSAAEPSESSQKASQFQEQELAQGRGTANVVPQPMWAVAPGTTNGGSAFWMLPMSGSGGREQMQQQPGHQMWAFNPGNYPVGTGRVVTAPMGSMMLGGQQLGLGVAEGNMAAAMRGSRGDGLAMTLDQHQHQLQHQEPNQSQASENGGDDKK

SEQ ID NO: 91246 - protein, 297 aa, Arabidopsis thaliana
  peptide (1)..(297): Ceres Seq. ID no. 12726942
MPAMCAARVFQLTRELGHKSDGETIEWLLQQAEPAIIASTGTGTIPANFSTLNASLRSGGGSTLFSQASKSSSSPLSFHSTGMSLYEDNNGTNGSSVDPSRKLLNSAANAAVFGFHHQMYPPIMSTERNPNTLVKPYREDYFKEPSSAAEPSESSQKASQFQEQELAQGRGTANVVPQPMWAVAPGTTNGGSAFWMLPMSGSGGREQMQQQPGHQMWAFNPGNYPVGTGRVVTAPMGSMMLGGQQLGLGVAEGNMAAAMRGSRGDGLAMTLDQHQHQLQHQEPNQSQASENGGDDKK

SEQ ID NO: 91247 - protein, 294 aa, Arabidopsis thaliana
  peptide (1)..(294): Ceres Seq. ID no. 12726943
MCAARVFQLTRELGHKSDGETIEWLLQQAEPAIIASTGTGTIPANFSTLNASLRSGGGSTLFSQASKSSSSPLSFHSTGMSLYEDNNGTNGSSVDPSRKLLNSAANAAVFGFHHQMYPPIMSTERNPNTLVKPYREDYFKEPSSAAEPSESSQKASQFQEQELAQGRGTANVVPQPMWAVAPGTTNGGSAFWMLPMSGSGGREQMQQQPGHQMWAFNPGNYPVGTGRVVTAPMGSMMLGGQQLGLGVAEGNMAAAMRGSRGDGLAMTLDQHQHQLQHQEPNQSQASENGGDDKK

SEQ ID NO: 91248 - DNA, 1500 bp, Arabidopsis thaliana
  misc_feature (1)..(1500): Ceres Seq. ID no. 12726951
  misc_feature (1)..(1500): Ortholog of  Ceres SEQ ID NO 12623695 as cited in SEQ ID NO 61286
atgtctttaagcctttacgacagtgcacattcactagacggtaagtctggttgggatactccggttttctccatgaaagactcaatggatcgtaacccgatggtcacagaagcttgggaggctctctgccagtctcaggtctacttccggggaaaaccggtaggaaccatcgccgcctacgaccatgcttcagaagaggtcttgaactatgatcaggtgttcgtacgtgattttgtaccgagtgctctagcatttctgatgaatggagagcctgaaattgtgaagaactttctcctgaagacacttcatattcagggacaagacaaaatgatcgacaagttcaagcttggtgacggcgcaatgccagcaagctttaaagttctacataatcctatcaagaagacggatacgattatcgctgactttggagaaagcgccatcgggagagtggctccagtcgactctggcttctggtggatcattctcctccgagcttacactaagtctacaggagatcattctctagcagagagaccagagtgccaaaagggaatgagactcatactttctttgtgtctctctgagggttttgatacttttccgactttgctttgcgcagatggttgctcgatggtcgatcgtagaatgggcatttacggctatccgattgagatccaagccctctttttcatggctcttcgatccgcactctcaatgctgaaacatgattctgagggtaaagagttcatggaaaagatagtgaagcggctgcacgcactaagcttccatatgagaagctacttttggctcgatttccagcagctcaatgacatttaccgttacaagacggaggagtactctcacaccgcggtaaacaagttcaacgtaatccctgactccatccctgattggatctttgacttcatgcctctccgaggtggctacttcgttggaaatgtcagtcccgcccgcatggacttcaggtggtttgcgttaggaaattgtatcgcaattctttcctcattggccacaccagagcagtccatggcgatcatggacctgattgaggcccggtgggaagaacttgtgggagagatgccgttgaagatatgttatccggcgatggagagtcacgagtgggggattgtcactggctgtgaccctaagaacacaaggtggagctaccacaacggaggctcttggccagtgcttctatggttactaacggcggcaagcataaagactggacggccacaaatagcacgacgggctatagagttggcggaggcacgactgttgaaggatggatggccggagtactacgacggaaagtctggaagattcatcggaaaacaggctaggaaatctcagacatggtcaatcgctggctatttggtcgccaagatgatgatggatgatccaacgcatgtgggaatgatctcaatggaagaagagaaacatatgaaacctcctcttagaagatcttcttcttggacttaa

SEQ ID NO: 91249 - protein, 499 aa, Arabidopsis thaliana
  peptide (1)..(499): Ceres Seq. ID no. 12726952
MSLSLYDSAHSLDGKSGWDTPVFSMKDSMDRNPMVTEAWEALCQSQVYFRGKPVGTIAAYDHASEEVLNYDQVFVRDFVPSALAFLMNGEPEIVKNFLLKTLHIQGQDKMIDKFKLGDGAMPASFKVLHNPIKKTDTIIADFGESAIGRVAPVDSGFWWIILLRAYTKSTGDHSLAERPECQKGMRLILSLCLSEGFDTFPTLLCADGCSMVDRRMGIYGYPIEIQALFFMALRSALSMLKHDSEGKEFMEKIVKRLHALSFHMRSYFWLDFQQLNDIYRYKTEEYSHTAVNKFNVIPDSIPDWIFDFMPLRGGYFVGNVSPARMDFRWFALGNCIAILSSLATPEQSMAIMDLIEARWEELVGEMPLKICYPAMESHEWGIVTGCDPKNTRWSYHNGGSWPVLLWLLTAASIKTGRPQIARRAIELAEARLLKDGWPEYYDGKSGRFIGKQARKSQTWSIAGYLVAKMMMDDPTHVGMISMEEEKHMKPPLRRSSSWT

SEQ ID NO: 91250 - protein, 475 aa, Arabidopsis thaliana
  peptide (1)..(475): Ceres Seq. ID no. 12726953
MKDSMDRNPMVTEAWEALCQSQVYFRGKPVGTIAAYDHASEEVLNYDQVFVRDFVPSALAFLMNGEPEIVKNFLLKTLHIQGQDKMIDKFKLGDGAMPASFKVLHNPIKKTDTIIADFGESAIGRVAPVDSGFWWIILLRAYTKSTGDHSLAERPECQKGMRLILSLCLSEGFDTFPTLLCADGCSMVDRRMGIYGYPIEIQALFFMALRSALSMLKHDSEGKEFMEKIVKRLHALSFHMRSYFWLDFQQLNDIYRYKTEEYSHTAVNKFNVIPDSIPDWIFDFMPLRGGYFVGNVSPARMDFRWFALGNCIAILSSLATPEQSMAIMDLIEARWEELVGEMPLKICYPAMESHEWGIVTGCDPKNTRWSYHNGGSWPVLLWLLTAASIKTGRPQIARRAIELAEARLLKDGWPEYYDGKSGRFIGKQARKSQTWSIAGYLVAKMMMDDPTHVGMISMEEEKHMKPPLRRSSSWT

SEQ ID NO: 91251 - protein, 471 aa, Arabidopsis thaliana
  peptide (1)..(471): Ceres Seq. ID no. 12726954
MDRNPMVTEAWEALCQSQVYFRGKPVGTIAAYDHASEEVLNYDQVFVRDFVPSALAFLMNGEPEIVKNFLLKTLHIQGQDKMIDKFKLGDGAMPASFKVLHNPIKKTDTIIADFGESAIGRVAPVDSGFWWIILLRAYTKSTGDHSLAERPECQKGMRLILSLCLSEGFDTFPTLLCADGCSMVDRRMGIYGYPIEIQALFFMALRSALSMLKHDSEGKEFMEKIVKRLHALSFHMRSYFWLDFQQLNDIYRYKTEEYSHTAVNKFNVIPDSIPDWIFDFMPLRGGYFVGNVSPARMDFRWFALGNCIAILSSLATPEQSMAIMDLIEARWEELVGEMPLKICYPAMESHEWGIVTGCDPKNTRWSYHNGGSWPVLLWLLTAASIKTGRPQIARRAIELAEARLLKDGWPEYYDGKSGRFIGKQARKSQTWSIAGYLVAKMMMDDPTHVGMISMEEEKHMKPPLRRSSSWT

SEQ ID NO: 91252 - DNA, 1747 bp, Arabidopsis thaliana
  misc_feature (1)..(1747): Ceres Seq. ID no. 12726967
  misc_feature (1)..(1747): Ortholog of  Ceres SEQ ID NO 12460981 as cited in SEQ ID NO 65146
aggaacaacaatcacagaacaagacggcacaagtaaaaaatggctgaagaacctactactaccactctcgttacaccggaaaagctaccttctccgagcctcacgccttctgaagtatctgaatctactcaagatgccctaccgacagagacagaaactctggagaaagtgactgagactaatccaccggaaactgcagataccaccaccaagccagaagaagaaaccgcggcagagcatcatccaccgacagtgacggaaacagaaactgcatcgacggagaaacaagaggttaaagacgaagcatcgcagaaagaagtagctgaagagaaaaagagtatgattccacagaatcttggttcattcaaagaagaaagcagcaaactttctgatctatctaattccgagaagaaatcactcgatgaactaaaacatctagttcgagaagctctagacaatcaccaattcaccaacacaccagaagaagtcaagatttgggggattccattacttgaagacgatagaagcgacgtcgttttgttaaaattcctaagagctagggagttcaaggtgaaagattcgtttgctatgctcaagaacacaatcaagtggagaaaggagttcaagatcgatgaattggtcgaggaagatcttgtggatgatcttgacaaggttgtgtttatgcatggacatgaccgagaaggtcaccctgtttgttacaatgtctatggtgagtttcagaacaaggagctttataataagacgttttctgatgaggaaaagaggaaacatttcttgaggactaggattcagttcttggagaggagtataaggaagctagattttagctctggtggggtttctactatttttcaggttaatgatatgaagaattctccggggttagggaagaaagagcttagatcagctactaagcaagctgttgagttgcttcaggacaattaccctgagtttgtcttcaaacaggcttttatcaatgttccttggtggtaccttgtgttttatactgtgattggtccgttcatgacaccaagatcaaagagcaagcttgtgtttgctggtccttcgcgttcagctgaaaccctattcaaatacatatcacccgagcaagttccagtacaatatggtggattgagtgttgatccttgcgactgcaatccagacttttcgttggaagattcagcctctgagatcactgttaagcccggaacaaaacaaactgttgagatcataatctatgagaaatgtgaacttgtgtgggagataagggtaactggatgggaagtgagctacaaggctgaatttgtgccggaagagaaagatgcttacacggtggttatacaaaaaccgaggaagatgagaccatccgatgaaccggtgttaacccatagcttcaaagtgaatgagcttggcaaggttttactcacagtagacaacccaacctctaagaagaagaagctcgtttacaggttcaatgtcaaacctctctaagttttaagaaccaaatgaaaaatgtttccaaactttgttttattttacaaaaaatgttgtttctagacttttgtttttcttgaaacagaagtgagatatcttatgtgtgtttgtatatgtgagtgtttactttatcatatcatataaattatgtgtggtttattttgctcttgtaatcaatcatttgtggagaatatattactacatgactttatgaaataaagatctttaaatc

SEQ ID NO: 91253 - protein, 490 aa, Arabidopsis thaliana
  peptide (1)..(490): Ceres Seq. ID no. 12726968
MAEEPTTTTLVTPEKLPSPSLTPSEVSESTQDALPTETETLEKVTETNPPETADTTTKPEEETAAEHHPPTVTETETASTEKQEVKDEASQKEVAEEKKSMIPQNLGSFKEESSKLSDLSNSEKKSLDELKHLVREALDNHQFTNTPEEVKIWGIPLLEDDRSDVVLLKFLRAREFKVKDSFAMLKNTIKWRKEFKIDELVEEDLVDDLDKVVFMHGHDREGHPVCYNVYGEFQNKELYNKTFSDEEKRKHFLRTRIQFLERSIRKLDFSSGGVSTIFQVNDMKNSPGLGKKELRSATKQAVELLQDNYPEFVFKQAFINVPWWYLVFYTVIGPFMTPRSKSKLVFAGPSRSAETLFKYISPEQVPVQYGGLSVDPCDCNPDFSLEDSASEITVKPGTKQTVEIIIYEKCELVWEIRVTGWEVSYKAEFVPEEKDAYTVVIQKPRKMRPSDEPVLTHSFKVNELGKVLLTVDNPTSKKKKLVYRFNVKPL

SEQ ID NO: 91254 - protein, 390 aa, Arabidopsis thaliana
  peptide (1)..(390): Ceres Seq. ID no. 12726969
MIPQNLGSFKEESSKLSDLSNSEKKSLDELKHLVREALDNHQFTNTPEEVKIWGIPLLEDDRSDVVLLKFLRAREFKVKDSFAMLKNTIKWRKEFKIDELVEEDLVDDLDKVVFMHGHDREGHPVCYNVYGEFQNKELYNKTFSDEEKRKHFLRTRIQFLERSIRKLDFSSGGVSTIFQVNDMKNSPGLGKKELRSATKQAVELLQDNYPEFVFKQAFINVPWWYLVFYTVIGPFMTPRSKSKLVFAGPSRSAETLFKYISPEQVPVQYGGLSVDPCDCNPDFSLEDSASEITVKPGTKQTVEIIIYEKCELVWEIRVTGWEVSYKAEFVPEEKDAYTVVIQKPRKMRPSDEPVLTHSFKVNELGKVLLTVDNPTSKKKKLVYRFNVKPL

SEQ ID NO: 91255 - protein, 307 aa, Arabidopsis thaliana
  peptide (1)..(307): Ceres Seq. ID no. 12726970
MLKNTIKWRKEFKIDELVEEDLVDDLDKVVFMHGHDREGHPVCYNVYGEFQNKELYNKTFSDEEKRKHFLRTRIQFLERSIRKLDFSSGGVSTIFQVNDMKNSPGLGKKELRSATKQAVELLQDNYPEFVFKQAFINVPWWYLVFYTVIGPFMTPRSKSKLVFAGPSRSAETLFKYISPEQVPVQYGGLSVDPCDCNPDFSLEDSASEITVKPGTKQTVEIIIYEKCELVWEIRVTGWEVSYKAEFVPEEKDAYTVVIQKPRKMRPSDEPVLTHSFKVNELGKVLLTVDNPTSKKKKLVYRFNVKPL

SEQ ID NO: 91256 - DNA, 1902 bp, Arabidopsis thaliana
  misc_feature (1)..(1902): Ceres Seq. ID no. 12727018
  misc_feature (1)..(1902): Ortholog of  Ceres SEQ ID NO 13598865 as cited in SEQ ID NO 0
atggaaccacatgaccaaactcacggcggcgacggaggagaaggagagaactgttcagtttccggattcgattcagctgaaaaagtcatcatccgatgggacgcgacggcgtcagaagaagcaagagagaagatgatattcaacgatccacaagaagttaacctttacctcaacgccgtcgatgaaatccagaaatatgtatcttccggcggagagattgagaatcgagctaattcagctatccagatagctatggctcgtcttgaagacgagttcaggaatattctcgtttctcatagttctccgatcaactctgattcgttaatgctgtcttcttcatcttcttctcaccttgaggttgatgaagatggaagtagtagtaataatggtaacgaagaagatgatcaacaagaggaagaagaaacggatcttctgaaacgatccggttcaagtgcaagtaccggttcagcgacggttcgattaccaaccggaagaggtagttacagtagatccaccagtagtatacgcgagatcgagctgattccgatcgaatcggtgattcatctgagctggattgctcggcgaatggtctccgccggttatctccgtgaatgtattcaagtctacggaagcgttcgcaaatccgccgtcgattcaagtttccgacggttagggatcgagaaactcagcatcggagatgttcagaggctaaattgggaagcgcttgagcagaagatccgtcgttggatccgagcagctaagatctgtgtgagagttgtgttcgcaagcgagaaattgctctgtgagcatgtttttgaaagcgttggagctgtcaatatccacgaagcttgtttcatggaaacagtcaaaggtccggcgattcagctttttaacttcgcggaggcgattagtatcagtcggagatcgccggagaagctttttaagatccttgatctacacgacgctttgattgagcttttgcctgatatcgagtcagttttcgatctgaaatcttcagattcgattagagttcaagcggcggagatattatcgagattagcggaagcggcgagagggatattatcggaattcgaaaacgccgttcttcgtgaaccttctagagttcctgttcctggaggtacgatacatccattgacgaggtatgtcatgaactacataagcttgatctcagagtatagaccaacgttgatcgatctcatcatgtcgaaaccatcgagaaacgcaacggattcaaacactccagatttcgatttctctgagttagagaataacaaaggtccattagcacttcatttgatttggatcatagtgatattgcaattcaatctcgaaggcaaatcaaagtactataaaaacgcagctttatcacatctctttatcatgaacaacgcacattacattgttcagaagattaaagggtcaccggagctacgggaaatgattggtgatctttacttgaggaagctaacgggtaagtttaggcaagctgcgacgtattaccaaagagctgcttgggttaaagtcttgtattgtttaagagatgaaggtttacatacgaaaggaagtttctcatcaggtgtttcgagaagtgcgttgagagagaggtttaaatcttttaatgctttgtttgaggaagttcatagggttcaatcacaatggttggttccggattctcagctgagggaagagttgaagatttcgatattggagaagcttagtcccgcttatagatcgtttcttgggaggttcaggagtcatatagagagcgggaaacatccggagaattacatcaagatctcagtcgaagatctagagaccgaggttcttgatttgttcgaggggtattctgcaactcagcatctgagaagacgatccgagtga

SEQ ID NO: 91257 - protein, 633 aa, Arabidopsis thaliana
  peptide (1)..(633): Ceres Seq. ID no. 12727019
MEPHDQTHGGDGGEGENCSVSGFDSAEKVIIRWDATASEEAREKMIFNDPQEVNLYLNAVDEIQKYVSSGGEIENRANSAIQIAMARLEDEFRNILVSHSSPINSDSLMLSSSSSSHLEVDEDGSSSNNGNEEDDQQEEEETDLLKRSGSSASTGSATVRLPTGRGSYSRSTSSIREIELIPIESVIHLSWIARRMVSAGYLRECIQVYGSVRKSAVDSSFRRLGIEKLSIGDVQRLNWEALEQKIRRWIRAAKICVRVVFASEKLLCEHVFESVGAVNIHEACFMETVKGPAIQLFNFAEAISISRRSPEKLFKILDLHDALIELLPDIESVFDLKSSDSIRVQAAEILSRLAEAARGILSEFENAVLREPSRVPVPGGTIHPLTRYVMNYISLISEYRPTLIDLIMSKPSRNATDSNTPDFDFSELENNKGPLALHLIWIIVILQFNLEGKSKYYKNAALSHLFIMNNAHYIVQKIKGSPELREMIGDLYLRKLTGKFRQAATYYQRAAWVKVLYCLRDEGLHTKGSFSSGVSRSALRERFKSFNALFEEVHRVQSQWLVPDSQLREELKISILEKLSPAYRSFLGRFRSHIESGKHPENYIKISVEDLETEVLDLFEGYSATQHLRRRSE

SEQ ID NO: 91258 - protein, 589 aa, Arabidopsis thaliana
  peptide (1)..(589): Ceres Seq. ID no. 12727020
MIFNDPQEVNLYLNAVDEIQKYVSSGGEIENRANSAIQIAMARLEDEFRNILVSHSSPINSDSLMLSSSSSSHLEVDEDGSSSNNGNEEDDQQEEEETDLLKRSGSSASTGSATVRLPTGRGSYSRSTSSIREIELIPIESVIHLSWIARRMVSAGYLRECIQVYGSVRKSAVDSSFRRLGIEKLSIGDVQRLNWEALEQKIRRWIRAAKICVRVVFASEKLLCEHVFESVGAVNIHEACFMETVKGPAIQLFNFAEAISISRRSPEKLFKILDLHDALIELLPDIESVFDLKSSDSIRVQAAEILSRLAEAARGILSEFENAVLREPSRVPVPGGTIHPLTRYVMNYISLISEYRPTLIDLIMSKPSRNATDSNTPDFDFSELENNKGPLALHLIWIIVILQFNLEGKSKYYKNAALSHLFIMNNAHYIVQKIKGSPELREMIGDLYLRKLTGKFRQAATYYQRAAWVKVLYCLRDEGLHTKGSFSSGVSRSALRERFKSFNALFEEVHRVQSQWLVPDSQLREELKISILEKLSPAYRSFLGRFRSHIESGKHPENYIKISVEDLETEVLDLFEGYSATQHLRRRSE

SEQ ID NO: 91259 - protein, 549 aa, Arabidopsis thaliana
  peptide (1)..(549): Ceres Seq. ID no. 12727021
MARLEDEFRNILVSHSSPINSDSLMLSSSSSSHLEVDEDGSSSNNGNEEDDQQEEEETDLLKRSGSSASTGSATVRLPTGRGSYSRSTSSIREIELIPIESVIHLSWIARRMVSAGYLRECIQVYGSVRKSAVDSSFRRLGIEKLSIGDVQRLNWEALEQKIRRWIRAAKICVRVVFASEKLLCEHVFESVGAVNIHEACFMETVKGPAIQLFNFAEAISISRRSPEKLFKILDLHDALIELLPDIESVFDLKSSDSIRVQAAEILSRLAEAARGILSEFENAVLREPSRVPVPGGTIHPLTRYVMNYISLISEYRPTLIDLIMSKPSRNATDSNTPDFDFSELENNKGPLALHLIWIIVILQFNLEGKSKYYKNAALSHLFIMNNAHYIVQKIKGSPELREMIGDLYLRKLTGKFRQAATYYQRAAWVKVLYCLRDEGLHTKGSFSSGVSRSALRERFKSFNALFEEVHRVQSQWLVPDSQLREELKISILEKLSPAYRSFLGRFRSHIESGKHPENYIKISVEDLETEVLDLFEGYSATQHLRRRSE

SEQ ID NO: 91260 - DNA, 567 bp, Arabidopsis thaliana
  misc_feature (1)..(567): Ceres Seq. ID no. 12727022
  misc_feature (1)..(567): Ortholog of  Ceres SEQ ID NO 13662513 as cited in SEQ ID NO 63303
atggcgaggatcatcagaagaccgttaaatttgacggcggccgtccggttccgactttctccgttgtctccattctccggtaactctggttctattaactcggaaacgactagttggtctgagttaattcgagtaccgagtttagtcgagggatgcgattacaagcactggctggttctcatgaagcctcccaatggatacccaactcgaaatcacattgtccaaagctttgtcgaaaccctagccatggctctagggagcgaagaagaagctaagagatcgatatactctgtatctacaaagtactactatgcatttggctgcaggattcatgaacctttgacttacaagattagatctctgcctgatgttaaatgggttttaccagattcgtttatagtggatggtgacaatagatacggaggagagccgtttgtcgatggagaagttgttccgtatgatgagaagtatcatgcggactggctacgagatcaaactgatgaggatgctaaaagcggagtagtcaaaaagaagcataggaggaaaagaaagaagaagttgatttaa

SEQ ID NO: 91261 - protein, 188 aa, Arabidopsis thaliana
  peptide (1)..(188): Ceres Seq. ID no. 12727023
MARIIRRPLNLTAAVRFRLSPLSPFSGNSGSINSETTSWSELIRVPSLVEGCDYKHWLVLMKPPNGYPTRNHIVQSFVETLAMALGSEEEAKRSIYSVSTKYYYAFGCRIHEPLTYKIRSLPDVKWVLPDSFIVDGDNRYGGEPFVDGEVVPYDEKYHADWLRDQTDEDAKSGVVKKKHRRKRKKKLI

SEQ ID NO: 91262 - protein, 128 aa, Arabidopsis thaliana
  peptide (1)..(128): Ceres Seq. ID no. 12727024
MKPPNGYPTRNHIVQSFVETLAMALGSEEEAKRSIYSVSTKYYYAFGCRIHEPLTYKIRSLPDVKWVLPDSFIVDGDNRYGGEPFVDGEVVPYDEKYHADWLRDQTDEDAKSGVVKKKHRRKRKKKLI

SEQ ID NO: 91263 - protein, 106 aa, Arabidopsis thaliana
  peptide (1)..(106): Ceres Seq. ID no. 12727025
MALGSEEEAKRSIYSVSTKYYYAFGCRIHEPLTYKIRSLPDVKWVLPDSFIVDGDNRYGGEPFVDGEVVPYDEKYHADWLRDQTDEDAKSGVVKKKHRRKRKKKLI

SEQ ID NO: 91264 - DNA, 1448 bp, Arabidopsis thaliana
  misc_feature (1)..(1448): Ceres Seq. ID no. 12727060
  misc_feature (1)..(1448): Ortholog of  Ceres SEQ ID NO 14303137 as cited in SEQ ID NO 53594
  misc_feature (1)..(1448): Ortholog of  Ceres SEQ ID NO 13585454 as cited in SEQ ID NO 65280
  misc_feature (1)..(1448): Ortholog of  Ceres SEQ ID NO 14307889 as cited in SEQ ID NO 67245
aactttcaagattcaacaaaacccactttctatagttttatatgttcatttttttctgctaaagtatttttatatgttcatatttctcttttgtgccatctttttaataatttaatcttcctacagaagataatctccaacaaaagttttttcttacaagaaagattccgagaagtcttttgtgttttcaacaaactccagggttttttcaatgaacatgagcaataaacgtaatcagcaaccttcgtatattgctgatcatttcagcagtttggatcaggtgataacttctctgagagaagctggacttgaatcttcaaatctgattctaggaattgactttaccaagagcaatgagtggacagggagatattcattcaatagaaaaagccttcatgccattggtaaaagacagaatccatatgagaaagcaatatcgattattggtcgtactttgtctccctttgatgaagatgatcttataccttgtttcggttttggcgatgtaacaacgcgagatcaatatgtattcagcttttatcccgagaacaaaagctgcgacggattggaaaacgcagttaaaagatatagagagattgtcccacatttgaagttgtccggtcctacctcgtttgcaccggttattgatgctgccatcaacatagttgagcagaacaatatgcaataccatgttctcgtcattatcgcagatggtcaggtcacaagaaatccagatgtgccgcttggtcgacttagtccacaggaagaagctactatgaactcgataatggcagcgagccattacccattgtcgatagtcttggttggagtaggagatggaccatgggacacaatgaaacaattcgatgacaatattcctcaccgtgaattcgataacttccagtttgtaaacttcacgaagataatgtcagagcacaaagatgcggctaagaaggaggctgctttcgcactcgcagctctcatggagatcccttttcaatacaaggctacattaagtctcaatagaaaaccagtgcgcagttcccatcagcaccacaagccactcccgccaccaccagaggttatagagcgtgacaatgctgttagatcggtgccaaatcagatgacagaaactgcagagaaaagtgacagactcgctccttccacagtgccggtatgcccgatttgcttgacgaatccaaaggacatggcttttagctgcggtcacacgacatgcaaggaatgcggagttgttatcacaacatgcccactatgcagacaaccaataacaacaaggataaggctgtacacttgactcggaaaaattcttagagatgagacaaattatatggttaagcacttgagcttcatgtttatacttctgtagaacattgtacagtccaagcagaagaattgtaaagcataaatctcgagttgtagttcatatg

SEQ ID NO: 91265 - protein, 367 aa, Arabidopsis thaliana
  peptide (1)..(367): Ceres Seq. ID no. 12727061
MNMSNKRNQQPSYIADHFSSLDQVITSLREAGLESSNLILGIDFTKSNEWTGRYSFNRKSLHAIGKRQNPYEKAISIIGRTLSPFDEDDLIPCFGFGDVTTRDQYVFSFYPENKSCDGLENAVKRYREIVPHLKLSGPTSFAPVIDAAINIVEQNNMQYHVLVIIADGQVTRNPDVPLGRLSPQEEATMNSIMAASHYPLSIVLVGVGDGPWDTMKQFDDNIPHREFDNFQFVNFTKIMSEHKDAAKKEAAFALAALMEIPFQYKATLSLNRKPVRSSHQHHKPLPPPPEVIERDNAVRSVPNQMTETAEKSDRLAPSTVPVCPICLTNPKDMAFSCGHTTCKECGVVITTCPLCRQPITTRIRLYT

SEQ ID NO: 91266 - protein, 365 aa, Arabidopsis thaliana
  peptide (1)..(365): Ceres Seq. ID no. 12727062
MSNKRNQQPSYIADHFSSLDQVITSLREAGLESSNLILGIDFTKSNEWTGRYSFNRKSLHAIGKRQNPYEKAISIIGRTLSPFDEDDLIPCFGFGDVTTRDQYVFSFYPENKSCDGLENAVKRYREIVPHLKLSGPTSFAPVIDAAINIVEQNNMQYHVLVIIADGQVTRNPDVPLGRLSPQEEATMNSIMAASHYPLSIVLVGVGDGPWDTMKQFDDNIPHREFDNFQFVNFTKIMSEHKDAAKKEAAFALAALMEIPFQYKATLSLNRKPVRSSHQHHKPLPPPPEVIERDNAVRSVPNQMTETAEKSDRLAPSTVPVCPICLTNPKDMAFSCGHTTCKECGVVITTCPLCRQPITTRIRLYT

SEQ ID NO: 91267 - protein, 211 aa, Arabidopsis thaliana
  peptide (1)..(211): Ceres Seq. ID no. 12727063
MQYHVLVIIADGQVTRNPDVPLGRLSPQEEATMNSIMAASHYPLSIVLVGVGDGPWDTMKQFDDNIPHREFDNFQFVNFTKIMSEHKDAAKKEAAFALAALMEIPFQYKATLSLNRKPVRSSHQHHKPLPPPPEVIERDNAVRSVPNQMTETAEKSDRLAPSTVPVCPICLTNPKDMAFSCGHTTCKECGVVITTCPLCRQPITTRIRLYT

SEQ ID NO: 91268 - DNA, 1178 bp, Arabidopsis thaliana
  misc_feature (1)..(1178): Ceres Seq. ID no. 12727064
  misc_feature (1)..(1178): Ortholog of  Ceres SEQ ID NO 15178181 as cited in SEQ ID NO 58740
  misc_feature (1)..(1178): Ortholog of  Ceres SEQ ID NO 12614739 as cited in SEQ ID NO 68587
acatagtctattcttgaagcttttcaatgtcttatgagaaggagctagccgctgcaaagaaagccgtcactctagctgctcgtctcagccaggaagtgcagaagactcttttgcaatcccaagtttggaaaaaatccgatagaagtccggttactgcagctgattacggctcacaagctgtggttagtcttgtattggagagggagctccaacctgataaactgtcattagtagctgaagaggaaactggagatctgcggaagaatggaagtgaggcgtttctagaagatattgcaaagcttgtgaaagatactctagcctctgaggaatcgtacaccagctctcctctatccacagatgatgtgttaaatgctatagactgcggtaaatcagaaggcggttgcaaaggttcccactgggttcttgatcctatagatggaaccagaggatttgtaagaggagagcaatacgcggtggggttagccttgcttgtggaaggcaaagtggtgcttggtgtcatggcttgcccaaatcttcctttggcttctgcggtttgcgcgactgataattcttcccaggaagatgttggctgtcttttctttgctacaacgggttcagggacttacgtgcaatcgctcaaaggcaattctctgccacaaaaggtgcaagtgagtagcaatgagaatcttgatgaagcgaagttcttagaatcataccacaaaccaattcccatccatggtaccattgccaagaaactcgggattaaagcattacctgtaaggatcgatagccaagctaagtatgcggctttgtcgcgaggagacgcagagatatacttgcgtttcactctcaatggataccgtgagtgtatttgggaccatgcacctggttcaataatcactacagaagctggaggcgtagtgtgtgatgctacagggaaatctctggacttctcgaaaggaaagtatcttgctcacaaaacggggatcatagttaccaccaagaaactcaagccatggatattgaaggcagtcagagaatccatagaagaagagaatctttatttctgaggcacaacagaaactgtacaatacagtatttgtatttgtctgaactagtaattggtgtatattcttagttcatatatcgtatacatcagatatgaaagatatttttgc

SEQ ID NO: 91269 - protein, 347 aa, Arabidopsis thaliana; identical to SEQ ID NO: 76001
  peptide (1)..(347): Ceres Seq. ID no. 12727065

SEQ ID NO: 91270 - protein, 183 aa, Arabidopsis thaliana; identical to SEQ ID NO: 76002
  peptide (1)..(183): Ceres Seq. ID no. 12727066

SEQ ID NO: 91271 - DNA, 912 bp, Arabidopsis thaliana
  misc_feature (1)..(912): Ceres Seq. ID no. 12727087
  misc_feature (1)..(912): Ortholog of  Ceres SEQ ID NO 14302154 as cited in SEQ ID NO 0
atgtcgcacttcggaaggtcaggtccaccggatatcagcgacacctactcacttctcgtccttaacatcaccttccgtacgactgctgatgatctctatcctctattcgcaaagtatggaaaggtcgttgatgtgtttattcccagagatcgaaggactggtgattcgcgtggttttgcgtttgttcggtataagtataaagacgaagctcacaaagcagtggaaaggcttgatggaagagttgttgatggcagagaaataactgttcagtttgcgaaatatgggccaaatgctgaaaaaatttccaaaggaagagttgtggaaccaccgccgaagtcacgaagatctagaagccgtagtcctaggcggagtcgtagtcctaggaggagccgtagcccgcctagacgtcgtagtcccagaagaagccgcagtcctcgtaggaggtcccgagatgactatagggaaaaagactaccggaagcggagcaggagcagaagctatgacaggcgtgaaaggcatgaggagaaggatagagatcatcgtcgtcgcactaggtctcgtagtgccagcccagatgaaaaacgcagagtcagaggccgttatgataatgagagccgcagtcacagtcgttccttgagtgcatctcctgctcgccgcagccctagaagttcctccccacagaaaacctctcctgctagagaagtttctcctgataagcgtagcaatgagaggtctccatctcctcgtcgcagcctcagcccaagaagccctgctttgcaaaaggcctctccttctaaggagatgtctcctgaaaggcgtagcaatgagaggtccccatctcctggtagccctgctcctctgcgcaaagttgatgctgcttctcgaagtcaatctccttatgctgcggaatga

SEQ ID NO: 91272 - protein, 303 aa, Arabidopsis thaliana; identical to SEQ ID NO: 35347
  peptide (1)..(303): Ceres Seq. ID no. 12727088

SEQ ID NO: 91273 - DNA, 2517 bp, Arabidopsis thaliana
  misc_feature (1)..(2517): Ceres Seq. ID no. 12727108
  misc_feature (1)..(2517): Ortholog of  Ceres SEQ ID NO 14311055 as cited in SEQ ID NO 53705
ccctctctcttctctctctctttgccactctctctttcatctttataatcaaaactaatcaatctctcttctcttggaaactctttgtttcactttgatcttctcatcctctatatatcttcccttggtcctttcttgcttccaactacagagagtgttaacttgtgtatgatgtgggaatctgagagcgacggtggggttggagttggaggtggaggaggaagagagtatggtgatggagttttgagttctaacaagcatggcggcgtcaagactgatgggtttgagcttagaggccaatcttggtttgttgctacggatatccccagcgatcttctggttaagatcggcgacatgaactttcaccttcacaagtatccgttgctgtcacgtagcgggaagatgaacagattgatctatgagtcacgagatcctgacccgacgatccttattcttgatgatctacctggaggaccagaagcgtttgagcttgcatccaaattctgctatggagttcccgtggatctcacggcaactaacatatcaggattacgttgtgcagctgagtatcttgagatgacagaggatcttgaggaagggaatctaatcttcaagacagaagcttttctcagctatgtggttctgtcttcatggagagactccatcttggtcctgaagagctgtgaaaagctctcaccttgggctgagaatcttcagattgtgagaaggtgtagtgaatctatcgcttggaaagcttgtagtaatccaaaaggtattagatgggcttacacagggaaagctccatctccatcaacaacaaatttcgcgggttctagtccgagatggaacgaatcaaaagattcaagtttctattgtagtccgagtaggaacactaatagccagcctgttcctccagattggtggttcgaagatgtctccatcttaagaatcgatcatttcgttcgtgtaatcactgcaatcaaggtgaaaggtatgagatttgaactactcggagctgtaataatgcattacgccggaaaatggcttccgggtttgatcaaagaaggaggagttgcaatagctccagcaatgtcctccgccattggaggaggattaggtttaggaggagacgaaatgagtataagctgcggaagcaacagcagcggaggaagctccggaccagattggaaaggcggtcttcatatggttctctccgccggaaaaacaaacggacatcaagattccgtcgcttgtctcgccggactaggaatcagtccaaaagaccaacgaatgatcgtcgaatctttaatcagcataatccctccacagaaagattccgtcacttgtagcttcctcctccgtcttcttagagcagcaaacatgctcaaagtagctccggcgttgatcacggagctcgagaaacgcgtagggatgcaattcgaacaagcgacgcttcaagatcttttgattcctggttataacaataaaggagagacaatgtacgatgttgatcttgttcagagattgttggaacattttcttgtgcaagaacagacggaaggatcgagtccgagtcgaatgtcgccgtcgccgtcgcagtctatgtacgccgatatcccgagagggaataacaacaatggtggtggtggtggtggtaataatcagaatgcgaaaatgagagtggcgaggcttgtggatagttatctcaccgaagttgctagagatcggaatttgccgttgacaaagtttcaggttttggctgaggcgttaccggaatctgctaggacttgtgacgatggactatacagagccattgattcatatctcaaggcgcatccgacattatcggagcatgagaggaaacggctatgccgagtgatggattgtcaaaaactatcaatggacgcatgtatgcacgcggctcagaacgagaggttgccattgagagtggtggttcaagttctcttctcggagcaagtcaagatcagcaatgctttagccaacacatcactcaaggagtcaaccactttaggagaagccatgggtacgtatcagcctatgatcccaaatcgcaagacattgatcgaagcaacaccacaatcgtttcaggaaggatgggctgcagccaagaaggatattaacacgttgaagttcgagttagagacggtgaagaccaagtacgtcgagcttcagaacgagatggaagtgatgcaacgacagtttgagaagacggggaaagtgaagaacacgccatcttcttcggcttggaccagcggttggaagaagctaagtaaactgactaagatgagtggacaggagagccatgacatatcctctggaggagaacaagctggtgttgatcatccaccccccaggaaaccaagacgatggaggaactcaatttcatgaagtgatagtgatggttttgtatcttcttgattttgattctttgaaaagaaaaagcttttgtttgttcctaatttgtaatgtttattggtttctaatatggaataagtg

SEQ ID NO: 91274 - protein, 746 aa, Arabidopsis thaliana
  peptide (1)..(746): Ceres Seq. ID no. 12727109
MMWESESDGGVGVGGGGGREYGDGVLSSNKHGGVKTDGFELRGQSWFVATDIPSDLLVKIGDMNFHLHKYPLLSRSGKMNRLIYESRDPDPTILILDDLPGGPEAFELASKFCYGVPVDLTATNISGLRCAAEYLEMTEDLEEGNLIFKTEAFLSYVVLSSWRDSILVLKSCEKLSPWAENLQIVRRCSESIAWKACSNPKGIRWAYTGKAPSPSTTNFAGSSPRWNESKDSSFYCSPSRNTNSQPVPPDWWFEDVSILRIDHFVRVITAIKVKGMRFELLGAVIMHYAGKWLPGLIKEGGVAIAPAMSSAIGGGLGLGGDEMSISCGSNSSGGSSGPDWKGGLHMVLSAGKTNGHQDSVACLAGLGISPKDQRMIVESLISIIPPQKDSVTCSFLLRLLRAANMLKVAPALITELEKRVGMQFEQATLQDLLIPGYNNKGETMYDVDLVQRLLEHFLVQEQTEGSSPSRMSPSPSQSMYADIPRGNNNNGGGGGGNNQNAKMRVARLVDSYLTEVARDRNLPLTKFQVLAEALPESARTCDDGLYRAIDSYLKAHPTLSEHERKRLCRVMDCQKLSMDACMHAAQNERLPLRVVVQVLFSEQVKISNALANTSLKESTTLGEAMGTYQPMIPNRKTLIEATPQSFQEGWAAAKKDINTLKFELETVKTKYVELQNEMEVMQRQFEKTGKVKNTPSSSAWTSGWKKLSKLTKMSGQESHDISSGGEQAGVDHPPPRKPRRWRNSIS

SEQ ID NO: 91275 - protein, 745 aa, Arabidopsis thaliana
  peptide (1)..(745): Ceres Seq. ID no. 12727110
MWESESDGGVGVGGGGGREYGDGVLSSNKHGGVKTDGFELRGQSWFVATDIPSDLLVKIGDMNFHLHKYPLLSRSGKMNRLIYESRDPDPTILILDDLPGGPEAFELASKFCYGVPVDLTATNISGLRCAAEYLEMTEDLEEGNLIFKTEAFLSYVVLSSWRDSILVLKSCEKLSPWAENLQIVRRCSESIAWKACSNPKGIRWAYTGKAPSPSTTNFAGSSPRWNESKDSSFYCSPSRNTNSQPVPPDWWFEDVSILRIDHFVRVITAIKVKGMRFELLGAVIMHYAGKWLPGLIKEGGVAIAPAMSSAIGGGLGLGGDEMSISCGSNSSGGSSGPDWKGGLHMVLSAGKTNGHQDSVACLAGLGISPKDQRMIVESLISIIPPQKDSVTCSFLLRLLRAANMLKVAPALITELEKRVGMQFEQATLQDLLIPGYNNKGETMYDVDLVQRLLEHFLVQEQTEGSSPSRMSPSPSQSMYADIPRGNNNNGGGGGGNNQNAKMRVARLVDSYLTEVARDRNLPLTKFQVLAEALPESARTCDDGLYRAIDSYLKAHPTLSEHERKRLCRVMDCQKLSMDACMHAAQNERLPLRVVVQVLFSEQVKISNALANTSLKESTTLGEAMGTYQPMIPNRKTLIEATPQSFQEGWAAAKKDINTLKFELETVKTKYVELQNEMEVMQRQFEKTGKVKNTPSSSAWTSGWKKLSKLTKMSGQESHDISSGGEQAGVDHPPPRKPRRWRNSIS

SEQ ID NO: 91276 - protein, 684 aa, Arabidopsis thaliana
  peptide (1)..(684): Ceres Seq. ID no. 12727111
MNFHLHKYPLLSRSGKMNRLIYESRDPDPTILILDDLPGGPEAFELASKFCYGVPVDLTATNISGLRCAAEYLEMTEDLEEGNLIFKTEAFLSYVVLSSWRDSILVLKSCEKLSPWAENLQIVRRCSESIAWKACSNPKGIRWAYTGKAPSPSTTNFAGSSPRWNESKDSSFYCSPSRNTNSQPVPPDWWFEDVSILRIDHFVRVITAIKVKGMRFELLGAVIMHYAGKWLPGLIKEGGVAIAPAMSSAIGGGLGLGGDEMSISCGSNSSGGSSGPDWKGGLHMVLSAGKTNGHQDSVACLAGLGISPKDQRMIVESLISIIPPQKDSVTCSFLLRLLRAANMLKVAPALITELEKRVGMQFEQATLQDLLIPGYNNKGETMYDVDLVQRLLEHFLVQEQTEGSSPSRMSPSPSQSMYADIPRGNNNNGGGGGGNNQNAKMRVARLVDSYLTEVARDRNLPLTKFQVLAEALPESARTCDDGLYRAIDSYLKAHPTLSEHERKRLCRVMDCQKLSMDACMHAAQNERLPLRVVVQVLFSEQVKISNALANTSLKESTTLGEAMGTYQPMIPNRKTLIEATPQSFQEGWAAAKKDINTLKFELETVKTKYVELQNEMEVMQRQFEKTGKVKNTPSSSAWTSGWKKLSKLTKMSGQESHDISSGGEQAGVDHPPPRKPRRWRNSIS

SEQ ID NO: 91277 - DNA, 1218 bp, Arabidopsis thaliana
  misc_feature (1)..(1218): Ceres Seq. ID no. 12727120
  misc_feature (1)..(1218): Ortholog of  Ceres SEQ ID NO 13596497 as cited in SEQ ID NO 68669
atgatatcagaaaacggagaaacaagtgccgaaggatcgatttgcggctatgattcgctgcatcaactcttatcagcgaatcttaagcccgagctctatcaggaggtaaaccggttgctccttggacgtaactgtgggagatcgcttgaacagattgttctgccggagtctgctaaagccttgtcttcaaaacatgattttgatctccaggctgctagcttttcagctgataaagagcaaatgagaaatcctcgagtggtcagagttggtctcattcaaaactccattgctcttccaaccactgctccattctcggaccaaacaagaggaatattcgacaagttgaagccgataatcgatgctgcgggtgttgctggtgttaacatactgtgcttgcaggaagcttggaccatgccatttgcattttgcactagggagaggagatggtgtgagtttgcagagcctgttgatggcgaatcgacaaagtttcttcaagaactcgctaaaaagtataacatggtgattgttagtcctattctcgaaagagatattgatcacggtgaagtgctttggaataccgctgtgattatagggaataatggaaatatcattggcaagcatcgaaagaaccatatacctagggtaggagatttcaacgagagcacctattacatggaaggagacacaggccatcctgtgtttgagacggtgtttgggaaaattgcggttaatatatgttatggcagacaccatcctctgaattggttagcttttggtctaaatggtgcagagattgtcttcaacccttcagcaactgttggtgaactcagtgaaccaatgtggcctattgaggcacgaaatgccgcaatagcaaacagttactttgttggatccattaaccgagttggaaccgaagtattccccaatccttttacgtcaggtgatggaaaaccgcaacacaatgatttcgggcatttctatgggtcaagccatttttctgcaccagatgcttcttgcacaccgtctttgtcccgttacaaagatggtttattgatctcggacatggatctcaatctctgccggcaatacaaggacaagtggggatttagaatgactgcaagatacgaagtctatgccgatcttttggcaaagtacataaagccagacttcaagcctcaagtcgtctctgacccattgctccacaagaattctacataa

SEQ ID NO: 91278 - protein, 405 aa, Arabidopsis thaliana; identical to SEQ ID NO: 84734
  peptide (1)..(405): Ceres Seq. ID no. 12727121

SEQ ID NO: 91279 - protein, 325 aa, Arabidopsis thaliana; identical to SEQ ID NO: 84735
  peptide (1)..(325): Ceres Seq. ID no. 12727122

SEQ ID NO: 91280 - protein, 268 aa, Arabidopsis thaliana
  peptide (1)..(268): Ceres Seq. ID no. 12727123
MPFAFCTRERRWCEFAEPVDGESTKFLQELAKKYNMVIVSPILERDIDHGEVLWNTAVIIGNNGNIIGKHRKNHIPRVGDFNESTYYMEGDTGHPVFETVFGKIAVNICYGRHHPLNWLAFGLNGAEIVFNPSATVGELSEPMWPIEARNAAIANSYFVGSINRVGTEVFPNPFTSGDGKPQHNDFGHFYGSSHFSAPDASCTPSLSRYKDGLLISDMDLNLCRQYKDKWGFRMTARYEVYADLLAKYIKPDFKPQVVSDPLLHKNST

SEQ ID NO: 91281 - DNA, 1792 bp, Arabidopsis thaliana
  misc_feature (1)..(1792): Ceres Seq. ID no. 12727144
  misc_feature (1)..(1792): Ortholog of  Ceres SEQ ID NO 15177919 as cited in SEQ ID NO 52743
aaaccctagaaaattttctcaagaaaatccgaatcacgattctgggcattgtggaggattgacaaaaatgaagggaggtacgatacagataagttggcacgatgggaagccggtgctaaccgtagattttcacccgatttccggtttactcgccaccgccggagccgattacgatatcaagctatggttgataaattcgggtcaagcggagaagaaggttcctagtgtatcttatcagagtagccttacttaccatggatgtgctgtcaataccattcgtttttctccatctggggaactacttgcctcgggagcagacggaggtgagctttttatatggaagttgcatcctagtgaaaccaatcagtcctggaaagttcacaaatcattatcatttcatcgaaaggatgtcctggatcttcagtggtctcctgatgatgcatatcttatttctggctcagtggacaactcttgcattatatgggacgttaacaaaggttctgtccatcagatactggatgcccattgtcattatgttcaaggtgttgcctgggatcccttagcaaagtatgtagcctctcttagttcagacagaacatgccgtatatatgccaataagcctcaaacaaagagtaaaggtgttgaaaaaatgaactatgtttgccagcatgttatcatgaaagcagatcagcaacggggtgatgaaactaagacaataaaaacccatctctttcatgatgagacattgccgtctttctttcgaagattgtcatggtcacctgatggatcttttttactcattccagcaggttctttcaaggtttcacccacatccgaagctgtaaatgctacctatgtcttttctaggaaggacctttcaagacctgcactgcagcttcctggcgccagcaaaccggttgtagtggttcgtttttgccctgttgcatttaaactccgtggttcaagttctgaagagggtttcttcaagcttccttaccgtcttgtctttgccattgcaactttaaactccgtgtacatatatgacacagagtgtgtcgctccaattgcagtcttagcaggtctccactatgctgcaataaccgatataacatggtcacctaatgcatcgtatctggcactgtcctcacaagatggctattgcacactagttgaatttgaagataaagaactaggagaagctgtctccatttcaggtttgctcttagtcctttcactcttgaaccttccagaacccgattgacccatcaatccaactacagttggaaagaaacctgttgatggtgaggagaaaaagcatgatttagagaaaggcgatgaactaatgacagaaacaacaccagacgagagcaagaaacaagctgaattagaacaaaacgaagagagcaaacagccattgccaagcaaaattaccacggatggtaaggaaaaagagcatattatgcagaaaaccgatgatgaagtaatgacagaaacaagacatgaggaagagaatcagccattacagagcaaagttaacacaccggtctcaaataaaccagcaaggaaacgcatcacacccatggctattgacccctgatgtcgtcattttccatcagtgttttttttttaactctgatacaaatagctttctcataggctacatttagacatcaaaatgaatcgtattgacggccatgttggaaatggacttgtttctttagtcatacgtctcgtctctaaaggcaatgtacatatagacacatgtatgaacgttcacatgagatggttttgc

SEQ ID NO: 91282 - protein, 419 aa, Arabidopsis thaliana
  peptide (1)..(419): Ceres Seq. ID no. 12727145
NPRKFSQENPNHDSGHCGGLTKMKGGTIQISWHDGKPVLTVDFHPISGLLATAGADYDIKLWLINSGQAEKKVPSVSYQSSLTYHGCAVNTIRFSPSGELLASGADGGELFIWKLHPSETNQSWKVHKSLSFHRKDVLDLQWSPDDAYLISGSVDNSCIIWDVNKGSVHQILDAHCHYVQGVAWDPLAKYVASLSSDRTCRIYANKPQTKSKGVEKMNYVCQHVIMKADQQRGDETKTIKTHLFHDETLPSFFRRLSWSPDGSFLLIPAGSFKVSPTSEAVNATYVFSRKDLSRPALQLPGASKPVVVVRFCPVAFKLRGSSSEEGFFKLPYRLVFAIATLNSVYIYDTECVAPIAVLAGLHYAAITDITWSPNASYLALSSQDGYCTLVEFEDKELGEAVSISGLLLVLSLLNLPEPD

SEQ ID NO: 91283 - protein, 397 aa, Arabidopsis thaliana
  peptide (1)..(397): Ceres Seq. ID no. 12727146
MKGGTIQISWHDGKPVLTVDFHPISGLLATAGADYDIKLWLINSGQAEKKVPSVSYQSSLTYHGCAVNTIRFSPSGELLASGADGGELFIWKLHPSETNQSWKVHKSLSFHRKDVLDLQWSPDDAYLISGSVDNSCIIWDVNKGSVHQILDAHCHYVQGVAWDPLAKYVASLSSDRTCRIYANKPQTKSKGVEKMNYVCQHVIMKADQQRGDETKTIKTHLFHDETLPSFFRRLSWSPDGSFLLIPAGSFKVSPTSEAVNATYVFSRKDLSRPALQLPGASKPVVVVRFCPVAFKLRGSSSEEGFFKLPYRLVFAIATLNSVYIYDTECVAPIAVLAGLHYAAITDITWSPNASYLALSSQDGYCTLVEFEDKELGEAVSISGLLLVLSLLNLPEPD

SEQ ID NO: 91284 - DNA, 1955 bp, Arabidopsis thaliana
  misc_feature (1)..(1955): Ceres Seq. ID no. 12727147
  misc_feature (1)..(1955): Ortholog of  Ceres SEQ ID NO 13594037 as cited in SEQ ID NO 55666
  misc_feature (1)..(1955): Ortholog of  Ceres SEQ ID NO 13657707 as cited in SEQ ID NO 66407
atggattctccgacactaccgcactctatctccgcctcttcctccaccccattcgcttccgccgccgtaaaacctcaccggaataaactcctttcccgtaatggcatcctcatcatcatcgccgcgtcctgtattctcctcctcctcatatctctcctcatctacgccaccgtctcaaaatcctcccgcaaccaccataatccatcgcaccaaaccccaacctccgacgatcatcctccgccggaaacacctccttctcctccaccaatcgctcagatccgtctcgcatgcaacgcaacgcgtttcccagatcattgcgttgcctcgctctctaaacccggtcaagtccctccggatcctaaaccggttcaaataatccactctgcaatttcagtctcctacgagaatctcaaatccggccaatcgaaaatccaatcaatcctagactcctccgcagggaatcgaaaccgtacgaacatcgccaccatttgcctcgagatcctctcttactctcaacaccgtaccgaatcaacagacatagccgtgacgagcggcgatatcaaagacgcacgtgcgtggatgagcgcagctctagcttaccaattcgattgctggtcaggtctcaaaaccgtcaacgacactaagcaagtcgtcgacacgattacgttcttcgaaggtctcgtgaacctcaccggaaacgcgttgagcatgatgttatcgttcgacagtttcggagacgacgtcgtttcgtggattcgtccagcgacggaaagagacgggttttgggagaaagctgggccgagtttgggctcgggtacgggtacagaggctagtttgggttttccgtctggtttaacggaagacgtgacggtgtgtaaaaacggagggaaagattgtaaatacaaaacagtgcaagaagccgttgattccgcgccggatacaaacagaactgtaaagtttgtgatacgtattagagaaggtgtgtatgaagaaaccgttagggttccgtttgagaaaaagaatgtcgtcttcatcggtgacggaatgggtaaaacggtaattacagggtcgttgaatgttggacaaccagggatgacaacgtttgaatctgcaactgtcggagttctcggtgatggatttatggctcgtgatttaactatagagaacacggcaggagcagatgcgcaccaagcggttgcgtttagatcagacagtgatttttcggtacttgaaaactgcgagtttcttgggaaccaagacactctttatgctcactctctccgtcagttctacaaacaatgtcgaatccaaggcaacgtagacttcatctttggtaactcagctgccgtattccaagattgtgatatcctaatcgcttcaaaacactccaaactcgagcaaggcggtgcaaacaacgcgatcacagcacacgggaggattgatgcgtcgcagtccacgggatttgtgtttttgaactgttcgattaacggaacagaggaatacatgaaggagtttcaagctaaccctgaagggcataagaacttcttgggaagaccgtggaaggagttttcgaggacggtttttgtaaactgtaatcttgagtctttgattagtcctgatggatggatgccttggaacggggatttcgcattgaagactttgtattacggtgagtataagaatacgggtccgggatcggttagatcgagtagggttccatggagtagtgagataccagagaagcatgttgatgtttactctgttgccaattttattcaggctgatgagtgggcttccacgactgcttgatttttgtaaaggaaacatgaggttttaggattttgaaaagaagagaagagaagtcgtcattgtaactttattgtagtgtcaaatattagtgtggtttctttatcgctcattggggattcataatagattaataattgaagataatc

SEQ ID NO: 91285 - protein, 602 aa, Arabidopsis thaliana
  peptide (1)..(602): Ceres Seq. ID no. 12727148
MDSPTLPHSISASSSTPFASAAVKPHRNKLLSRNGILIIIAASCILLLLISLLIYATVSKSSRNHHNPSHQTPTSDDHPPPETPPSPPPIAQIRLACNATRFPDHCVASLSKPGQVPPDPKPVQIIHSAISVSYENLKSGQSKIQSILDSSAGNRNRTNIATICLEILSYSQHRTESTDIAVTSGDIKDARAWMSAALAYQFDCWSGLKTVNDTKQVVDTITFFEGLVNLTGNALSMMLSFDSFGDDVVSWIRPATERDGFWEKAGPSLGSGTGTEASLGFPSGLTEDVTVCKNGGKDCKYKTVQEAVDSAPDTNRTVKFVIRIREGVYEETVRVPFEKKNVVFIGDGMGKTVITGSLNVGQPGMTTFESATVGVLGDGFMARDLTIENTAGADAHQAVAFRSDSDFSVLENCEFLGNQDTLYAHSLRQFYKQCRIQGNVDFIFGNSAAVFQDCDILIASKHSKLEQGGANNAITAHGRIDASQSTGFVFLNCSINGTEEYMKEFQANPEGHKNFLGRPWKEFSRTVFVNCNLESLISPDGWMPWNGDFALKTLYYGEYKNTGPGSVRSSRVPWSSEIPEKHVDVYSVANFIQADEWASTTA

SEQ ID NO: 91286 - protein, 409 aa, Arabidopsis thaliana
  peptide (1)..(409): Ceres Seq. ID no. 12727149
MSAALAYQFDCWSGLKTVNDTKQVVDTITFFEGLVNLTGNALSMMLSFDSFGDDVVSWIRPATERDGFWEKAGPSLGSGTGTEASLGFPSGLTEDVTVCKNGGKDCKYKTVQEAVDSAPDTNRTVKFVIRIREGVYEETVRVPFEKKNVVFIGDGMGKTVITGSLNVGQPGMTTFESATVGVLGDGFMARDLTIENTAGADAHQAVAFRSDSDFSVLENCEFLGNQDTLYAHSLRQFYKQCRIQGNVDFIFGNSAAVFQDCDILIASKHSKLEQGGANNAITAHGRIDASQSTGFVFLNCSINGTEEYMKEFQANPEGHKNFLGRPWKEFSRTVFVNCNLESLISPDGWMPWNGDFALKTLYYGEYKNTGPGSVRSSRVPWSSEIPEKHVDVYSVANFIQADEWASTTA

SEQ ID NO: 91287 - protein, 366 aa, Arabidopsis thaliana
  peptide (1)..(366): Ceres Seq. ID no. 12727150
MMLSFDSFGDDVVSWIRPATERDGFWEKAGPSLGSGTGTEASLGFPSGLTEDVTVCKNGGKDCKYKTVQEAVDSAPDTNRTVKFVIRIREGVYEETVRVPFEKKNVVFIGDGMGKTVITGSLNVGQPGMTTFESATVGVLGDGFMARDLTIENTAGADAHQAVAFRSDSDFSVLENCEFLGNQDTLYAHSLRQFYKQCRIQGNVDFIFGNSAAVFQDCDILIASKHSKLEQGGANNAITAHGRIDASQSTGFVFLNCSINGTEEYMKEFQANPEGHKNFLGRPWKEFSRTVFVNCNLESLISPDGWMPWNGDFALKTLYYGEYKNTGPGSVRSSRVPWSSEIPEKHVDVYSVANFIQADEWASTTA

SEQ ID NO: 91288 - DNA, 1080 bp, Arabidopsis thaliana
  misc_feature (1)..(1080): Ceres Seq. ID no. 12727154
  misc_feature (1)..(1080): Ortholog of  Ceres SEQ ID NO 15170461 as cited in SEQ ID NO 52853
  misc_feature (1)..(1080): Ortholog of  Ceres SEQ ID NO 13595351 as cited in SEQ ID NO 55934
  misc_feature (1)..(1080): Ortholog of  Ceres SEQ ID NO 13595513 as cited in SEQ ID NO 56663
  misc_feature (1)..(1080): Ortholog of  Ceres SEQ ID NO 13639645 as cited in SEQ ID NO 57488
atggacatggagtcgaagaaaccatatctgatggttactataatacaagtcatatatacaatcatgttcttgatctccaaagccgtcttcaacggtggaatgaacactttcgtctttgttttctatcgtcaagctttcgctaccatcttcttggctcctctggctttcttctttgagcggaaaagtgctccacctctttcatttgtgaccttcatcaagatcttcatgctctctttatttggtgtgacattgagcttggacttaaacggtatcgcattatcatacacgtcggcaactttagccgccgccacaacagcttcccttccggccatcacattcttcttggctcttttatttggaatggagaggcttaaggttaagagcatacaaggaacagcaaagcttgtggggattactgtgtgcatgggaggggtaattatcttagctatttacaaaggtccattactgaaattacctttatgccctcatttttaccacggccaagaacatcctcaccggaataatcccggccacgtctccggcggttccacctcgtggctcaaaggatgtgtcctcatgataacctccaacattctatggggtctctggctcgttttacagggtcgtgtgttgaaggtttatccttcgaagctatatttcacaactcttcattgtctattgagttccattcaatcattcgtcatcgcgattgctttagagagagatatttcagcatggaagcttggttggaacctaagactcgttgcagtcatttactgcggattcattgtaacaggcgtagcatattatttgcaatcatgggttatagaaaagagaggacctgtcttcttatcaatgtttactcctttgtctctcctcttcactctcctctcttcagcgattctcttgtgcgagatcatcagtcttggaagtattgtaggtggattattattgatcataggactttactgtgtgctgtgggggaaaagcagagaggagaaaaacagtggtgatgataagattgatttacagaaggaaaacgatgtcgtgtgcaatgaagtgaaggttgtcattagttga

SEQ ID NO: 91289 - protein, 359 aa, Arabidopsis thaliana
  peptide (1)..(359): Ceres Seq. ID no. 12727155
MDMESKKPYLMVTIIQVIYTIMFLISKAVFNGGMNTFVFVFYRQAFATIFLAPLAFFFERKSAPPLSFVTFIKIFMLSLFGVTLSLDLNGIALSYTSATLAAATTASLPAITFFLALLFGMERLKVKSIQGTAKLVGITVCMGGVIILAIYKGPLLKLPLCPHFYHGQEHPHRNNPGHVSGGSTSWLKGCVLMITSNILWGLWLVLQGRVLKVYPSKLYFTTLHCLLSSIQSFVIAIALERDISAWKLGWNLRLVAVIYCGFIVTGVAYYLQSWVIEKRGPVFLSMFTPLSLLFTLLSSAILLCEIISLGSIVGGLLLIIGLYCVLWGKSREEKNSGDDKIDLQKENDVVCNEVKVVIS

SEQ ID NO: 91290 - protein, 357 aa, Arabidopsis thaliana
  peptide (1)..(357): Ceres Seq. ID no. 12727156
MESKKPYLMVTIIQVIYTIMFLISKAVFNGGMNTFVFVFYRQAFATIFLAPLAFFFERKSAPPLSFVTFIKIFMLSLFGVTLSLDLNGIALSYTSATLAAATTASLPAITFFLALLFGMERLKVKSIQGTAKLVGITVCMGGVIILAIYKGPLLKLPLCPHFYHGQEHPHRNNPGHVSGGSTSWLKGCVLMITSNILWGLWLVLQGRVLKVYPSKLYFTTLHCLLSSIQSFVIAIALERDISAWKLGWNLRLVAVIYCGFIVTGVAYYLQSWVIEKRGPVFLSMFTPLSLLFTLLSSAILLCEIISLGSIVGGLLLIIGLYCVLWGKSREEKNSGDDKIDLQKENDVVCNEVKVVIS

SEQ ID NO: 91291 - protein, 349 aa, Arabidopsis thaliana
  peptide (1)..(349): Ceres Seq. ID no. 12727157
MVTIIQVIYTIMFLISKAVFNGGMNTFVFVFYRQAFATIFLAPLAFFFERKSAPPLSFVTFIKIFMLSLFGVTLSLDLNGIALSYTSATLAAATTASLPAITFFLALLFGMERLKVKSIQGTAKLVGITVCMGGVIILAIYKGPLLKLPLCPHFYHGQEHPHRNNPGHVSGGSTSWLKGCVLMITSNILWGLWLVLQGRVLKVYPSKLYFTTLHCLLSSIQSFVIAIALERDISAWKLGWNLRLVAVIYCGFIVTGVAYYLQSWVIEKRGPVFLSMFTPLSLLFTLLSSAILLCEIISLGSIVGGLLLIIGLYCVLWGKSREEKNSGDDKIDLQKENDVVCNEVKVVIS

SEQ ID NO: 91292 - DNA, 3452 bp, Arabidopsis thaliana
  misc_feature (1)..(3452): Ceres Seq. ID no. 12727166
  misc_feature (1)..(3452): Ortholog of  Ceres SEQ ID NO 13658778 as cited in SEQ ID NO 66511
atgaacaccggtggtcggttaatcgccggttctcacaacaggaatgagtttgtcctcattaatgccgatgagaatgcccgaataagatcagtccaagagctgagtggacagacatgtcaaatctgcagagatgagatcgaattgactgttgatggagaaccgtttgtggcatgtaacgaatgtgcattccctgtgtgtagaccttgctatgagtacgaaagacgagaaggcaatcaagcttgtccacagtgcaaaacccgtttcaaacgtcttaaaggaagtccaagagttgaaggtgatgaagaggaagatgacattgatgatttagacaatgagtttgagtatggaaataatgggattggatttgatcaggtttctgaaggtatgtcaatctctcgtcgcaactccggtttcccacaatctgatttggattcagctccacctggctctcagattccattgctgacttacggcgacgaggacgttgagatttcttctgatagacatgctcttattgttcctccttcacttggtggtcatggcaatagagttcatcctgtttctctttctgacccgaccgtggctgcacatccaaggcctatggtacctcagaaagatcttgcggtttatggttatggaagtgtcgcttggaaagatcggatggaggaatggaagagaaagcagaatgagaaacttcaggttgttaggcatgaaggagatcctgattttgaagatggtgatgatgctgattttccaatgatggatgagggaaggcagccattgtctaggaagataccaatcaaatcgagcaagataaatccttaccggatgttaattgtgctacgtcttgtgattcttggtctcttctttcactaccgtattcttcaccccgtcaaagatgcatatgctttgtggcttatttctgttatatgtgagatatggtttgctgtttcatgggttcttgatcagttccctaaatggtaccctatcgagcgagaaacgtacttggaccgactctcattaagatatgagaaagaagggaaaccgtcgggactatcccctgtggatgtatttgttagtacagtggatccattgaaagagcctccgcttattactgcaaatactgtcttgtctattcttgctgttgattatcctgtcgataaggttgcttgttacgtatctgatgatggtgctgctatgcttactttcgaagctctttctgagaccgctgaattcgcaaggaaatgggttcctttctgcaagaaatattgtattgagcctcgtgctcccgaatggtatttctgccataaaatggactacttgaagaataaagttcatcccgcatttgttagggagcggcgagccatgaagagagattatgaagaattcaaagtaaagatcaatgctttagtagcaacagcacagaaagtgcctgaggatggttggactatgcaagacggtacaccttggcccggtaatagtgtgcgagatcatcctggcatgattcaggtcttccttggaagtgacggtgttcgtgatgtcgaaaacaacgagttgcctcgattagtttacgtttctcgtgagaagagacccggatttgatcaccataagaaggctggagctatgaattccctgatacgagtctctggggttctatcaaatgctccttaccttctgaatgtcgattgtgatcactacatcaacaatagcaaagctcttagagaagcaatgtgtttcatgatggatcctcagtcaggaaagaaaatctgttatgttcagttccctcaaaggttcgatgggattgataggcacgatcgatactcaaatcgcaatgttgtgttctttgatatcaatatgaaaggtttggatgggctacaagggcctatatacgtcggtacaggttgtgttttcaggaggcaagcgctttacggatttgatgcaccgaagaagaagaagggcccacgtaagacatgcaattgctggccaaaatggtgtctcctatgttttggttcaagaaagaatcgtaaagcaaagacagtggctgcggataagaagaagaagaatagggaagcgtcaaagcagatccacgcattagaaaatatcgaagagggccgcgtcactaaaggttctaacgtagaacagtcaaccgaggcaatgcaaatgaagttggagaagaaatttgggcagtctcctgtatttgttgcatctgcgcgtatggagaatggtgggatggctagaaacgcaagcccggcttgtctgcttaaagaagccatccaagtcattagttgcggatatgaagataaaactgaatggggaaaagagattgggtggatctatggttctgttaccgaagatattcttacgggttttaagatgcattctcatggttggagatctgtttattgtacaccaaagttagcggctttcaaaggatcagctccaatcaatctttcggatcgtctccatcaagttcttcgatgggcgcttgggtcggttgagattttcttgagtaggcattgtcctatttggtatggttatggaggtgggttgaaatggcttgagcggttgtcctacattaactctgtggtttacccgtggacctctctaccgctcatcgtttactgttctctccctgccatctgtcttctcactggaaaattcatcgttcccgagattagcaactatgcgagtatcctcttcatggcgctcttctcgtcgattgcaataacgggtattctcgagatgcaatggggcaaagttgggatcgatgattggtggagaaacgaacagttttgggtcattggaggtgtttctgcgcatctgtttgctctcttccaaggtctcctcaaggttcttgctggtgtcgacactaacttcacagtcacatcaaaagcagctgatgatggagagttctctgacctttacctcttcaaatggacttcacttctcatccctccaatgactctactcatcataaacgtcattggagtcatagtcggagtctctgatgccatcagcaatggatacgactcgtggggaccgcttttcggaagactgttctttgcactttgggtcatcattcatctttacccgttccttaaaggtttgcttgggaaacaagatagaatgccaaccattattgtcgtctggtccatcctcctggcctcgattcttacacttctttgggtccgggttaatccgtttgtggcgaaaggcggtcctattctcgagatctgtggtttagactgcttgtgattcgattgaccggtggatgggttggtgaaaaaggtttaattcccacggatcaaagagaggtaagagagatattgttttacctctaaaagactccttcattgtgttcattagatgatgaaaaatgaaaagaaaaagaagatttaattttgttacgagaattgttatttttgcaagaatgtgttgtagatagcggccgc

SEQ ID NO: 91293 - protein, 1084 aa, Arabidopsis thaliana
  peptide (1)..(1084): Ceres Seq. ID no. 12727167
MNTGGRLIAGSHNRNEFVLINADENARIRSVQELSGQTCQICRDEIELTVDGEPFVACNECAFPVCRPCYEYERREGNQACPQCKTRFKRLKGSPRVEGDEEEDDIDDLDNEFEYGNNGIGFDQVSEGMSISRRNSGFPQSDLDSAPPGSQIPLLTYGDEDVEISSDRHALIVPPSLGGHGNRVHPVSLSDPTVAAHPRPMVPQKDLAVYGYGSVAWKDRMEEWKRKQNEKLQVVRHEGDPDFEDGDDADFPMMDEGRQPLSRKIPIKSSKINPYRMLIVLRLVILGLFFHYRILHPVKDAYALWLISVICEIWFAVSWVLDQFPKWYPIERETYLDRLSLRYEKEGKPSGLSPVDVFVSTVDPLKEPPLITANTVLSILAVDYPVDKVACYVSDDGAAMLTFEALSETAEFARKWVPFCKKYCIEPRAPEWYFCHKMDYLKNKVHPAFVRERRAMKRDYEEFKVKINALVATAQKVPEDGWTMQDGTPWPGNSVRDHPGMIQVFLGSDGVRDVENNELPRLVYVSREKRPGFDHHKKAGAMNSLIRVSGVLSNAPYLLNVDCDHYINNSKALREAMCFMMDPQSGKKICYVQFPQRFDGIDRHDRYSNRNVVFFDINMKGLDGLQGPIYVGTGCVFRRQALYGFDAPKKKKGPRKTCNCWPKWCLLCFGSRKNRKAKTVAADKKKKNREASKQIHALENIEEGRVTKGSNVEQSTEAMQMKLEKKFGQSPVFVASARMENGGMARNASPACLLKEAIQVISCGYEDKTEWGKEIGWIYGSVTEDILTGFKMHSHGWRSVYCTPKLAAFKGSAPINLSDRLHQVLRWALGSVEIFLSRHCPIWYGYGGGLKWLERLSYINSVVYPWTSLPLIVYCSLPAICLLTGKFIVPEISNYASILFMALFSSIAITGILEMQWGKVGIDDWWRNEQFWVIGGVSAHLFALFQGLLKVLAGVDTNFTVTSKAADDGEFSDLYLFKWTSLLIPPMTLLIINVIGVIVGVSDAISNGYDSWGPLFGRLFFALWVIIHLYPFLKGLLGKQDRMPTIIVVWSILLASILTLLWVRVNPFVAKGGPILEICGLDCL

SEQ ID NO: 91294 - protein, 956 aa, Arabidopsis thaliana
  peptide (1)..(956): Ceres Seq. ID no. 12727168
MSISRRNSGFPQSDLDSAPPGSQIPLLTYGDEDVEISSDRHALIVPPSLGGHGNRVHPVSLSDPTVAAHPRPMVPQKDLAVYGYGSVAWKDRMEEWKRKQNEKLQVVRHEGDPDFEDGDDADFPMMDEGRQPLSRKIPIKSSKINPYRMLIVLRLVILGLFFHYRILHPVKDAYALWLISVICEIWFAVSWVLDQFPKWYPIERETYLDRLSLRYEKEGKPSGLSPVDVFVSTVDPLKEPPLITANTVLSILAVDYPVDKVACYVSDDGAAMLTFEALSETAEFARKWVPFCKKYCIEPRAPEWYFCHKMDYLKNKVHPAFVRERRAMKRDYEEFKVKINALVATAQKVPEDGWTMQDGTPWPGNSVRDHPGMIQVFLGSDGVRDVENNELPRLVYVSREKRPGFDHHKKAGAMNSLIRVSGVLSNAPYLLNVDCDHYINNSKALREAMCFMMDPQSGKKICYVQFPQRFDGIDRHDRYSNRNVVFFDINMKGLDGLQGPIYVGTGCVFRRQALYGFDAPKKKKGPRKTCNCWPKWCLLCFGSRKNRKAKTVAADKKKKNREASKQIHALENIEEGRVTKGSNVEQSTEAMQMKLEKKFGQSPVFVASARMENGGMARNASPACLLKEAIQVISCGYEDKTEWGKEIGWIYGSVTEDILTGFKMHSHGWRSVYCTPKLAAFKGSAPINLSDRLHQVLRWALGSVEIFLSRHCPIWYGYGGGLKWLERLSYINSVVYPWTSLPLIVYCSLPAICLLTGKFIVPEISNYASILFMALFSSIAITGILEMQWGKVGIDDWWRNEQFWVIGGVSAHLFALFQGLLKVLAGVDTNFTVTSKAADDGEFSDLYLFKWTSLLIPPMTLLIINVIGVIVGVSDAISNGYDSWGPLFGRLFFALWVIIHLYPFLKGLLGKQDRMPTIIVVWSILLASILTLLWVRVNPFVAKGGPILEICGLDCL

SEQ ID NO: 91295 - protein, 884 aa, Arabidopsis thaliana
  peptide (1)..(884): Ceres Seq. ID no. 12727169
MVPQKDLAVYGYGSVAWKDRMEEWKRKQNEKLQVVRHEGDPDFEDGDDADFPMMDEGRQPLSRKIPIKSSKINPYRMLIVLRLVILGLFFHYRILHPVKDAYALWLISVICEIWFAVSWVLDQFPKWYPIERETYLDRLSLRYEKEGKPSGLSPVDVFVSTVDPLKEPPLITANTVLSILAVDYPVDKVACYVSDDGAAMLTFEALSETAEFARKWVPFCKKYCIEPRAPEWYFCHKMDYLKNKVHPAFVRERRAMKRDYEEFKVKINALVATAQKVPEDGWTMQDGTPWPGNSVRDHPGMIQVFLGSDGVRDVENNELPRLVYVSREKRPGFDHHKKAGAMNSLIRVSGVLSNAPYLLNVDCDHYINNSKALREAMCFMMDPQSGKKICYVQFPQRFDGIDRHDRYSNRNVVFFDINMKGLDGLQGPIYVGTGCVFRRQALYGFDAPKKKKGPRKTCNCWPKWCLLCFGSRKNRKAKTVAADKKKKNREASKQIHALENIEEGRVTKGSNVEQSTEAMQMKLEKKFGQSPVFVASARMENGGMARNASPACLLKEAIQVISCGYEDKTEWGKEIGWIYGSVTEDILTGFKMHSHGWRSVYCTPKLAAFKGSAPINLSDRLHQVLRWALGSVEIFLSRHCPIWYGYGGGLKWLERLSYINSVVYPWTSLPLIVYCSLPAICLLTGKFIVPEISNYASILFMALFSSIAITGILEMQWGKVGIDDWWRNEQFWVIGGVSAHLFALFQGLLKVLAGVDTNFTVTSKAADDGEFSDLYLFKWTSLLIPPMTLLIINVIGVIVGVSDAISNGYDSWGPLFGRLFFALWVIIHLYPFLKGLLGKQDRMPTIIVVWSILLASILTLLWVRVNPFVAKGGPILEICGLDCL

SEQ ID NO: 91296 - DNA, 1525 bp, Arabidopsis thaliana
  misc_feature (1)..(1525): Ceres Seq. ID no. 12727170
  misc_feature (1)..(1525): Ortholog of  Ceres SEQ ID NO 15177361 as cited in SEQ ID NO 51598
  misc_feature (1)..(1525): Ortholog of  Ceres SEQ ID NO 15170792 as cited in SEQ ID NO 52707
gtctctgtttcttgtttctctctctctctctctacagagttttctttccctcgaagaaaaagaatatttttaaatttaattttctctgcgtttataagctttaagtttcagaggaggaggatttagaaggagggttttgtatgtgtgtcttaaaagtggcaaatcaggaagataacgttggcaaaaaagccgagtctattagagacgatgatcatcggacgttatctgaaatcgatcaatggctttacttattcgcagccgaagacgaccaccaccgtcatagcttccctacgcagcagccgcctccatcgtcgtcgtcctcatctcttatctcaggtttcagtagagagatggagatgtctgctattgtctctgctttgactcacgttgttgctggaaatgttcctcagcatcaacaaggaggcggtgaaggtagcggagaagggacttcgaattcgtcttcttcctcggggcagaaaaggaggagagaggtggaggaaggtggcgccaaagcggttaaggcagctaatactttgacggttgatcaatatttctccggtggtagctctacttctaaagtgagagaagcttcgagtaacatgtcaggtccgggcccaacatacgagtatacaactacggcaactgctagtagcgaaacgtcgtcgtttagtggggaccaacctcggcgaagatacagaggagttagacaaagaccatggggaaagtgggcggctgagattcgagatccatttaaagcagctagagtttggctcggtacgttcgacaatgctgaatcagcagcaagagcttacgacgaagctgcacttcggtttagaggcaacaaagccaaactcaacttccctgaaaacgtcaaactcgttagacctgcttcaaccgaagcacaacctgtgcaccaaaccgctgctcaaagaccgacccagtcaaggaactcgggttcaacgactacccttttgcccataagacctgcttcgaatcaaagcgttcattcgcagccgttgatgcaatcatacaacttgagttactctgaaatggctcgtcaacaacaacagtttcagcaacatcatcaacaatctttggatttatacgatcaaatgtcgtttccgttgcgtttcggtcacactggaggttcaatgatgcaatctacgtcgtcatcatcatctcattctcgtcctctgttttccccggctgctgttcagccgccaccagaatcagctagcgaaaccggttatctccaggatatacaatggccatcagacaagactagtaataactacaataatagtccatcctcctgatgacttgcttcattttatttgtttcactatagagtaatagaaaacaggaaaatgattatatgttatagagttatttttccaaatattatagggtttaggttgtttgtattgttctgctttcatcctctcatgctttttttcttaatttattatatttttgcattataatttcgtttcattgtaacaaacattaaaaagaccacatggag

SEQ ID NO: 91297 - protein, 391 aa, Arabidopsis thaliana
  peptide (1)..(391): Ceres Seq. ID no. 12727171
MCVLKVANQEDNVGKKAESIRDDDHRTLSEIDQWLYLFAAEDDHHRHSFPTQQPPPSSSSSSLISGFSREMEMSAIVSALTHVVAGNVPQHQQGGGEGSGEGTSNSSSSSGQKRRREVEEGGAKAVKAANTLTVDQYFSGGSSTSKVREASSNMSGPGPTYEYTTTATASSETSSFSGDQPRRRYRGVRQRPWGKWAAEIRDPFKAARVWLGTFDNAESAARAYDEAALRFRGNKAKLNFPENVKLVRPASTEAQPVHQTAAQRPTQSRNSGSTTTLLPIRPASNQSVHSQPLMQSYNLSYSEMARQQQQFQQHHQQSLDLYDQMSFPLRFGHTGGSMMQSTSSSSSHSRPLFSPAAVQPPPESASETGYLQDIQWPSDKTSNNYNNSPSS

SEQ ID NO: 91298 - protein, 321 aa, Arabidopsis thaliana
  peptide (1)..(321): Ceres Seq. ID no. 12727172
MEMSAIVSALTHVVAGNVPQHQQGGGEGSGEGTSNSSSSSGQKRRREVEEGGAKAVKAANTLTVDQYFSGGSSTSKVREASSNMSGPGPTYEYTTTATASSETSSFSGDQPRRRYRGVRQRPWGKWAAEIRDPFKAARVWLGTFDNAESAARAYDEAALRFRGNKAKLNFPENVKLVRPASTEAQPVHQTAAQRPTQSRNSGSTTTLLPIRPASNQSVHSQPLMQSYNLSYSEMARQQQQFQQHHQQSLDLYDQMSFPLRFGHTGGSMMQSTSSSSSHSRPLFSPAAVQPPPESASETGYLQDIQWPSDKTSNNYNNSPSS

SEQ ID NO: 91299 - protein, 319 aa, Arabidopsis thaliana
  peptide (1)..(319): Ceres Seq. ID no. 12727173
MSAIVSALTHVVAGNVPQHQQGGGEGSGEGTSNSSSSSGQKRRREVEEGGAKAVKAANTLTVDQYFSGGSSTSKVREASSNMSGPGPTYEYTTTATASSETSSFSGDQPRRRYRGVRQRPWGKWAAEIRDPFKAARVWLGTFDNAESAARAYDEAALRFRGNKAKLNFPENVKLVRPASTEAQPVHQTAAQRPTQSRNSGSTTTLLPIRPASNQSVHSQPLMQSYNLSYSEMARQQQQFQQHHQQSLDLYDQMSFPLRFGHTGGSMMQSTSSSSSHSRPLFSPAAVQPPPESASETGYLQDIQWPSDKTSNNYNNSPSS

SEQ ID NO: 91300 - DNA, 1329 bp, Arabidopsis thaliana
  misc_feature (1)..(1329): Ceres Seq. ID no. 12727174
  misc_feature (1)..(1329): Ortholog of  Ceres SEQ ID NO 13597648 as cited in SEQ ID NO 69125
atggcaaaaagtagacaactcgaatcgtcgattgatcggctgctgaacgaagagaaacagatgaggctcgcagaaaatgtcgccggaactagaaaagcagctaccgagattcttaagctttgtttcgaagctaaggattggaaacttctcaacgaacagattttgaatctctcgaagaaacgtggtcagcttaagcaggctgtacaatccatggtgcaacaagcaatgcagtatattgatcagacactagacatagaaactcggattgagcttattaagactctaaacaatgtagctgctggaaagatatatgtcgaaatcgagagagctcgtttgaccaagatgcttgctaagattaaggaagaacaaggtttgattgctgaagctgcggatctcatgcaagaagttgctgtggagacatttggtgctatggcaaaaactgagaaaattgctttcattcttgaacaagtccgcttgtgtttggatcaaaaagattttgtccgtgcacaaattttatctaggaagatcaacccaagagtgtttgatgcagataccacgaaggagaaaaagaagcctaaggaaggtgaaaacatggtagaggaggctccggctgatatacctacattgttggtgctaaaacggatttactatgagctaatgattcggtattattctcacaacaatgagtacattgagatatgccgtagctacaaggcgatatatgatatcccttctgtaaaggaaaacccagaacaatggattccagtcctgagaaagatttgctggtttttggccttggcaccacatgatccaatgcaatcgagcctactcaatgcaaccttggaagataaaaagttatcagagattcctgatttcaagatgcttctaaaacagattgttacaatggaggtgattcagtggacatctctctggaataaatacaaggacgagtttgagaatgagaaaaacatgattggaggctctttgggtgacaaagctggtgaagatctcaaactaagaataatcgaacacaatattctcgttgtctcaaagtactactcaaggattacctttaagagacttgcagaacttttatgcctaaccactgaggaagcagagaagcatctatctgaaatggttgtgtccaaagccttgatagcaaaaatcgacagaccatcaggaataatctgcttccagattgttaaagacagcaacgaaatcctcaactcgtgggcaacaaacttggagaagcttttggatcttgttgaaaagagttgtcaccaaattcacaaagaaacaatggttcataaagttgcactaagagcttga

SEQ ID NO: 91301 - protein, 442 aa, Arabidopsis thaliana
  peptide (1)..(442): Ceres Seq. ID no. 12727175
MAKSRQLESSIDRLLNEEKQMRLAENVAGTRKAATEILKLCFEAKDWKLLNEQILNLSKKRGQLKQAVQSMVQQAMQYIDQTLDIETRIELIKTLNNVAAGKIYVEIERARLTKMLAKIKEEQGLIAEAADLMQEVAVETFGAMAKTEKIAFILEQVRLCLDQKDFVRAQILSRKINPRVFDADTTKEKKKPKEGENMVEEAPADIPTLLVLKRIYYELMIRYYSHNNEYIEICRSYKAIYDIPSVKENPEQWIPVLRKICWFLALAPHDPMQSSLLNATLEDKKLSEIPDFKMLLKQIVTMEVIQWTSLWNKYKDEFENEKNMIGGSLGDKAGEDLKLRIIEHNILVVSKYYSRITFKRLAELLCLTTEEAEKHLSEMVVSKALIAKIDRPSGIICFQIVKDSNEILNSWATNLEKLLDLVEKSCHQIHKETMVHKVALRA

SEQ ID NO: 91302 - protein, 422 aa, Arabidopsis thaliana; identical to SEQ ID NO: 25306
  peptide (1)..(422): Ceres Seq. ID no. 12727176

SEQ ID NO: 91303 - protein, 372 aa, Arabidopsis thaliana
  peptide (1)..(372): Ceres Seq. ID no. 12727177
MVQQAMQYIDQTLDIETRIELIKTLNNVAAGKIYVEIERARLTKMLAKIKEEQGLIAEAADLMQEVAVETFGAMAKTEKIAFILEQVRLCLDQKDFVRAQILSRKINPRVFDADTTKEKKKPKEGENMVEEAPADIPTLLVLKRIYYELMIRYYSHNNEYIEICRSYKAIYDIPSVKENPEQWIPVLRKICWFLALAPHDPMQSSLLNATLEDKKLSEIPDFKMLLKQIVTMEVIQWTSLWNKYKDEFENEKNMIGGSLGDKAGEDLKLRIIEHNILVVSKYYSRITFKRLAELLCLTTEEAEKHLSEMVVSKALIAKIDRPSGIICFQIVKDSNEILNSWATNLEKLLDLVEKSCHQIHKETMVHKVALRA

SEQ ID NO: 91304 - DNA, 585 bp, Arabidopsis thaliana
  misc_feature (1)..(585): Ceres Seq. ID no. 12727180
  misc_feature (1)..(585): Ortholog of  Ceres SEQ ID NO 15175041 as cited in SEQ ID NO 57563
atgaatatctctcaaaaccctagccctaattttacgtacttctccgatgaaaactttattaatccgtttatggataacaacgatttctcaaatttgatgttctttgacatagatgaaggaggtaacaatggattaatcgaggaagagatctcatctccgacaagcatcgtttcgtcggagacatttaccggggaaagcggcggatccggcagcgcaacaacgttgagtaaaaaggaatcaactaatagaggaagtaaagagagtgatcagacgaaggagacgggtcatcgagttgcatttagaacgagatcgaagattgatgtgatggatgatggttttaaatggaggaagtatggcaagaaatctgtcaaaaacaacattaacaagaggaattactacaaatgctcaagtgaaggttgctcggtgaagaagagggtagagagagatggtgacgatgcagcttatgtaattacaacatatgaaggagtccataaccatgagagtctctctaatgtctattacaatgaaatggttttatcttatgatcatgataactggaaccaacactctcttcttcgatcttaa

SEQ ID NO: 91305 - protein, 194 aa, Arabidopsis thaliana
  peptide (1)..(194): Ceres Seq. ID no. 12727181
MNISQNPSPNFTYFSDENFINPFMDNNDFSNLMFFDIDEGGNNGLIEEEISSPTSIVSSETFTGESGGSGSATTLSKKESTNRGSKESDQTKETGHRVAFRTRSKIDVMDDGFKWRKYGKKSVKNNINKRNYYKCSSEGCSVKKRVERDGDDAAYVITTYEGVHNHESLSNVYYNEMVLSYDHDNWNQHSLLRS

SEQ ID NO: 91306 - protein, 171 aa, Arabidopsis thaliana
  peptide (1)..(171): Ceres Seq. ID no. 12727182
MDNNDFSNLMFFDIDEGGNNGLIEEEISSPTSIVSSETFTGESGGSGSATTLSKKESTNRGSKESDQTKETGHRVAFRTRSKIDVMDDGFKWRKYGKKSVKNNINKRNYYKCSSEGCSVKKRVERDGDDAAYVITTYEGVHNHESLSNVYYNEMVLSYDHDNWNQHSLLRS

SEQ ID NO: 91307 - protein, 162 aa, Arabidopsis thaliana
  peptide (1)..(162): Ceres Seq. ID no. 12727183
MFFDIDEGGNNGLIEEEISSPTSIVSSETFTGESGGSGSATTLSKKESTNRGSKESDQTKETGHRVAFRTRSKIDVMDDGFKWRKYGKKSVKNNINKRNYYKCSSEGCSVKKRVERDGDDAAYVITTYEGVHNHESLSNVYYNEMVLSYDHDNWNQHSLLRS

SEQ ID NO: 91308 - DNA, 621 bp, Arabidopsis thaliana
  misc_feature (1)..(621): Ceres Seq. ID no. 12727191
  misc_feature (1)..(621): Ortholog of  Ceres SEQ ID NO 12608945 as cited in SEQ ID NO 51209
  misc_feature (1)..(621): Ortholog of  Ceres SEQ ID NO 14316444 as cited in SEQ ID NO 59233
atgggagatttaggaaaagggtacaagctagtgttcttgggggatcaaggcgtagggaaaacgagcatcatcacttgtttcatgtacggtaaattcgacaccagttatcaggcaacaattggaatagactttttgtcaaaaacaacgcggtatgaagataggacttttcgtctgcaattgtgggatactgcaggacaagagagatttaaaagcctagtaccaagttatatcagagattcttctgttgctgttattgtctatgatgttgccagtaagcaatcatttataaacacctccaagtggatcgaagaagttcgtgcagaaagaggcagctatgtcattattgttcttgttggtaacaaaaccgatcttgttaataaaaggcaagtttcgatagaggaaggggagaataaagctcgtgagtttggagctttgttcatggagactagtgctaaagctggattcaacattaagcctttgttctgtaagattacatcggcgttacaaggaaacgaggcagtttcttggacgaaacaagaggatttggtggatgtgaatctaaagccactcatgttttcatctcaggcaaatcatcaacaagaaagcaattgttcttgttaa

SEQ ID NO: 91309 - protein, 206 aa, Arabidopsis thaliana
  peptide (1)..(206): Ceres Seq. ID no. 12727192
MGDLGKGYKLVFLGDQGVGKTSIITCFMYGKFDTSYQATIGIDFLSKTTRYEDRTFRLQLWDTAGQERFKSLVPSYIRDSSVAVIVYDVASKQSFINTSKWIEEVRAERGSYVIIVLVGNKTDLVNKRQVSIEEGENKAREFGALFMETSAKAGFNIKPLFCKITSALQGNEAVSWTKQEDLVDVNLKPLMFSSQANHQQESNCSC

SEQ ID NO: 91310 - protein, 179 aa, Arabidopsis thaliana
  peptide (1)..(179): Ceres Seq. ID no. 12727193
MYGKFDTSYQATIGIDFLSKTTRYEDRTFRLQLWDTAGQERFKSLVPSYIRDSSVAVIVYDVASKQSFINTSKWIEEVRAERGSYVIIVLVGNKTDLVNKRQVSIEEGENKAREFGALFMETSAKAGFNIKPLFCKITSALQGNEAVSWTKQEDLVDVNLKPLMFSSQANHQQESNCSC

SEQ ID NO: 91311 - DNA, 1146 bp, Arabidopsis thaliana
  misc_feature (1)..(1146): Ceres Seq. ID no. 12727205
  misc_feature (1)..(1146): Ortholog of  Ceres SEQ ID NO 15179824 as cited in SEQ ID NO 66250
  misc_feature (1)..(1146): Ortholog of  Ceres SEQ ID NO 13657872 as cited in SEQ ID NO 66357
atggtgagccaaaacgtcgtcgtatcagacgccaagaccgggatcataacggtctctacagtctctaactcctctgtctttactcctaccgctcaaaaaccaccgactgctcctggttacatctcagtttccaagaaaaaactcctcaaaaaccttgaaatcaatggagctgatcaaagtcaaagacttaactcttgggttgactccatgagagcttcttctcctacccatctcaaatcactttcctctttctcttccgaagaagaacacaattcttggatcaaacgacatccatcagcacttaacatgttcgaacgaatcatcgaagaagcaagaggaaaacaaatcgtcatgtttcttgattatgacggtactctttctccgatcgtggatgatccagacagagctttcatgactagcaagatgagaagaacagtgaaaaaaatggctaagtgttttccaacttccatagttactggtagatgcatcgacaaggtttatagctttgtgaagctagcagaactgtattatgctggaagccatgggatggatattaaaggcccaactaaaggtttctcaagatacaataaggataaaccatccgttctttaccaaccagccggcgactttcttcccatgatcgatgaggtttataaacaattagtggagaaaaccaaatctacaccaggagccaaagtggagaacaacaagttctgtctttctgtgcacttccgttgtgttgacgagaagaaatggagcgagctggcttcaaaagttcggtcggtggtaaagaactatccgacgttgaaactgtctcaaggtcgaaaggtttttgaaatccgacctataattaaatggaacaaaggcaaggctcttgagtttttgttagagtcactcggatttgaaaactgtaacgatgtatttccaatttacattggtgatgataaaaccgatgaagatgcatttaagctactacgagggagaggacaaggctttggtattcttgtctccaagttccccaaagacaccagtgcgtcgtattctttacaagacccacctgaggcaagtacttatacaaatagatatatcaatttacgcatatataaaccgtatatgtttatgtacgtattagttacgcaattataa

SEQ ID NO: 91312 - protein, 381 aa, Arabidopsis thaliana
  peptide (1)..(381): Ceres Seq. ID no. 12727206
MVSQNVVVSDAKTGIITVSTVSNSSVFTPTAQKPPTAPGYISVSKKKLLKNLEINGADQSQRLNSWVDSMRASSPTHLKSLSSFSSEEEHNSWIKRHPSALNMFERIIEEARGKQIVMFLDYDGTLSPIVDDPDRAFMTSKMRRTVKKMAKCFPTSIVTGRCIDKVYSFVKLAELYYAGSHGMDIKGPTKGFSRYNKDKPSVLYQPAGDFLPMIDEVYKQLVEKTKSTPGAKVENNKFCLSVHFRCVDEKKWSELASKVRSVVKNYPTLKLSQGRKVFEIRPIIKWNKGKALEFLLESLGFENCNDVFPIYIGDDKTDEDAFKLLRGRGQGFGILVSKFPKDTSASYSLQDPPEASTYTNRYINLRIYKPYMFMYVLVTQL

SEQ ID NO: 91313 - protein, 312 aa, Arabidopsis thaliana
  peptide (1)..(312): Ceres Seq. ID no. 12727207
MRASSPTHLKSLSSFSSEEEHNSWIKRHPSALNMFERIIEEARGKQIVMFLDYDGTLSPIVDDPDRAFMTSKMRRTVKKMAKCFPTSIVTGRCIDKVYSFVKLAELYYAGSHGMDIKGPTKGFSRYNKDKPSVLYQPAGDFLPMIDEVYKQLVEKTKSTPGAKVENNKFCLSVHFRCVDEKKWSELASKVRSVVKNYPTLKLSQGRKVFEIRPIIKWNKGKALEFLLESLGFENCNDVFPIYIGDDKTDEDAFKLLRGRGQGFGILVSKFPKDTSASYSLQDPPEASTYTNRYINLRIYKPYMFMYVLVTQL

SEQ ID NO: 91314 - protein, 279 aa, Arabidopsis thaliana
  peptide (1)..(279): Ceres Seq. ID no. 12727208
MFERIIEEARGKQIVMFLDYDGTLSPIVDDPDRAFMTSKMRRTVKKMAKCFPTSIVTGRCIDKVYSFVKLAELYYAGSHGMDIKGPTKGFSRYNKDKPSVLYQPAGDFLPMIDEVYKQLVEKTKSTPGAKVENNKFCLSVHFRCVDEKKWSELASKVRSVVKNYPTLKLSQGRKVFEIRPIIKWNKGKALEFLLESLGFENCNDVFPIYIGDDKTDEDAFKLLRGRGQGFGILVSKFPKDTSASYSLQDPPEASTYTNRYINLRIYKPYMFMYVLVTQL

SEQ ID NO: 91315 - DNA, 1089 bp, Arabidopsis thaliana
  misc_feature (1)..(1089): Ceres Seq. ID no. 12727221
  misc_feature (1)..(1089): Ortholog of  Ceres SEQ ID NO 14314411 as cited in SEQ ID NO 57683
atggaatccggcaatagtagtagcatgcaatcctcaagcggcggtggtggtggaggagatcaagaagagtacgactcacgcgccgatcaatcaatttctgctttatttaaccacaacaacaacaacaacaacccaaccaccgtctcccccaacatcgctgttccaacacagcttgacgctctcatagctaactacttcaacacttcttggtcagcggataatcctctatggtctacaacggctacgcagcccaccgatggctctagaccagtaccaccgccgatttcgtcagaacaagtcttcttcacaaacccacttcaacaaaatctgagaacagttcctaacacaaacacaactagtcccatttgttccgtcccaaccgacaagaaaaacggtcttgcgacaacacggaatccaaagaagagatctcgagtctcgagacgagcgcctacgactgttttgaccaccgacacatccaacttcagagccatggttcaagaattcacgggtaatccttcaactcctttcaccggattatcttcatcttttccaagatcacgatttgatctcttcggttcttcttcttcttcatcctcacgacccatgaaaccctttcctcacaaactcatctctccatcgacgttgaatcatcattaccttcctccttcttcagagtaccatcatcatcatcagcatcagaatcttctccttaatatgaacacgccaaatatctcaaacccttttctcaacaactctttaacggatcaaccgaaaccctcgagcttgagaacgagtaatggttttggacacgtggacgttggaacaaactttgaggggcttcacaacattatcgtctcttcttcatcgtcgatgacacagccaaccctaaatactatccatggaccagaaaagagtactgaagccgaaaatgataataatatgctaagatccatcaatggtaatgatcaacccatggtccaaagatccgatggttacacacaacctggtgcttctggatccgagaataatctatcggccgtgagaagtgaaggtatggtggaattatcttggatctcttcttctgattag

SEQ ID NO: 91316 - protein, 362 aa, Arabidopsis thaliana
  peptide (1)..(362): Ceres Seq. ID no. 12727222
MESGNSSSMQSSSGGGGGGDQEEYDSRADQSISALFNHNNNNNNPTTVSPNIAVPTQLDALIANYFNTSWSADNPLWSTTATQPTDGSRPVPPPISSEQVFFTNPLQQNLRTVPNTNTTSPICSVPTDKKNGLATTRNPKKRSRVSRRAPTTVLTTDTSNFRAMVQEFTGNPSTPFTGLSSSFPRSRFDLFGSSSSSSSRPMKPFPHKLISPSTLNHHYLPPSSEYHHHHQHQNLLLNMNTPNISNPFLNNSLTDQPKPSSLRTSNGFGHVDVGTNFEGLHNIIVSSSSSMTQPTLNTIHGPEKSTEAENDNNMLRSINGNDQPMVQRSDGYTQPGASGSENNLSAVRSEGMVELSWISSSD

SEQ ID NO: 91317 - protein, 354 aa, Arabidopsis thaliana
  peptide (1)..(354): Ceres Seq. ID no. 12727223
MQSSSGGGGGGDQEEYDSRADQSISALFNHNNNNNNPTTVSPNIAVPTQLDALIANYFNTSWSADNPLWSTTATQPTDGSRPVPPPISSEQVFFTNPLQQNLRTVPNTNTTSPICSVPTDKKNGLATTRNPKKRSRVSRRAPTTVLTTDTSNFRAMVQEFTGNPSTPFTGLSSSFPRSRFDLFGSSSSSSSRPMKPFPHKLISPSTLNHHYLPPSSEYHHHHQHQNLLLNMNTPNISNPFLNNSLTDQPKPSSLRTSNGFGHVDVGTNFEGLHNIIVSSSSSMTQPTLNTIHGPEKSTEAENDNNMLRSINGNDQPMVQRSDGYTQPGASGSENNLSAVRSEGMVELSWISSSD

SEQ ID NO: 91318 - protein, 199 aa, Arabidopsis thaliana
  peptide (1)..(199): Ceres Seq. ID no. 12727224
MVQEFTGNPSTPFTGLSSSFPRSRFDLFGSSSSSSSRPMKPFPHKLISPSTLNHHYLPPSSEYHHHHQHQNLLLNMNTPNISNPFLNNSLTDQPKPSSLRTSNGFGHVDVGTNFEGLHNIIVSSSSSMTQPTLNTIHGPEKSTEAENDNNMLRSINGNDQPMVQRSDGYTQPGASGSENNLSAVRSEGMVELSWISSSD

SEQ ID NO: 91319 - DNA, 411 bp, Arabidopsis thaliana
  misc_feature (1)..(411): Ceres Seq. ID no. 12727235
  misc_feature (1)..(411): Ortholog of  Ceres SEQ ID NO 13581889 as cited in SEQ ID NO 50900
  misc_feature (1)..(411): Ortholog of  Ceres SEQ ID NO 13581902 as cited in SEQ ID NO 52223
atggctcgtaccaagcaaaccgcaaggaaatccaccggaggaaaagccccaaggaaacaactcgcaacaaaggcggcgaggaaatcagctccggcgaccggaggagtaaagaagccacacagattccgtcctggaactgttgccctaagagaaatcaggaagtatcagaagagcactgagcttctgatccgcaagcttccgttccagcgtttggttcgtgagatcgctcaggatttcaaaacagatctgcgtttccagagcagcgccgtcgcagcacttcaggaagcggctgaagcatacctcgttggattgtttgaagacaccaatctttgcgcgattcatgctaagagagtcactatcatgcctaaggatattcaattggcgaggagaattagaggcgagagggcttaa

SEQ ID NO: 91320 - protein, 136 aa, Arabidopsis thaliana; identical to SEQ ID NO: 8709
  peptide (1)..(136): Ceres Seq. ID no. 12727236

SEQ ID NO: 91321 - DNA, 3846 bp, Arabidopsis thaliana
  misc_feature (1)..(3846): Ceres Seq. ID no. 12727244
  misc_feature (1)..(3846): Ortholog of  Ceres SEQ ID NO 13600310 as cited in SEQ ID NO 5086
atggcggagcagaagagtaccaatatgtggaactgggaggtgactgggttcgaatcgaagaagtcgccttctagtgaggaaggcgttcatcggacaccgtcttctatgcttcgacggtactcgatcccgaagaactcgcttccaccgcactcgtcggagcttgcgtctaaggttcagagtttgaaggataaagttcagcttgcaaaggacgattatgtgggattgagacaggaagctactgatcttcaagagtactccaatgcgaagcttgaaagggttacacgttatttaggtgttctggctgataaaagtcgtaaactggatcaatatgcacttgagactgaggctaggatatctccacttatcaatgagaagaagagactgttcaatgacttactgacgaccaaagggaatgtaaaggtattttgtcgagcaagacccttatttgaagacgagggtccctctatcattgaatttcctgataactgcactatacgcgtaaacactagtgatgatactctgtccaatcccaagaaggaatttgaatttgatagagtttatgggcctcaagttggacaagcttcactgttcagtgatgtccaaccttttgtgcaatccgctctggatggatcgaacgtttctatatttgcgtatggccaaactcacgcggggaagacatacaccatggttgcccctcctttccctttcctctctgaaattagatataggtcttgtttggaaggatctaatcaggaccgtggtttatatgctcgttgttttgaggaacttatggacttggccaattctgattcaacttccgcatctcagttcagtttctctgtttcagtgtttgagctttataacgaacaggtcagggatttactctcgggttgtcagagcaatttgccaaagatcaatatgggtttacgcgaatcggttatagaactttcacaggaaaaagttgataatccatcagagttcatgagagtcctgaactctgcatttcagaatagagggaatgataaatcaaagtctactgtgacccatctgattgtctcgatacacatttgttatagcaacacaattacgagagaaaatgtaattagcaagctttctttagttgacctggctggaagtgaaggtttaactgtggaggatgacaatggagatcatgtaactgatctgctccatgtaacaaattcaatttccgcgctgggagatgttttatcatctttgacgtcaaaaagagataccattccttacgagaactcatttcttacaagaatacttgcagattcactaggagggagctccaaaacattgatgatcgtcaacatttgtccaagtgcacggaacttgtctgaaataatgtcgtgtctcaactatgctgctagagctcgaaatactgtaccaagccttgggaatcgagacacaattaagaaatggagagacgtggcaaatgatgctcggaaggaggtattggagaaagagagggaaaatcagcgtctaaaacaagaggttacgggtttaaaacaagcacttaaagaagcaaatgaccaatgtgtactgctctataatgaagtacagagagcgtggagagtttcattcacactgcaatcagatttaaagtcagagaatgcgatggttgtagacaaacataaaatagaaaaggagcagaattttcagttaagaaatcaaatagctcaacttttacagttagaacaggaacaaaagctgcaggcgcaacaacaagattccaccattcaaaatctccagtctaaagtgaaagacttagaatcacaactaagtaaagctctgaagtctgacatgacaagatcgagagatcccttggaacctcagcccagagcagctgagaacacactcgattcttctgcagttaccaagaaacttgaggaagaattgaaaaaacgtgatgcactgattgagaggttgcatgaagaaaatgaaaaattgttcgacagattaacagaaaagtcagtggctagctcgactcaggtatctagcccctcatcaaaagcttcaccaacagtgcagcctgcagatgttgacagcgcgggcactttaccgtcttcagtggataaaaatgagggcacgattacattagtaaaatccagctctgaattagtaaaaaccactccagctggagaatacttaacagctgcattgaatgattttgatcccgaacaatatgaaggtcttgcagccatagctgatggcgcaaacaagcttctgatgctggtcttagcagctgtcataaaggctggtgcttccagagagcatgaaatccttgctgagatcagagattctgtcttttcatttatccggaaaatggaaccaaggagagtaatggatacaatgcttgtttctcgagtcaggatattgtacataaggtccttacttgcacgatcacctgagcttcagtcgatcaaggtttctcctgttgaacgctttttggagaagccatatactggtcgaactagaagctccagcgggagtagcagcccaggtagatcaccagttcgatattatgatgagcagatttatggctttaaagttaatttaaagccagaaaagaaaagtaagttggtatctgtagtttcaagaatccgtggacatgaccaggatactgggaggcagcaagtgactggaggaaagctgagggagatacaagatgaagccaaaagttttgccattggaaacaaacccttagctgctttatttgttcacactccggctggtgaactgcaaagacagattaggtcatggcttgcagaaagttttgagtttctctctgttacagcagatgatgtttcaggagtaaccactggccaattagagcttctttccacagcaattatggatggctggatggctggagtaggagctgcggtgccacctcacacagacgctttaggacagcttttgtctgagtatgcaaaacgagtctacacttctcagatgcagcatctaaaggatattgccggtactttggcttcggaagaggcagaagatgctggtcaagtcgcgaagcttcgatcagctctcgagtctgttgaccacaaaagaagaaagattttgcaacaaatgagaagtgatgcagctttgtttaccttggaagaaggcagttcccctgttcaaaatccatctacagcagccgaagactcgagattagcctccctcatttctctggatgccatactgaagcaagtcaaggaaataacaagacaagcctctgtccacgttttgagtaaaagcaagaaaaaggcattgcttgagtctcttgatgaacttaacgaacgaatgccttctctgcttgatgttgatcatccatgtgcacagagagaaattgatacggctcaccagttggtcgagacaattccagaacaagaggacaatcttcaagacgaaaagagaccttcaatagattcaatatcttcgactgaaaccgatgtgtctcaatggaatgttttgcaattcaacacaggaggctcttcagctccattcatcataaaatgcggagctaactccaactcagagctcgtgatcaaagcggatgcccgtattcaagaacctaaaggaggcgaaatagtgagagttgtgccaagaccttcggttttagaaaacatgagcttagaggaaatgaaacaagtgtttggtcagttgcccgaagctctaagttcactggccttagctagaacagctgatggcacacgggctcgatactctagactctacagaactctagccatgaaggttccctctcttagggacctcgttggagagcttgagaaaggaggagtcttaaaagatacaaaatcgacatga

SEQ ID NO: 91322 - protein, 1281 aa, Arabidopsis thaliana
  peptide (1)..(1281): Ceres Seq. ID no. 12727245
MAEQKSTNMWNWEVTGFESKKSPSSEEGVHRTPSSMLRRYSIPKNSLPPHSSELASKVQSLKDKVQLAKDDYVGLRQEATDLQEYSNAKLERVTRYLGVLADKSRKLDQYALETEARISPLINEKKRLFNDLLTTKGNVKVFCRARPLFEDEGPSIIEFPDNCTIRVNTSDDTLSNPKKEFEFDRVYGPQVGQASLFSDVQPFVQSALDGSNVSIFAYGQTHAGKTYTMVAPPFPFLSEIRYRSCLEGSNQDRGLYARCFEELMDLANSDSTSASQFSFSVSVFELYNEQVRDLLSGCQSNLPKINMGLRESVIELSQEKVDNPSEFMRVLNSAFQNRGNDKSKSTVTHLIVSIHICYSNTITRENVISKLSLVDLAGSEGLTVEDDNGDHVTDLLHVTNSISALGDVLSSLTSKRDTIPYENSFLTRILADSLGGSSKTLMIVNICPSARNLSEIMSCLNYAARARNTVPSLGNRDTIKKWRDVANDARKEVLEKERENQRLKQEVTGLKQALKEANDQCVLLYNEVQRAWRVSFTLQSDLKSENAMVVDKHKIEKEQNFQLRNQIAQLLQLEQEQKLQAQQQDSTIQNLQSKVKDLESQLSKALKSDMTRSRDPLEPQPRAAENTLDSSAVTKKLEEELKKRDALIERLHEENEKLFDRLTEKSVASSTQVSSPSSKASPTVQPADVDSAGTLPSSVDKNEGTITLVKSSSELVKTTPAGEYLTAALNDFDPEQYEGLAAIADGANKLLMLVLAAVIKAGASREHEILAEIRDSVFSFIRKMEPRRVMDTMLVSRVRILYIRSLLARSPELQSIKVSPVERFLEKPYTGRTRSSSGSSSPGRSPVRYYDEQIYGFKVNLKPEKKSKLVSVVSRIRGHDQDTGRQQVTGGKLREIQDEAKSFAIGNKPLAALFVHTPAGELQRQIRSWLAESFEFLSVTADDVSGVTTGQLELLSTAIMDGWMAGVGAAVPPHTDALGQLLSEYAKRVYTSQMQHLKDIAGTLASEEAEDAGQVAKLRSALESVDHKRRKILQQMRSDAALFTLEEGSSPVQNPSTAAEDSRLASLISLDAILKQVKEITRQASVHVLSKSKKKALLESLDELNERMPSLLDVDHPCAQREIDTAHQLVETIPEQEDNLQDEKRPSIDSISSTETDVSQWNVLQFNTGGSSAPFIIKCGANSNSELVIKADARIQEPKGGEIVRVVPRPSVLENMSLEEMKQVFGQLPEALSSLALARTADGTRARYSRLYRTLAMKVPSLRDLVGELEKGGVLKDTKST

SEQ ID NO: 91323 - protein, 1273 aa, Arabidopsis thaliana
  peptide (1)..(1273): Ceres Seq. ID no. 12727246
MWNWEVTGFESKKSPSSEEGVHRTPSSMLRRYSIPKNSLPPHSSELASKVQSLKDKVQLAKDDYVGLRQEATDLQEYSNAKLERVTRYLGVLADKSRKLDQYALETEARISPLINEKKRLFNDLLTTKGNVKVFCRARPLFEDEGPSIIEFPDNCTIRVNTSDDTLSNPKKEFEFDRVYGPQVGQASLFSDVQPFVQSALDGSNVSIFAYGQTHAGKTYTMVAPPFPFLSEIRYRSCLEGSNQDRGLYARCFEELMDLANSDSTSASQFSFSVSVFELYNEQVRDLLSGCQSNLPKINMGLRESVIELSQEKVDNPSEFMRVLNSAFQNRGNDKSKSTVTHLIVSIHICYSNTITRENVISKLSLVDLAGSEGLTVEDDNGDHVTDLLHVTNSISALGDVLSSLTSKRDTIPYENSFLTRILADSLGGSSKTLMIVNICPSARNLSEIMSCLNYAARARNTVPSLGNRDTIKKWRDVANDARKEVLEKERENQRLKQEVTGLKQALKEANDQCVLLYNEVQRAWRVSFTLQSDLKSENAMVVDKHKIEKEQNFQLRNQIAQLLQLEQEQKLQAQQQDSTIQNLQSKVKDLESQLSKALKSDMTRSRDPLEPQPRAAENTLDSSAVTKKLEEELKKRDALIERLHEENEKLFDRLTEKSVASSTQVSSPSSKASPTVQPADVDSAGTLPSSVDKNEGTITLVKSSSELVKTTPAGEYLTAALNDFDPEQYEGLAAIADGANKLLMLVLAAVIKAGASREHEILAEIRDSVFSFIRKMEPRRVMDTMLVSRVRILYIRSLLARSPELQSIKVSPVERFLEKPYTGRTRSSSGSSSPGRSPVRYYDEQIYGFKVNLKPEKKSKLVSVVSRIRGHDQDTGRQQVTGGKLREIQDEAKSFAIGNKPLAALFVHTPAGELQRQIRSWLAESFEFLSVTADDVSGVTTGQLELLSTAIMDGWMAGVGAAVPPHTDALGQLLSEYAKRVYTSQMQHLKDIAGTLASEEAEDAGQVAKLRSALESVDHKRRKILQQMRSDAALFTLEEGSSPVQNPSTAAEDSRLASLISLDAILKQVKEITRQASVHVLSKSKKKALLESLDELNERMPSLLDVDHPCAQREIDTAHQLVETIPEQEDNLQDEKRPSIDSISSTETDVSQWNVLQFNTGGSSAPFIIKCGANSNSELVIKADARIQEPKGGEIVRVVPRPSVLENMSLEEMKQVFGQLPEALSSLALARTADGTRARYSRLYRTLAMKVPSLRDLVGELEKGGVLKDTKST

SEQ ID NO: 91324 - protein, 1246 aa, Arabidopsis thaliana
  peptide (1)..(1246): Ceres Seq. ID no. 12727247
MLRRYSIPKNSLPPHSSELASKVQSLKDKVQLAKDDYVGLRQEATDLQEYSNAKLERVTRYLGVLADKSRKLDQYALETEARISPLINEKKRLFNDLLTTKGNVKVFCRARPLFEDEGPSIIEFPDNCTIRVNTSDDTLSNPKKEFEFDRVYGPQVGQASLFSDVQPFVQSALDGSNVSIFAYGQTHAGKTYTMVAPPFPFLSEIRYRSCLEGSNQDRGLYARCFEELMDLANSDSTSASQFSFSVSVFELYNEQVRDLLSGCQSNLPKINMGLRESVIELSQEKVDNPSEFMRVLNSAFQNRGNDKSKSTVTHLIVSIHICYSNTITRENVISKLSLVDLAGSEGLTVEDDNGDHVTDLLHVTNSISALGDVLSSLTSKRDTIPYENSFLTRILADSLGGSSKTLMIVNICPSARNLSEIMSCLNYAARARNTVPSLGNRDTIKKWRDVANDARKEVLEKERENQRLKQEVTGLKQALKEANDQCVLLYNEVQRAWRVSFTLQSDLKSENAMVVDKHKIEKEQNFQLRNQIAQLLQLEQEQKLQAQQQDSTIQNLQSKVKDLESQLSKALKSDMTRSRDPLEPQPRAAENTLDSSAVTKKLEEELKKRDALIERLHEENEKLFDRLTEKSVASSTQVSSPSSKASPTVQPADVDSAGTLPSSVDKNEGTITLVKSSSELVKTTPAGEYLTAALNDFDPEQYEGLAAIADGANKLLMLVLAAVIKAGASREHEILAEIRDSVFSFIRKMEPRRVMDTMLVSRVRILYIRSLLARSPELQSIKVSPVERFLEKPYTGRTRSSSGSSSPGRSPVRYYDEQIYGFKVNLKPEKKSKLVSVVSRIRGHDQDTGRQQVTGGKLREIQDEAKSFAIGNKPLAALFVHTPAGELQRQIRSWLAESFEFLSVTADDVSGVTTGQLELLSTAIMDGWMAGVGAAVPPHTDALGQLLSEYAKRVYTSQMQHLKDIAGTLASEEAEDAGQVAKLRSALESVDHKRRKILQQMRSDAALFTLEEGSSPVQNPSTAAEDSRLASLISLDAILKQVKEITRQASVHVLSKSKKKALLESLDELNERMPSLLDVDHPCAQREIDTAHQLVETIPEQEDNLQDEKRPSIDSISSTETDVSQWNVLQFNTGGSSAPFIIKCGANSNSELVIKADARIQEPKGGEIVRVVPRPSVLENMSLEEMKQVFGQLPEALSSLALARTADGTRARYSRLYRTLAMKVPSLRDLVGELEKGGVLKDTKST

SEQ ID NO: 91325 - DNA, 1287 bp, Arabidopsis thaliana
  misc_feature (1)..(1287): Ceres Seq. ID no. 12727274
  misc_feature (1)..(1287): Ortholog of  Ceres SEQ ID NO 15177858 as cited in SEQ ID NO 51624
  misc_feature (1)..(1287): Ortholog of  Ceres SEQ ID NO 15171249 as cited in SEQ ID NO 52276
  misc_feature (1)..(1287): Ortholog of  Ceres SEQ ID NO 13594189 as cited in SEQ ID NO 58890
atggcaggggcggcctcagcgctgtttctgctcgatatcaaaggtcgtgttctcgtgtggcgcgattaccgtggcgatgtcaccgctgctcaagctgagcgtttcttcaccaaactcatcgagacagagggtgattcacagtcaaatgatccggttgcttatgataatggcgtgacctacatgtttgtacagcatagtaacatttacctcatgatagcgtccagacagaactgtaatgctgccagtcttctcttcttcttgcatcgtgtagtcgatgtcttcaagcattacttcgaggagttagaggaagaatctttgagagataactttgtggtagtgtatgagttacttgacgagatgatggactttggttaccctcagtttactgaggcaagaatccttagtgaattcatcaagactgatgcatatagaatggaagttacacagagacctccaatggctgtcactaattctgtctcatggaggagtgaggggttaaagtttaagaaaaacgaagttttcttggatgtgatagagagtgtaaatatccttgtgaacagtaatgggcaaattgtcaggtctgatgtcgttggagctttgaagatgcgaacatacttgagtggaatgccagagtgtaagctaggcttgaatgacagaatattgttggaggcacagggacgagcaataaaaggaaaagccattgatttggaggacatcaaatttcatcagtgtgttcgattagcccgttttgagaacgacaggacaatatcattcataccacctgatggatcttttgatcttatgacgtatagactcagtactcaggtaaagcctcttatatgggtggaagcgcatatagagaggcattccagaagtcgtgttgagatgctagtaaaagctagaagccaattcaaggacagaagctatgcaacaagtgttgagattgagttacctgtaccaactgatgcgtataaccccgatgtaagaacatctctcgggtcggccgcatatgctcctgagaaagatgcactggtctggaagatacaatatttctatgggaacaaggagcatacattgaaagcagatttccatcttccaagtatagccgcagaggaagcaacgcctgagcgaaaagctccaatccgtgtcaaatttgagatcccaaaattcatagtttcaggaatacaggttcgatacctgaagatcattgagaagagtgggtaccaggcacatccatgggtgagatatataaccatggctggtgagtacgaactgagactcatgtaa

SEQ ID NO: 91326 - protein, 428 aa, Arabidopsis thaliana
  peptide (1)..(428): Ceres Seq. ID no. 12727275
MAGAASALFLLDIKGRVLVWRDYRGDVTAAQAERFFTKLIETEGDSQSNDPVAYDNGVTYMFVQHSNIYLMIASRQNCNAASLLFFLHRVVDVFKHYFEELEEESLRDNFVVVYELLDEMMDFGYPQFTEARILSEFIKTDAYRMEVTQRPPMAVTNSVSWRSEGLKFKKNEVFLDVIESVNILVNSNGQIVRSDVVGALKMRTYLSGMPECKLGLNDRILLEAQGRAIKGKAIDLEDIKFHQCVRLARFENDRTISFIPPDGSFDLMTYRLSTQVKPLIWVEAHIERHSRSRVEMLVKARSQFKDRSYATSVEIELPVPTDAYNPDVRTSLGSAAYAPEKDALVWKIQYFYGNKEHTLKADFHLPSIAAEEATPERKAPIRVKFEIPKFIVSGIQVRYLKIIEKSGYQAHPWVRYITMAGEYELRLM

SEQ ID NO: 91327 - protein, 368 aa, Arabidopsis thaliana
  peptide (1)..(368): Ceres Seq. ID no. 12727276
MFVQHSNIYLMIASRQNCNAASLLFFLHRVVDVFKHYFEELEEESLRDNFVVVYELLDEMMDFGYPQFTEARILSEFIKTDAYRMEVTQRPPMAVTNSVSWRSEGLKFKKNEVFLDVIESVNILVNSNGQIVRSDVVGALKMRTYLSGMPECKLGLNDRILLEAQGRAIKGKAIDLEDIKFHQCVRLARFENDRTISFIPPDGSFDLMTYRLSTQVKPLIWVEAHIERHSRSRVEMLVKARSQFKDRSYATSVEIELPVPTDAYNPDVRTSLGSAAYAPEKDALVWKIQYFYGNKEHTLKADFHLPSIAAEEATPERKAPIRVKFEIPKFIVSGIQVRYLKIIEKSGYQAHPWVRYITMAGEYELRLM

SEQ ID NO: 91328 - protein, 358 aa, Arabidopsis thaliana
  peptide (1)..(358): Ceres Seq. ID no. 12727277
MIASRQNCNAASLLFFLHRVVDVFKHYFEELEEESLRDNFVVVYELLDEMMDFGYPQFTEARILSEFIKTDAYRMEVTQRPPMAVTNSVSWRSEGLKFKKNEVFLDVIESVNILVNSNGQIVRSDVVGALKMRTYLSGMPECKLGLNDRILLEAQGRAIKGKAIDLEDIKFHQCVRLARFENDRTISFIPPDGSFDLMTYRLSTQVKPLIWVEAHIERHSRSRVEMLVKARSQFKDRSYATSVEIELPVPTDAYNPDVRTSLGSAAYAPEKDALVWKIQYFYGNKEHTLKADFHLPSIAAEEATPERKAPIRVKFEIPKFIVSGIQVRYLKIIEKSGYQAHPWVRYITMAGEYELRLM

SEQ ID NO: 91329 - DNA, 1035 bp, Arabidopsis thaliana
  misc_feature (1)..(1035): Ceres Seq. ID no. 12727292
  misc_feature (1)..(1035): Ortholog of  Ceres SEQ ID NO 13623732 as cited in SEQ ID NO 0
atggcagctgcaagtggagtgcgtaggatcaagctaggaagccaaggtcttgaagtgtcagcgcaaggtcttggttgtatgggactttccatcttcgatggaactaccaaggttgagacagatctcattgctctcattcaccatgccattaactccggcatcacactcctcgacacctccgacatttacggtcctgagaccaacgagttgctccttggtcaggctttgaaagatgggatgagggagaaggtggaattggcaaccaaatttgggcttctcttgaaagatcagaaattgggttacaggggagatccagcctatgtgagagctgcctgtgaagcaagcttaaggcgtttaggagttagctgcatagatctttattaccagcataggatcgataccactgtccccattgaagtcactattggagaactgaagaagctagttgaagagggtaagataaagtacattggtttgtctgaagcctgtgcctcgactataagaagagcccatgctgttcacccgctaaccgctgtgcagttggaatggtctttatggtcgagagacgttgaagaagacatcattcctacttgcagggagctcgggattggaattgtagcttacagtcctctgggactggggttctttgctgcaggaccaaaattcattgagagtatggacaatggtgactacagaaagggtttaccgagattccagcaagagaacttagaccacaacaagattctctatgagaaggtcaatgcaatggcagagaagaaaagctgtactcctgcacaattagctttggcatgggttcatcaccaaggaaatgatgtctgcccaatcccaggaacctctaagatcaaaaaccttaatcagaacataggagctttatctgtgaaactcagtatcgaagagatggccgagcttgacgccatgggacatcccgattctgtgaaaggggaaaggtcagccacctatatagttacttacaagaattctgaaactccaccactgtcttcttggacttcataa

SEQ ID NO: 91330 - protein, 344 aa, Arabidopsis thaliana
  peptide (1)..(344): Ceres Seq. ID no. 12727293
MAAASGVRRIKLGSQGLEVSAQGLGCMGLSIFDGTTKVETDLIALIHHAINSGITLLDTSDIYGPETNELLLGQALKDGMREKVELATKFGLLLKDQKLGYRGDPAYVRAACEASLRRLGVSCIDLYYQHRIDTTVPIEVTIGELKKLVEEGKIKYIGLSEACASTIRRAHAVHPLTAVQLEWSLWSRDVEEDIIPTCRELGIGIVAYSPLGLGFFAAGPKFIESMDNGDYRKGLPRFQQENLDHNKILYEKVNAMAEKKSCTPAQLALAWVHHQGNDVCPIPGTSKIKNLNQNIGALSVKLSIEEMAELDAMGHPDSVKGERSATYIVTYKNSETPPLSSWTS

SEQ ID NO: 91331 - protein, 318 aa, Arabidopsis thaliana
  peptide (1)..(318): Ceres Seq. ID no. 12727294
MGLSIFDGTTKVETDLIALIHHAINSGITLLDTSDIYGPETNELLLGQALKDGMREKVELATKFGLLLKDQKLGYRGDPAYVRAACEASLRRLGVSCIDLYYQHRIDTTVPIEVTIGELKKLVEEGKIKYIGLSEACASTIRRAHAVHPLTAVQLEWSLWSRDVEEDIIPTCRELGIGIVAYSPLGLGFFAAGPKFIESMDNGDYRKGLPRFQQENLDHNKILYEKVNAMAEKKSCTPAQLALAWVHHQGNDVCPIPGTSKIKNLNQNIGALSVKLSIEEMAELDAMGHPDSVKGERSATYIVTYKNSETPPLSSWTS

SEQ ID NO: 91332 - protein, 265 aa, Arabidopsis thaliana
  peptide (1)..(265): Ceres Seq. ID no. 12727295
MREKVELATKFGLLLKDQKLGYRGDPAYVRAACEASLRRLGVSCIDLYYQHRIDTTVPIEVTIGELKKLVEEGKIKYIGLSEACASTIRRAHAVHPLTAVQLEWSLWSRDVEEDIIPTCRELGIGIVAYSPLGLGFFAAGPKFIESMDNGDYRKGLPRFQQENLDHNKILYEKVNAMAEKKSCTPAQLALAWVHHQGNDVCPIPGTSKIKNLNQNIGALSVKLSIEEMAELDAMGHPDSVKGERSATYIVTYKNSETPPLSSWTS

SEQ ID NO: 91333 - DNA, 1398 bp, Arabidopsis thaliana
  misc_feature (1)..(1398): Ceres Seq. ID no. 12727332
  misc_feature (1)..(1398): Ortholog of  Ceres SEQ ID NO 13594349 as cited in SEQ ID NO 58161
  misc_feature (1)..(1398): Ortholog of  Ceres SEQ ID NO 13663419 as cited in SEQ ID NO 66561
  misc_feature (1)..(1398): Ortholog of  Ceres SEQ ID NO 15177892 as cited in SEQ ID NO 0
atggataattatcagaccaagaatatatctaatctattaacttctttgtgttttaccactctcttaatattagctccggtggttatatgcactagacaacaccggttcgatagcccgaaaagaagcttgttggccaacgagcaagatttagtgacaggtttgcctggacagcctgatgtgagtttcagacattatgccggatatgtccctgtcgatgaatccaacggaagagctatgttttactggttctttgaggccatggatctcccgaaagagaaacctctagtcctctggcttaatggaggtccaggttgttcttctgtgggatatggggcaacacaagaaattggtccttttctcgtggacaccaacggaaacggacttaactttaatccatacgcatggaataaagaggccaacatgctgtttttagaatctcccgtcggtgttggcttttcgtattcaaacacaagtagcgattatcaaaaacttggagatgactttacagcaagagacgcatacacttttctttgcaactggttcgagaaattcccagagcacaaagaaaatacgttctatatcgcgggtgaaagttatgcaggaaaatacgtacctgagctagcagaggttgtatacgataacaataacaataacaagaagaatggttcatcgtttcacatcaatcttaagggtattttgttggggaatcctgagacatcagatgcagaagattggagaggttgggtggattatgcatggagccatgcagtaatatcagatgagactcataggatcataaccaggacgtgcaatttcagcagcgataatacttggagcaacgatgagtgcaatgaggccgtagcagaagttctcaagcagtatcacgagatagatatctatagcatctatacctcaatgccaccgaggctcatgggtggatatgatccatgcttagatgattacgcgagagtattttacaacagagcagatgttcagaagtctcttcatgcgagtgatggagttaatctcaagaactggagcatttgcaacatggagatctttaataattggactggttcaaacccgtcggttttgcctatttacgagaaactcatcgccggaggattaagaatatgggtttacagtggtgacacagacggaagagttccagtacttgcgactcgttatagcttaaacgcactcgaattacccatcaagacagcttggaggccatggtaccatgaaaaacaggtaagtgggtggcttcaagaatacgaaggtttaacgtttgctacgttcagaggagctggacatgcggtgccttgcttcaaaccaagcagctctctcgcctttttctcggcgtttctcagcggagttcctcctccgccatcgcggtag

SEQ ID NO: 91334 - protein, 465 aa, Arabidopsis thaliana
  peptide (1)..(465): Ceres Seq. ID no. 12727333
MDNYQTKNISNLLTSLCFTTLLILAPVVICTRQHRFDSPKRSLLANEQDLVTGLPGQPDVSFRHYAGYVPVDESNGRAMFYWFFEAMDLPKEKPLVLWLNGGPGCSSVGYGATQEIGPFLVDTNGNGLNFNPYAWNKEANMLFLESPVGVGFSYSNTSSDYQKLGDDFTARDAYTFLCNWFEKFPEHKENTFYIAGESYAGKYVPELAEVVYDNNNNNKKNGSSFHINLKGILLGNPETSDAEDWRGWVDYAWSHAVISDETHRIITRTCNFSSDNTWSNDECNEAVAEVLKQYHEIDIYSIYTSMPPRLMGGYDPCLDDYARVFYNRADVQKSLHASDGVNLKNWSICNMEIFNNWTGSNPSVLPIYEKLIAGGLRIWVYSGDTDGRVPVLATRYSLNALELPIKTAWRPWYHEKQVSGWLQEYEGLTFATFRGAGHAVPCFKPSSSLAFFSAFLSGVPPPPSR

SEQ ID NO: 91335 - protein, 387 aa, Arabidopsis thaliana
  peptide (1)..(387): Ceres Seq. ID no. 12727334
MFYWFFEAMDLPKEKPLVLWLNGGPGCSSVGYGATQEIGPFLVDTNGNGLNFNPYAWNKEANMLFLESPVGVGFSYSNTSSDYQKLGDDFTARDAYTFLCNWFEKFPEHKENTFYIAGESYAGKYVPELAEVVYDNNNNNKKNGSSFHINLKGILLGNPETSDAEDWRGWVDYAWSHAVISDETHRIITRTCNFSSDNTWSNDECNEAVAEVLKQYHEIDIYSIYTSMPPRLMGGYDPCLDDYARVFYNRADVQKSLHASDGVNLKNWSICNMEIFNNWTGSNPSVLPIYEKLIAGGLRIWVYSGDTDGRVPVLATRYSLNALELPIKTAWRPWYHEKQVSGWLQEYEGLTFATFRGAGHAVPCFKPSSSLAFFSAFLSGVPPPPSR

SEQ ID NO: 91336 - protein, 379 aa, Arabidopsis thaliana
  peptide (1)..(379): Ceres Seq. ID no. 12727335
MDLPKEKPLVLWLNGGPGCSSVGYGATQEIGPFLVDTNGNGLNFNPYAWNKEANMLFLESPVGVGFSYSNTSSDYQKLGDDFTARDAYTFLCNWFEKFPEHKENTFYIAGESYAGKYVPELAEVVYDNNNNNKKNGSSFHINLKGILLGNPETSDAEDWRGWVDYAWSHAVISDETHRIITRTCNFSSDNTWSNDECNEAVAEVLKQYHEIDIYSIYTSMPPRLMGGYDPCLDDYARVFYNRADVQKSLHASDGVNLKNWSICNMEIFNNWTGSNPSVLPIYEKLIAGGLRIWVYSGDTDGRVPVLATRYSLNALELPIKTAWRPWYHEKQVSGWLQEYEGLTFATFRGAGHAVPCFKPSSSLAFFSAFLSGVPPPPSR

SEQ ID NO: 91337 - DNA, 1707 bp, Arabidopsis thaliana
  misc_feature (1)..(1707): Ceres Seq. ID no. 12727348
  misc_feature (1)..(1707): Ortholog of  Ceres SEQ ID NO 12611314 as cited in SEQ ID NO 56535
  misc_feature (1)..(1707): Ortholog of  Ceres SEQ ID NO 15178046 as cited in SEQ ID NO 60380
  misc_feature (1)..(1707): Ortholog of  Ceres SEQ ID NO 14312016 as cited in SEQ ID NO 60412
  misc_feature (1)..(1707): Ortholog of  Ceres SEQ ID NO 13661438 as cited in SEQ ID NO 61414
gagctggctcttgtcttgtctactttcattacagtgactctgcatgcttcagactgatttcagcaacatgcatgggcttaaaatcagcttctaagactgagatttagtgaccagtgtggtggtgtcttgttctctgttcttgggagaacacaaaggcagtgtggagtctggtaaaatatgatacatggtttgccatctatgaagtctatcaaatcattgaagtcacttgttaaaagaaaaaccaatgctcaagaagtgagtaaatccgggtggaaaatgaagccctttttggctctcatgtgtacagctcttttgatcttttggtataagaccacaaatattcagtttgaacaaacagagatagaagaaacagattatccttttgacatggctaaggaatctgaagcagttaacgataaattaaaaggcttgcctcgtggaatcatacagtctagatcagatcttgaattaaagcctctctggtctagaggtagtctgaggtcaaagggtgtggaaatgactaaccgtaacttgttggcaatacccgtaggacttaagcaaaagggtaacgtcgacgctcttgtaaagaagtttcttcccgcgaatttcacgattgttcttttccattatgatggaaatatggataaatggtgggatctggagtggagttcaaaatccatacatatagttgcacaaaaccagactaaatggtggtttgcaaaacgattcctccatccggatgttgtatccatttatgattatatttttctttgggacgaggatcttggagtagagaatttcaatccagagagatatttgaagatagttaaatcagtgggactggagatatctcaaccggctttggaccacaactcgactgaaatacaccataaaatcactctccgttctaaaacaaagaaatttcataggagagtttacatcaatagaggccataaaagatgttctaatactagctcagatcctccttgcaccggatttgttgaaggaatggctccggtgttttcgaaagctgcttggctttgcacttggaatcttatacagaatgatttggttcatggatggggaatggatatgaaacttgggtactgcgcacagggagaccgaacgaaaaacgtagggattgtggatagcgagtatatccttcatcaaggcattcaaactttaggtgaaagtgttcctgagaagaagaagacggctcgtgatgttgggaccaggagacaaggccatacaacttttgattcaagaaccgagataaggagacaatcgacatgggagcttcaaacttttaaagaacgatggagcaaagcggtagaagaagacattaagtggatcgatccatcgtcatcaagctcgatgacaaagaggaagagtaacggtaataacagaagattaaggcgtggtagtagtagtagtcaccgagtaaagcataagagaagtcaagagacatcaagaacaacaacaacacacaaatagcaagagaaggattattatacacatagatagtgtttttctttatctcattaaccaatttatatatgattatactacttatccttagttagtatatagctttcttggaattgatgaaaaagggttcatattaagatttgtaaaagctcatgtccattatgtactttcatcactataactactttaaaaatcaaataaagagacccactttcctaa

SEQ ID NO: 91338 - protein, 438 aa, Arabidopsis thaliana
  peptide (1)..(438): Ceres Seq. ID no. 12727349
MIHGLPSMKSIKSLKSLVKRKTNAQEVSKSGWKMKPFLALMCTALLIFWYKTTNIQFEQTEIEETDYPFDMAKESEAVNDKLKGLPRGIIQSRSDLELKPLWSRGSLRSKGVEMTNRNLLAIPVGLKQKGNVDALVKKFLPANFTIVLFHYDGNMDKWWDLEWSSKSIHIVAQNQTKWWFAKRFLHPDVVSIYDYIFLWDEDLGVENFNPERYLKIVKSVGLEISQPALDHNSTEIHHKITLRSKTKKFHRRVYINRGHKRCSNTSSDPPCTGFVEGMAPVFSKAAWLCTWNLIQNDLVHGWGMDMKLGYCAQGDRTKNVGIVDSEYILHQGIQTLGESVPEKKKTARDVGTRRQGHTTFDSRTEIRRQSTWELQTFKERWSKAVEEDIKWIDPSSSSSMTKRKSNGNNRRLRRGSSSSHRVKHKRSQETSRTTTTHK

SEQ ID NO: 91339 - protein, 431 aa, Arabidopsis thaliana
  peptide (1)..(431): Ceres Seq. ID no. 12727350
MKSIKSLKSLVKRKTNAQEVSKSGWKMKPFLALMCTALLIFWYKTTNIQFEQTEIEETDYPFDMAKESEAVNDKLKGLPRGIIQSRSDLELKPLWSRGSLRSKGVEMTNRNLLAIPVGLKQKGNVDALVKKFLPANFTIVLFHYDGNMDKWWDLEWSSKSIHIVAQNQTKWWFAKRFLHPDVVSIYDYIFLWDEDLGVENFNPERYLKIVKSVGLEISQPALDHNSTEIHHKITLRSKTKKFHRRVYINRGHKRCSNTSSDPPCTGFVEGMAPVFSKAAWLCTWNLIQNDLVHGWGMDMKLGYCAQGDRTKNVGIVDSEYILHQGIQTLGESVPEKKKTARDVGTRRQGHTTFDSRTEIRRQSTWELQTFKERWSKAVEEDIKWIDPSSSSSMTKRKSNGNNRRLRRGSSSSHRVKHKRSQETSRTTTTHK

SEQ ID NO: 91340 - protein, 405 aa, Arabidopsis thaliana
  peptide (1)..(405): Ceres Seq. ID no. 12727351
MKPFLALMCTALLIFWYKTTNIQFEQTEIEETDYPFDMAKESEAVNDKLKGLPRGIIQSRSDLELKPLWSRGSLRSKGVEMTNRNLLAIPVGLKQKGNVDALVKKFLPANFTIVLFHYDGNMDKWWDLEWSSKSIHIVAQNQTKWWFAKRFLHPDVVSIYDYIFLWDEDLGVENFNPERYLKIVKSVGLEISQPALDHNSTEIHHKITLRSKTKKFHRRVYINRGHKRCSNTSSDPPCTGFVEGMAPVFSKAAWLCTWNLIQNDLVHGWGMDMKLGYCAQGDRTKNVGIVDSEYILHQGIQTLGESVPEKKKTARDVGTRRQGHTTFDSRTEIRRQSTWELQTFKERWSKAVEEDIKWIDPSSSSSMTKRKSNGNNRRLRRGSSSSHRVKHKRSQETSRTTTTHK

SEQ ID NO: 91341 - DNA, 876 bp, Arabidopsis thaliana
  misc_feature (1)..(876): Ceres Seq. ID no. 12727352
  misc_feature (1)..(876): Ortholog of  Ceres SEQ ID NO 12593170 as cited in SEQ ID NO 63263
  misc_feature (1)..(876): Ortholog of  Ceres SEQ ID NO 14301882 as cited in SEQ ID NO 64381
  misc_feature (1)..(876): Ortholog of  Ceres SEQ ID NO 13597851 as cited in SEQ ID NO 64869
  misc_feature (1)..(876): Ortholog of  Ceres SEQ ID NO 13662420 as cited in SEQ ID NO 68680
atgggtggtcgttacgatcggaacacattcgacgaacaagacgaagtcaatccttttgctaatcctgggagtgttcctgctgcttcgaattccagactatcgcctttgcctcccgaacctgctggttttggttatggtcgtactgttgacattcctcttgacagaccagggtctggtgcacaggatttgaaaaagaaagagaaggagctccaagccaaagaagctgacctaagacgacgagagcaagatcttaaacgaaaacaggatgctgctgcccgagccggaattgttatcgaggcaaaaaactggcctaccttcttcccccttatccaccatgacattgcaaatgaaattctggttcgtctccaaaggctacagtatattgcatttgcaacatatttggggttggttctcgcacttttctggaatatcatcgccgttactaccgcttggatcaaaggagaaggagtaacaatttggcttctcgccgttatttacttcatatcgggtgttccaggaggctatgtgttatggtatcggcctctctaccgtgccttcagaagtgatagtgcattcaactttggatggtttttcttgttctacatgctccacatacttttctgcctctttgctgcagttgctcctcctattgtcttcaaaggaaaatcacttgcgggcatattacctgcaatagatgtgttgagcgctcaggcattggtcgggatcttctacttcattgggtttgggttattctgtcttgaatcagtggttagcatctgggttatacagcaagtatacatgtacttcagaggaagcggaaaagcggatgatatgagacgggatgctgcaagaggagccatgagagctgccatatga

SEQ ID NO: 91342 - protein, 291 aa, Arabidopsis thaliana
  peptide (1)..(291): Ceres Seq. ID no. 12727353
MGGRYDRNTFDEQDEVNPFANPGSVPAASNSRLSPLPPEPAGFGYGRTVDIPLDRPGSGAQDLKKKEKELQAKEADLRRREQDLKRKQDAAARAGIVIEAKNWPTFFPLIHHDIANEILVRLQRLQYIAFATYLGLVLALFWNIIAVTTAWIKGEGVTIWLLAVIYFISGVPGGYVLWYRPLYRAFRSDSAFNFGWFFLFYMLHILFCLFAAVAPPIVFKGKSLAGILPAIDVLSAQALVGIFYFIGFGLFCLESVVSIWVIQQVYMYFRGSGKADDMRRDAARGAMRAAI

SEQ ID NO: 91343 - DNA, 897 bp, Arabidopsis thaliana
  misc_feature (1)..(897): Ceres Seq. ID no. 12727362
  misc_feature (1)..(897): Ortholog of  Ceres SEQ ID NO 15179926 as cited in SEQ ID NO 57010
  misc_feature (1)..(897): Ortholog of  Ceres SEQ ID NO 14316075 as cited in SEQ ID NO 60059
atgaacgatttattctctaattcattcaagaagaaccaggctcaactgggggatgttgaggcaggtcaagaaacgatgaacctcgataaattcttcgaggatgtcgagaatgtgaaggacgacatgaaaggagtcgaggctctttataagaagcttcaagactcaaacgaggagtgcaagacggttcacaatgccaagaaggttaaagagctacgagctaagatggatggagacgtagcaatggtccttaagagggttaaaatcatcaagcagaagctcgaagccttagagaaagcgaatgctaatagccgtaatgtccctggttgtgggcctggttcgtctacggataggactcgatcttctgtggttagcggtctcgggaagaagctcaaagacttgatggatagttttcaaggtctacgtgctcgtatgaacaatgagtataaggaaaccgtagagcgcaggtatttcacaataacaggagaaaaagcagacgagcaaacaatcgataacttgatagcgagcggtgagagcgagaattttctccaaaaagcgattcaagagcaaggaagaggtcaaatcctagacacgatatctgagatccaggagagacatgatgcagtgaaggagatagagaagaatctactggagctgcaccaggttttcttggacatggcagctctagtagaagcgcaagggcaacaattaaacaacatagagagccatgtggcgaaagcgagctcgtttgtgagaagagggactgatcagctccaagatgcgagggaataccaaaagagctcgaggaaatggacttgttacgccatcatcctcttcatcgtcatctttatcctccttctcattccccttctacctcacataatgctcatgttgaagtga

SEQ ID NO: 91344 - protein, 298 aa, Arabidopsis thaliana
  peptide (1)..(298): Ceres Seq. ID no. 12727363
MNDLFSNSFKKNQAQLGDVEAGQETMNLDKFFEDVENVKDDMKGVEALYKKLQDSNEECKTVHNAKKVKELRAKMDGDVAMVLKRVKIIKQKLEALEKANANSRNVPGCGPGSSTDRTRSSVVSGLGKKLKDLMDSFQGLRARMNNEYKETVERRYFTITGEKADEQTIDNLIASGESENFLQKAIQEQGRGQILDTISEIQERHDAVKEIEKNLLELHQVFLDMAALVEAQGQQLNNIESHVAKASSFVRRGTDQLQDAREYQKSSRKWTCYAIILFIVIFILLLIPLLPHIMLMLK

SEQ ID NO: 91345 - protein, 273 aa, Arabidopsis thaliana
  peptide (1)..(273): Ceres Seq. ID no. 12727364
MNLDKFFEDVENVKDDMKGVEALYKKLQDSNEECKTVHNAKKVKELRAKMDGDVAMVLKRVKIIKQKLEALEKANANSRNVPGCGPGSSTDRTRSSVVSGLGKKLKDLMDSFQGLRARMNNEYKETVERRYFTITGEKADEQTIDNLIASGESENFLQKAIQEQGRGQILDTISEIQERHDAVKEIEKNLLELHQVFLDMAALVEAQGQQLNNIESHVAKASSFVRRGTDQLQDAREYQKSSRKWTCYAIILFIVIFILLLIPLLPHIMLMLK

SEQ ID NO: 91346 - protein, 257 aa, Arabidopsis thaliana
  peptide (1)..(257): Ceres Seq. ID no. 12727365
MKGVEALYKKLQDSNEECKTVHNAKKVKELRAKMDGDVAMVLKRVKIIKQKLEALEKANANSRNVPGCGPGSSTDRTRSSVVSGLGKKLKDLMDSFQGLRARMNNEYKETVERRYFTITGEKADEQTIDNLIASGESENFLQKAIQEQGRGQILDTISEIQERHDAVKEIEKNLLELHQVFLDMAALVEAQGQQLNNIESHVAKASSFVRRGTDQLQDAREYQKSSRKWTCYAIILFIVIFILLLIPLLPHIMLMLK

SEQ ID NO: 91347 - DNA, 2493 bp, Arabidopsis thaliana
  misc_feature (1)..(2493): Ceres Seq. ID no. 12727378
  misc_feature (1)..(2493): Ortholog of  Ceres SEQ ID NO 13582534 as cited in SEQ ID NO 57409
  misc_feature (1)..(2493): Ortholog of  Ceres SEQ ID NO 13597268 as cited in SEQ ID NO 63929
  misc_feature (1)..(2493): Ortholog of  Ceres SEQ ID NO 13659840 as cited in SEQ ID NO 66970
  misc_feature (1)..(2493): Ortholog of  Ceres SEQ ID NO 14302384 as cited in SEQ ID NO 67177
atgggttgtttgctaattcttcttcttacattgatttgcttttccttgaggctttgtttggctactgatgtaatcacgttttctagcgagttcagggactctgagactgtcgtctccaaccacagcaccttcaggtttggtttcttcagcccggttaactccacaggacgttatgcagggatatggttcaataatattcctgttcaaaccgtggtttgggtagcaaacagtaacagcccgatcaatgactcttccggaatggtttccatatccaaggaagggaatcttgttgttatggatggtcgcggacaggttcactggtccaccaatgtcttggtgccggtggctgctaacaccttctatgcccggttgctgaatacagggaacctcgtgctgctaggaactactaatactggggatgagattctttgggagagctttgagcatcctcaaaacatatatttgccaacaatgagtcttgctactgacacgaaaacaggcaggagccttaagctaagatcttggaaaagcccgtttgatccatcgcctggacgatactctgcaggtttgattcctctgccatttccagaacttgttgtctggaaagatgatcttctgatgtggcgtagcggtccatggaatggtcaatacttcattgggttaccaaatatggattaccgtatcaatcttttcgagttaacccttagtagtgacaatcgaggatctgtctccatgtcctatgctggaaatactttgttgtatcattttctcttggactccgaaggaagcgtgtttcagagagattggaacgtggctatccaagaatggaagacctggttaaaggtcccatcgaccaagtgtgatacatacgccacatgtggccaattcgctagttgcagattcaatcccgggtcgactccgccttgcatgtgcattagagggtttaagccacagagttacgcggagtggaacaacggaaactggactcagggatgcgtaagaaaggcaccattgcagtgcgaaagtcgagacaacaacgatggaagtagaaaaagtgatggatttgtgagagtgcaaaagatgaaagtgccccacaatccacaacgatctggagccaatgaacaagactgtcctgagagctgtctgaagaactgttcttgtacggcttactcattcgacagagggattggttgtcttctttggagcggaaacttgatggatatgcaggagttttctggcactggcgtggttttttacattcgtcttgcagattcagagtttaaaaagcggaccaatcggtcaattgtgatcacagtaactttgctagtaggcgcttttttgtttgcagggactgttgtcttagcactgtggaagatcgctaagcatagagagaagaacagaaacacaaggctacttaatgagagaatggaagctttaagtagtaatgacgttggtgcaatccttgtgaatcaatacaagcttaaagagctaccactgttcgagttccaagtgttagcagtggcgaccaacaatttttctatcacaaacaagctcggacaaggaggatttggtgctgtttacaaggggaggttacaagaagggctcgatatcgctgtgaagaggctttcgcgaacatcgggacaaggagtcgaggagtttgtgaatgaagtggtcgtgatctcaaagctgcaacaccggaatctcgtgagattgcttggtttctgcattgaaggagaagagaggatgttggtctatgagttcatgccagagaattgtttagacgcatatctatttgacccggtgaagcaaagacttcttgactggaagacgcggtttaacataatcgatgggatttgcagaggtcttatgtaccttcacagagattcaaggctgaagatcatacacagagatctaaaagcaagcaatattttgttagatgagaatctaaacccgaagatatccgactttgggctggctaggattttccaggggaatgaggatgaagtaagcaccgtaagagtggttggaacatacggttatatggcacccgaatatgcaatgggagggttgttctcagagaaatctgacgttttcagcttaggagtcatactcttagagattgtgagtggaagaagaaactcaagcttttacaatgatgggcagaatccaaatctttcagcttatgcatggaaactctggaacaccggggaagatattgctcttgtggatccggtcatctttgaagagtgttttgaaaatgaaatacgcagatgtgtgcacgtaggactattgtgtgtacaagatcacgcaaatgataggccgagcgttgcaacggtgatttggatgctaagtagcgagaactcaaaccttccagagccaaagcaacctgcatttatacctagaaggggcacttcagaagttgaatcctcgggacaaagcgacccaagagcatcgatcaacaatgtgagcctcacaaaaataacaggacgttag

SEQ ID NO: 91348 - protein, 830 aa, Arabidopsis thaliana
  peptide (1)..(830): Ceres Seq. ID no. 12727379
MGCLLILLLTLICFSLRLCLATDVITFSSEFRDSETVVSNHSTFRFGFFSPVNSTGRYAGIWFNNIPVQTVVWVANSNSPINDSSGMVSISKEGNLVVMDGRGQVHWSTNVLVPVAANTFYARLLNTGNLVLLGTTNTGDEILWESFEHPQNIYLPTMSLATDTKTGRSLKLRSWKSPFDPSPGRYSAGLIPLPFPELVVWKDDLLMWRSGPWNGQYFIGLPNMDYRINLFELTLSSDNRGSVSMSYAGNTLLYHFLLDSEGSVFQRDWNVAIQEWKTWLKVPSTKCDTYATCGQFASCRFNPGSTPPCMCIRGFKPQSYAEWNNGNWTQGCVRKAPLQCESRDNNDGSRKSDGFVRVQKMKVPHNPQRSGANEQDCPESCLKNCSCTAYSFDRGIGCLLWSGNLMDMQEFSGTGVVFYIRLADSEFKKRTNRSIVITVTLLVGAFLFAGTVVLALWKIAKHREKNRNTRLLNERMEALSSNDVGAILVNQYKLKELPLFEFQVLAVATNNFSITNKLGQGGFGAVYKGRLQEGLDIAVKRLSRTSGQGVEEFVNEVVVISKLQHRNLVRLLGFCIEGEERMLVYEFMPENCLDAYLFDPVKQRLLDWKTRFNIIDGICRGLMYLHRDSRLKIIHRDLKASNILLDENLNPKISDFGLARIFQGNEDEVSTVRVVGTYGYMAPEYAMGGLFSEKSDVFSLGVILLEIVSGRRNSSFYNDGQNPNLSAYAWKLWNTGEDIALVDPVIFEECFENEIRRCVHVGLLCVQDHANDRPSVATVIWMLSSENSNLPEPKQPAFIPRRGTSEVESSGQSDPRASINNVSLTKITGR

SEQ ID NO: 91349 - protein, 744 aa, Arabidopsis thaliana
  peptide (1)..(744): Ceres Seq. ID no. 12727380
MVSISKEGNLVVMDGRGQVHWSTNVLVPVAANTFYARLLNTGNLVLLGTTNTGDEILWESFEHPQNIYLPTMSLATDTKTGRSLKLRSWKSPFDPSPGRYSAGLIPLPFPELVVWKDDLLMWRSGPWNGQYFIGLPNMDYRINLFELTLSSDNRGSVSMSYAGNTLLYHFLLDSEGSVFQRDWNVAIQEWKTWLKVPSTKCDTYATCGQFASCRFNPGSTPPCMCIRGFKPQSYAEWNNGNWTQGCVRKAPLQCESRDNNDGSRKSDGFVRVQKMKVPHNPQRSGANEQDCPESCLKNCSCTAYSFDRGIGCLLWSGNLMDMQEFSGTGVVFYIRLADSEFKKRTNRSIVITVTLLVGAFLFAGTVVLALWKIAKHREKNRNTRLLNERMEALSSNDVGAILVNQYKLKELPLFEFQVLAVATNNFSITNKLGQGGFGAVYKGRLQEGLDIAVKRLSRTSGQGVEEFVNEVVVISKLQHRNLVRLLGFCIEGEERMLVYEFMPENCLDAYLFDPVKQRLLDWKTRFNIIDGICRGLMYLHRDSRLKIIHRDLKASNILLDENLNPKISDFGLARIFQGNEDEVSTVRVVGTYGYMAPEYAMGGLFSEKSDVFSLGVILLEIVSGRRNSSFYNDGQNPNLSAYAWKLWNTGEDIALVDPVIFEECFENEIRRCVHVGLLCVQDHANDRPSVATVIWMLSSENSNLPEPKQPAFIPRRGTSEVESSGQSDPRASINNVSLTKITGR

SEQ ID NO: 91350 - protein, 732 aa, Arabidopsis thaliana
  peptide (1)..(732): Ceres Seq. ID no. 12727381
MDGRGQVHWSTNVLVPVAANTFYARLLNTGNLVLLGTTNTGDEILWESFEHPQNIYLPTMSLATDTKTGRSLKLRSWKSPFDPSPGRYSAGLIPLPFPELVVWKDDLLMWRSGPWNGQYFIGLPNMDYRINLFELTLSSDNRGSVSMSYAGNTLLYHFLLDSEGSVFQRDWNVAIQEWKTWLKVPSTKCDTYATCGQFASCRFNPGSTPPCMCIRGFKPQSYAEWNNGNWTQGCVRKAPLQCESRDNNDGSRKSDGFVRVQKMKVPHNPQRSGANEQDCPESCLKNCSCTAYSFDRGIGCLLWSGNLMDMQEFSGTGVVFYIRLADSEFKKRTNRSIVITVTLLVGAFLFAGTVVLALWKIAKHREKNRNTRLLNERMEALSSNDVGAILVNQYKLKELPLFEFQVLAVATNNFSITNKLGQGGFGAVYKGRLQEGLDIAVKRLSRTSGQGVEEFVNEVVVISKLQHRNLVRLLGFCIEGEERMLVYEFMPENCLDAYLFDPVKQRLLDWKTRFNIIDGICRGLMYLHRDSRLKIIHRDLKASNILLDENLNPKISDFGLARIFQGNEDEVSTVRVVGTYGYMAPEYAMGGLFSEKSDVFSLGVILLEIVSGRRNSSFYNDGQNPNLSAYAWKLWNTGEDIALVDPVIFEECFENEIRRCVHVGLLCVQDHANDRPSVATVIWMLSSENSNLPEPKQPAFIPRRGTSEVESSGQSDPRASINNVSLTKITGR

SEQ ID NO: 91351 - DNA, 1059 bp, Arabidopsis thaliana
  misc_feature (1)..(1059): Ceres Seq. ID no. 12727382
  misc_feature (1)..(1059): Ortholog of  Ceres SEQ ID NO 13595351 as cited in SEQ ID NO 55934
  misc_feature (1)..(1059): Ortholog of  Ceres SEQ ID NO 13639645 as cited in SEQ ID NO 57488
atgggtgaggatatgcgaggagtgaaagtagtctcaaaatggccaccgatgatagttatggtgacatcacaagtagcgatgggttcggtgaatgcacttgtgaagaaagctcttgatgttggtgtgaaccatatgatcattggtgcttatcgaatggctatttcctctttcattctggttcctatcgcctattttttggaaaggaaaataataccgaaaataacgtttaggctaatggtcgatcatttcatcagtggtttgctcggggcgagtttgatgcaatttttctatttgcttggtctgtcctacacgtcagcaactgttgcgtgtgctttggtaagcttgatgcctgcaatcacctttgctttcgctcttattttgagaactgagaagataaaagatctaaagacccaagcaggaatgataaaagtgatgggaactctaatatgtataagtggagctttgttcttaacattttacaaaggccctcatatatcaaactctcactctcacctagaggctcttcctcacaacaacagcgatcacaacaccaagaattggcttcttggatgtctctacttagtcataggaatcgtgttgctatctctatggatattgtttcaagggactttaagcatcaagtatccttgcaaattctcaagcacttgtctcatgtcaattttcgcagcttttcaatgtgctctattgagtctttacaagagtagagaccttaaacattggatcatcgacgatggatttgtgattggtgtcataatatatgctggagtgataggacaagcaatgtcgactgtagcagcgacatggggaataaacagattaggagctgttttcgcatcagcaattatgccagtttctctcatatcggctactctattcgatttccttatcttacacactcctttatacctcggaagtgtgattggatcagtagggacaataataggtctctacgtgttcttgtggggtaagaacaaagaaacggaagcagacataactacattgtcttctcggatgaacaacgaagatcaacgagtctag

SEQ ID NO: 91352 - protein, 352 aa, Arabidopsis thaliana
  peptide (1)..(352): Ceres Seq. ID no. 12727383
MGEDMRGVKVVSKWPPMIVMVTSQVAMGSVNALVKKALDVGVNHMIIGAYRMAISSFILVPIAYFLERKIIPKITFRLMVDHFISGLLGASLMQFFYLLGLSYTSATVACALVSLMPAITFAFALILRTEKIKDLKTQAGMIKVMGTLICISGALFLTFYKGPHISNSHSHLEALPHNNSDHNTKNWLLGCLYLVIGIVLLSLWILFQGTLSIKYPCKFSSTCLMSIFAAFQCALLSLYKSRDLKHWIIDDGFVIGVIIYAGVIGQAMSTVAATWGINRLGAVFASAIMPVSLISATLFDFLILHTPLYLGSVIGSVGTIIGLYVFLWGKNKETEADITTLSSRMNNEDQRV

SEQ ID NO: 91353 - protein, 348 aa, Arabidopsis thaliana
  peptide (1)..(348): Ceres Seq. ID no. 12727384
MRGVKVVSKWPPMIVMVTSQVAMGSVNALVKKALDVGVNHMIIGAYRMAISSFILVPIAYFLERKIIPKITFRLMVDHFISGLLGASLMQFFYLLGLSYTSATVACALVSLMPAITFAFALILRTEKIKDLKTQAGMIKVMGTLICISGALFLTFYKGPHISNSHSHLEALPHNNSDHNTKNWLLGCLYLVIGIVLLSLWILFQGTLSIKYPCKFSSTCLMSIFAAFQCALLSLYKSRDLKHWIIDDGFVIGVIIYAGVIGQAMSTVAATWGINRLGAVFASAIMPVSLISATLFDFLILHTPLYLGSVIGSVGTIIGLYVFLWGKNKETEADITTLSSRMNNEDQRV

SEQ ID NO: 91354 - protein, 336 aa, Arabidopsis thaliana
  peptide (1)..(336): Ceres Seq. ID no. 12727385
MIVMVTSQVAMGSVNALVKKALDVGVNHMIIGAYRMAISSFILVPIAYFLERKIIPKITFRLMVDHFISGLLGASLMQFFYLLGLSYTSATVACALVSLMPAITFAFALILRTEKIKDLKTQAGMIKVMGTLICISGALFLTFYKGPHISNSHSHLEALPHNNSDHNTKNWLLGCLYLVIGIVLLSLWILFQGTLSIKYPCKFSSTCLMSIFAAFQCALLSLYKSRDLKHWIIDDGFVIGVIIYAGVIGQAMSTVAATWGINRLGAVFASAIMPVSLISATLFDFLILHTPLYLGSVIGSVGTIIGLYVFLWGKNKETEADITTLSSRMNNEDQRV

SEQ ID NO: 91355 - DNA, 1014 bp, Arabidopsis thaliana
  misc_feature (1)..(1014): Ceres Seq. ID no. 12727386
  misc_feature (1)..(1014): Ortholog of  Ceres SEQ ID NO 13595351 as cited in SEQ ID NO 55934
  misc_feature (1)..(1014): Ortholog of  Ceres SEQ ID NO 13639645 as cited in SEQ ID NO 57488
atgggtgaggatatgcgagtagtgaaagtagaatcaaaatggccaccgataatagtaatggtaatatcacaagtagcaatgggttcggtgaatgcacttgtgaagaaagctcttgatgttggtgtgaaccatatgatcattggtgcttatcgaattgctatttcctctttcattctggctcctatcgcctatattttggaaagggaaataataccggaaataacgtttaggctaatggtcgatcatttcatcagtggattgctcggggcgagtttgatgcaatttttctatttgcttggtctgtcttacacgtcagcaactgttgcgtgtgctttggtaagcttgatgcctgcaatcacctttgctttcgctcttattttgaggactgaaaagataaaaagtctaagaacccaagcaggaatgataaaagtgatgggaactattatatgtataagtggagctttgttcttaacattttacaaaggccctcatatatcaaactctcactctcaccaagaggctcttcctcacaacaacaacagcgatcacaacacaaagaattggcttcttggatgtctctacttaaccataggaaccgtgttgatatctctatggattttgtttcaagggactttaagcatcaagtacccttgcaaattctcaagcacttgtctcatgtcaattttcgcagcttttcaatgtgctctattgagtctttacaagagtagagatgttaaagattggatcatcgatgatagatttgtgatcggtgtcatcgtatatgctggagtgataggacaagcaatgtcgacggtatcagtgacatggggggtgaagaaattaggagctgttttcgtatcagcaattatgccaatagctctcatttcggctagtctattcgatttcataatcttacacactcctttatacctcggaagtctgattggatcagtagggacaataacaggtctctacgtgttcttgtggggtaagaacaaagatatggaagcataa

SEQ ID NO: 91356 - protein, 337 aa, Arabidopsis thaliana
  peptide (1)..(337): Ceres Seq. ID no. 12727387
MGEDMRVVKVESKWPPIIVMVISQVAMGSVNALVKKALDVGVNHMIIGAYRIAISSFILAPIAYILEREIIPEITFRLMVDHFISGLLGASLMQFFYLLGLSYTSATVACALVSLMPAITFAFALILRTEKIKSLRTQAGMIKVMGTIICISGALFLTFYKGPHISNSHSHQEALPHNNNSDHNTKNWLLGCLYLTIGTVLISLWILFQGTLSIKYPCKFSSTCLMSIFAAFQCALLSLYKSRDVKDWIIDDRFVIGVIVYAGVIGQAMSTVSVTWGVKKLGAVFVSAIMPIALISASLFDFIILHTPLYLGSLIGSVGTITGLYVFLWGKNKDMEA

SEQ ID NO: 91357 - protein, 333 aa, Arabidopsis thaliana
  peptide (1)..(333): Ceres Seq. ID no. 12727388
MRVVKVESKWPPIIVMVISQVAMGSVNALVKKALDVGVNHMIIGAYRIAISSFILAPIAYILEREIIPEITFRLMVDHFISGLLGASLMQFFYLLGLSYTSATVACALVSLMPAITFAFALILRTEKIKSLRTQAGMIKVMGTIICISGALFLTFYKGPHISNSHSHQEALPHNNNSDHNTKNWLLGCLYLTIGTVLISLWILFQGTLSIKYPCKFSSTCLMSIFAAFQCALLSLYKSRDVKDWIIDDRFVIGVIVYAGVIGQAMSTVSVTWGVKKLGAVFVSAIMPIALISASLFDFIILHTPLYLGSLIGSVGTITGLYVFLWGKNKDMEA

SEQ ID NO: 91358 - protein, 318 aa, Arabidopsis thaliana
  peptide (1)..(318): Ceres Seq. ID no. 12727389
MVISQVAMGSVNALVKKALDVGVNHMIIGAYRIAISSFILAPIAYILEREIIPEITFRLMVDHFISGLLGASLMQFFYLLGLSYTSATVACALVSLMPAITFAFALILRTEKIKSLRTQAGMIKVMGTIICISGALFLTFYKGPHISNSHSHQEALPHNNNSDHNTKNWLLGCLYLTIGTVLISLWILFQGTLSIKYPCKFSSTCLMSIFAAFQCALLSLYKSRDVKDWIIDDRFVIGVIVYAGVIGQAMSTVSVTWGVKKLGAVFVSAIMPIALISASLFDFIILHTPLYLGSLIGSVGTITGLYVFLWGKNKDMEA

SEQ ID NO: 91359 - DNA, 1521 bp, Arabidopsis thaliana
  misc_feature (1)..(1521): Ceres Seq. ID no. 12727390
  misc_feature (1)..(1521): Ortholog of  Ceres SEQ ID NO 13594037 as cited in SEQ ID NO 55666
  misc_feature (1)..(1521): Ortholog of  Ceres SEQ ID NO 13657707 as cited in SEQ ID NO 66407
atggtggttattggtgttagcaaagaatattgtgatgacaaacagtcatgtcaaaactttttgttggagcttaaggcgggttcatcgtcactctcggagattagacgtcgtgacttattgatcatcgttttgaagaattccgtacggaggatcgacatggttatgattggtgtgatggatgatacaaaacaacatgaggagatggagaatgatttgcttggtgtgaaggaggacacaaaactatttgaggagatgatggagtcgacaaaagataggatgatccgttcggtggaggaactcttaggaggagaatttcctaatcgtggatcttacgagaacgtccacacttggctcagtagcgttcttactagttacatcacatgtatcgacgaaattggtgaaggtgcctataaacgccgtgtcgagccaaagcttgaagacctcatttctagggcaagaatagctttggctctctttatctccatttcaccgagagacaacaccgaacttatctcggtgattcccaatagcccttcttggttattccatgttgacaagaaagatctatatctcaatgctgagattgctgatgttgtggtcgcgaaggatgggaccggaaagtacagcacagtgaatgcggccattgcagcggcacctcaacacagccaaaagagattcgtcatctatataaagacaggcatttatgatgaaatcgtcgtcattgagaatacgaaacccaatttaactcttataggtgatggtcaagatttaaccatcatcacgagcaatttaagtgctagcaatgttagaagaacgttcaacaccgcaactgttgcttctaatggtaatggattcatcggagtagacatgtgcttccgaaacacggccgggccggcaaaaggaccagctgttgccctccgtgtgagtggtgatatgtccgtcatttatagatgccgtgtcgagggatatcaggatgccttgtatcctcacagtgaccgccagttttatagagagtgctttattaccggcactgtagatttcatttgtgggaacgcggtggcggtctttcaattctgccagattgtagcaagacaacctaagatggggcagagcaatgtcataaccgctcagtcacgcgcatttaaggacatttactcgggcttcacgattcaaaaatgcaacattactgcaagctcggatctagacacgacaaccgttaaaacgtatcttggaagaccttggaggatattttcaacagtcgcagttatgcagtctttcatcggtgatttagttgatcccgctggctggactccttgggaaggagaaactggtttgtcaactctccactaccgcgaatatcaaaacaggggtccaggagctgtgactagcagaagggtgaagtggtcaggctttaaagttatgaaagatcctaaacaggctacagaattcactgtagccaagctcttagatggagaaacttggttgaaagaaactcgaatcccatatgaaagtggattgtaa

SEQ ID NO: 91360 - protein, 506 aa, Arabidopsis thaliana
  peptide (1)..(506): Ceres Seq. ID no. 12727391
MVVIGVSKEYCDDKQSCQNFLLELKAGSSSLSEIRRRDLLIIVLKNSVRRIDMVMIGVMDDTKQHEEMENDLLGVKEDTKLFEEMMESTKDRMIRSVEELLGGEFPNRGSYENVHTWLSSVLTSYITCIDEIGEGAYKRRVEPKLEDLISRARIALALFISISPRDNTELISVIPNSPSWLFHVDKKDLYLNAEIADVVVAKDGTGKYSTVNAAIAAAPQHSQKRFVIYIKTGIYDEIVVIENTKPNLTLIGDGQDLTIITSNLSASNVRRTFNTATVASNGNGFIGVDMCFRNTAGPAKGPAVALRVSGDMSVIYRCRVEGYQDALYPHSDRQFYRECFITGTVDFICGNAVAVFQFCQIVARQPKMGQSNVITAQSRAFKDIYSGFTIQKCNITASSDLDTTTVKTYLGRPWRIFSTVAVMQSFIGDLVDPAGWTPWEGETGLSTLHYREYQNRGPGAVTSRRVKWSGFKVMKDPKQATEFTVAKLLDGETWLKETRIPYESGL

SEQ ID NO: 91361 - protein, 454 aa, Arabidopsis thaliana
  peptide (1)..(454): Ceres Seq. ID no. 12727392
MVMIGVMDDTKQHEEMENDLLGVKEDTKLFEEMMESTKDRMIRSVEELLGGEFPNRGSYENVHTWLSSVLTSYITCIDEIGEGAYKRRVEPKLEDLISRARIALALFISISPRDNTELISVIPNSPSWLFHVDKKDLYLNAEIADVVVAKDGTGKYSTVNAAIAAAPQHSQKRFVIYIKTGIYDEIVVIENTKPNLTLIGDGQDLTIITSNLSASNVRRTFNTATVASNGNGFIGVDMCFRNTAGPAKGPAVALRVSGDMSVIYRCRVEGYQDALYPHSDRQFYRECFITGTVDFICGNAVAVFQFCQIVARQPKMGQSNVITAQSRAFKDIYSGFTIQKCNITASSDLDTTTVKTYLGRPWRIFSTVAVMQSFIGDLVDPAGWTPWEGETGLSTLHYREYQNRGPGAVTSRRVKWSGFKVMKDPKQATEFTVAKLLDGETWLKETRIPYESGL

SEQ ID NO: 91362 - protein, 452 aa, Arabidopsis thaliana
  peptide (1)..(452): Ceres Seq. ID no. 12727393
MIGVMDDTKQHEEMENDLLGVKEDTKLFEEMMESTKDRMIRSVEELLGGEFPNRGSYENVHTWLSSVLTSYITCIDEIGEGAYKRRVEPKLEDLISRARIALALFISISPRDNTELISVIPNSPSWLFHVDKKDLYLNAEIADVVVAKDGTGKYSTVNAAIAAAPQHSQKRFVIYIKTGIYDEIVVIENTKPNLTLIGDGQDLTIITSNLSASNVRRTFNTATVASNGNGFIGVDMCFRNTAGPAKGPAVALRVSGDMSVIYRCRVEGYQDALYPHSDRQFYRECFITGTVDFICGNAVAVFQFCQIVARQPKMGQSNVITAQSRAFKDIYSGFTIQKCNITASSDLDTTTVKTYLGRPWRIFSTVAVMQSFIGDLVDPAGWTPWEGETGLSTLHYREYQNRGPGAVTSRRVKWSGFKVMKDPKQATEFTVAKLLDGETWLKETRIPYESGL

SEQ ID NO: 91363 - DNA, 1494 bp, Arabidopsis thaliana
  misc_feature (1)..(1494): Ceres Seq. ID no. 12727394
  misc_feature (1)..(1494): Ortholog of  Ceres SEQ ID NO 13594209 as cited in SEQ ID NO 59089
  misc_feature (1)..(1494): Ortholog of  Ceres SEQ ID NO 14302228 as cited in SEQ ID NO 65061
  misc_feature (1)..(1494): Ortholog of  Ceres SEQ ID NO 14308027 as cited in SEQ ID NO 65826
  misc_feature (1)..(1494): Ortholog of  Ceres SEQ ID NO 15169585 as cited in SEQ ID NO 66076
  misc_feature (1)..(1494): Ortholog of  Ceres SEQ ID NO 13502874 as cited in SEQ ID NO 66298
  misc_feature (1)..(1494): Ortholog of  Ceres SEQ ID NO 12614124 as cited in SEQ ID NO 68392
  misc_feature (1)..(1494): Ortholog of  Ceres SEQ ID NO 15176087 as cited in SEQ ID NO 68692
atggaaatgacattgatggtttctctgtgcttaacgaccctcttaacccttctcttacttaaaaaattcctcaaacgaaccgccaaaaaagtgaacttaccaccatctccatggcgaattccagtgattggaaacctccaccagctcagcctccaccctcaccgctccctccactccctcagcctcaggtatggcccactgatgctgcttcattttggccgtgtccccatactcgtagtctcctccagcgaagcagctcatgagatattgaaaacacacgatcttaagtttgccaaccgcccgaaatcaaaagccgttcatggacttatgaatggtgggcgtgatgtggtttttggtccctatggagaatattggagacagatgaagagtgtctgcattctcaatctactcaccaacaaaatggttgcatcctttgagaaggtaagagaggaagaggtaaatgcaatgatggagaagctagagaaagcaagttgttcttcttcagcagaaaatctgagtgaactctttgttactctaacaagtgatgtcacgagtagagtttccttggggaaaaaatattgggaggacgaaaccgcagggggtctcaagaagcgagtgaggcagatcatggagcttttacgcgagttcccaatcggggactatgtcccggctttggcatggatagacaggatcaacggtttcaattctaagattgtggaagtgagtcgagcgtatagtgatcttatggaaaaagtggtgcaagaacatttagaggcgggcgaacataaagcggatttcgtcaatatactgttatcaatcgaaaaagaaaagaataatggattcaaagttcaaagaaacgacataaaatttatgatcttggatatgtttataggaggtatttcaacaagttcaactctactagaatggataatgacggagctgatcagaaatccagagtgtatgaagaaactccaaaacgagattcggtcaaccattaggccacatggttcatacataaaagaaaaagaagttgaaaatatgagatacttgaaagcagtgattaaagaggtgtttcgggtgcatcctcctcttccactaatacttcccagactattaactgaagatgttaaagtaaagggatatgacatagccgcagggaccgaggtgttaatcaatgcttggtcaatccatagagaccccgcgatatggggaccggatgcagaagaattcaaaccagagagacacttagattcaactttggattatcatggacaagatttgaaatacatcccattcggatcaggtagaagaatttgtcccgggataaatcttgctatgggtttggtagaggttacattggccaaccttgtaggccgatttgactggagtgtcgatcctggaccaaatggggatcaacctgatctagctgaagattttggtctcgatgtttgtcgcaagaaccctctcattgcatttccatcttccgttgcatga

SEQ ID NO: 91364 - protein, 497 aa, Arabidopsis thaliana
  peptide (1)..(497): Ceres Seq. ID no. 12727395
MEMTLMVSLCLTTLLTLLLLKKFLKRTAKKVNLPPSPWRIPVIGNLHQLSLHPHRSLHSLSLRYGPLMLLHFGRVPILVVSSSEAAHEILKTHDLKFANRPKSKAVHGLMNGGRDVVFGPYGEYWRQMKSVCILNLLTNKMVASFEKVREEEVNAMMEKLEKASCSSSAENLSELFVTLTSDVTSRVSLGKKYWEDETAGGLKKRVRQIMELLREFPIGDYVPALAWIDRINGFNSKIVEVSRAYSDLMEKVVQEHLEAGEHKADFVNILLSIEKEKNNGFKVQRNDIKFMILDMFIGGISTSSTLLEWIMTELIRNPECMKKLQNEIRSTIRPHGSYIKEKEVENMRYLKAVIKEVFRVHPPLPLILPRLLTEDVKVKGYDIAAGTEVLINAWSIHRDPAIWGPDAEEFKPERHLDSTLDYHGQDLKYIPFGSGRRICPGINLAMGLVEVTLANLVGRFDWSVDPGPNGDQPDLAEDFGLDVCRKNPLIAFPSSVA

SEQ ID NO: 91365 - protein, 495 aa, Arabidopsis thaliana
  peptide (1)..(495): Ceres Seq. ID no. 12727396
MTLMVSLCLTTLLTLLLLKKFLKRTAKKVNLPPSPWRIPVIGNLHQLSLHPHRSLHSLSLRYGPLMLLHFGRVPILVVSSSEAAHEILKTHDLKFANRPKSKAVHGLMNGGRDVVFGPYGEYWRQMKSVCILNLLTNKMVASFEKVREEEVNAMMEKLEKASCSSSAENLSELFVTLTSDVTSRVSLGKKYWEDETAGGLKKRVRQIMELLREFPIGDYVPALAWIDRINGFNSKIVEVSRAYSDLMEKVVQEHLEAGEHKADFVNILLSIEKEKNNGFKVQRNDIKFMILDMFIGGISTSSTLLEWIMTELIRNPECMKKLQNEIRSTIRPHGSYIKEKEVENMRYLKAVIKEVFRVHPPLPLILPRLLTEDVKVKGYDIAAGTEVLINAWSIHRDPAIWGPDAEEFKPERHLDSTLDYHGQDLKYIPFGSGRRICPGINLAMGLVEVTLANLVGRFDWSVDPGPNGDQPDLAEDFGLDVCRKNPLIAFPSSVA

SEQ ID NO: 91366 - protein, 492 aa, Arabidopsis thaliana
  peptide (1)..(492): Ceres Seq. ID no. 12727397
MVSLCLTTLLTLLLLKKFLKRTAKKVNLPPSPWRIPVIGNLHQLSLHPHRSLHSLSLRYGPLMLLHFGRVPILVVSSSEAAHEILKTHDLKFANRPKSKAVHGLMNGGRDVVFGPYGEYWRQMKSVCILNLLTNKMVASFEKVREEEVNAMMEKLEKASCSSSAENLSELFVTLTSDVTSRVSLGKKYWEDETAGGLKKRVRQIMELLREFPIGDYVPALAWIDRINGFNSKIVEVSRAYSDLMEKVVQEHLEAGEHKADFVNILLSIEKEKNNGFKVQRNDIKFMILDMFIGGISTSSTLLEWIMTELIRNPECMKKLQNEIRSTIRPHGSYIKEKEVENMRYLKAVIKEVFRVHPPLPLILPRLLTEDVKVKGYDIAAGTEVLINAWSIHRDPAIWGPDAEEFKPERHLDSTLDYHGQDLKYIPFGSGRRICPGINLAMGLVEVTLANLVGRFDWSVDPGPNGDQPDLAEDFGLDVCRKNPLIAFPSSVA

SEQ ID NO: 91367 - DNA, 1324 bp, Arabidopsis thaliana
  misc_feature (1)..(1324): Ceres Seq. ID no. 12727409
  misc_feature (1)..(1324): Ortholog of  Ceres SEQ ID NO 12617323 as cited in SEQ ID NO 64129
gcgcgacgtgcccaatcatttcttctgatccgatctgactctgcacccacccatcaatggcctccagatctctcaatggcgattccgacattgtgaagccgaggaagattgcactggtcaccggaatcactggccaagatggatcttacctgaccgagttcctgctcgagaaaggctacgaagttcacggcctcatccgacgatcctccaattttaacactcagcgactcaaccatatctacgttgatccccacaacgtcaacaaagctctcatgaagctccactacggtgatctctctgatgcctcctccctccgccgttggctcgacgtcatcaagcctgacgaggtctacaaccttgctgctcagtcccacgttgccgtctccttcgagatccctgattacactgctgacgttgtcgctactggagctcttcgtctcctggaggctgtcagatctcacaacattgacaatggccgcgccatcaagtactaccaggctggctcttcggagatgttcgggtcaactcctcctccgcagtcagagaccacgcccttccatccgagatctccctacgctgcgtccaaatgcgctgctcattggtacacagtcaattaccgagaggcctacggtctgtacgcctgcaacggaatcctcttcaaccacgagtcacctcgcagaggcgagaacttcgtgactcggaaaatcactcgggccttgggaaggatcaaggtcggattgcagaccaagctcttcctgggaaatatacaggcttcaagagactggggtttcgcaggagactacgtggaagcaatgtggctgatgctgcagcaggagaaaccagatgactatgtggttgcaactgaggaatcacacaccgtcaaggagtttctggacgtgtctttcgggtacgtggggctcaactggaaagaccatgtcgagatcgacaaaaggtacttccggcccacggaggtcgacaatctgaaaggagacgcaagcaaggcaaaggaaatgttggggtggaagccaaaagtagggttcgagaagctggtgaagatgatggtggacgaagaccttgagctggccaagagggagaaagtgctcgccgacgctggttacatggacgctcagcagcaaccttgatatggggaggtggcaaagaagagtaatcattatctgctttttcattgaaatgtaattttgtttcatttgttgttgttctctttcgttgtttcaagttgttcaactccatacactgccaatcgtccattgtggattttgtatcaaaaggcaaacaaagcatatttattacatatgaattttcc

SEQ ID NO: 91368 - protein, 361 aa, Arabidopsis thaliana
  peptide (1)..(361): Ceres Seq. ID no. 12727410
MASRSLNGDSDIVKPRKIALVTGITGQDGSYLTEFLLEKGYEVHGLIRRSSNFNTQRLNHIYVDPHNVNKALMKLHYGDLSDASSLRRWLDVIKPDEVYNLAAQSHVAVSFEIPDYTADVVATGALRLLEAVRSHNIDNGRAIKYYQAGSSEMFGSTPPPQSETTPFHPRSPYAASKCAAHWYTVNYREAYGLYACNGILFNHESPRRGENFVTRKITRALGRIKVGLQTKLFLGNIQASRDWGFAGDYVEAMWLMLQQEKPDDYVVATEESHTVKEFLDVSFGYVGLNWKDHVEIDKRYFRPTEVDNLKGDASKAKEMLGWKPKVGFEKLVKMMVDEDLELAKREKVLADAGYMDAQQQP

SEQ ID NO: 91369 - protein, 289 aa, Arabidopsis thaliana
  peptide (1)..(289): Ceres Seq. ID no. 12727411
MKLHYGDLSDASSLRRWLDVIKPDEVYNLAAQSHVAVSFEIPDYTADVVATGALRLLEAVRSHNIDNGRAIKYYQAGSSEMFGSTPPPQSETTPFHPRSPYAASKCAAHWYTVNYREAYGLYACNGILFNHESPRRGENFVTRKITRALGRIKVGLQTKLFLGNIQASRDWGFAGDYVEAMWLMLQQEKPDDYVVATEESHTVKEFLDVSFGYVGLNWKDHVEIDKRYFRPTEVDNLKGDASKAKEMLGWKPKVGFEKLVKMMVDEDLELAKREKVLADAGYMDAQQQP

SEQ ID NO: 91370 - protein, 209 aa, Arabidopsis thaliana
  peptide (1)..(209): Ceres Seq. ID no. 12727412
MFGSTPPPQSETTPFHPRSPYAASKCAAHWYTVNYREAYGLYACNGILFNHESPRRGENFVTRKITRALGRIKVGLQTKLFLGNIQASRDWGFAGDYVEAMWLMLQQEKPDDYVVATEESHTVKEFLDVSFGYVGLNWKDHVEIDKRYFRPTEVDNLKGDASKAKEMLGWKPKVGFEKLVKMMVDEDLELAKREKVLADAGYMDAQQQP

SEQ ID NO: 91371 - DNA, 1669 bp, Arabidopsis thaliana
  misc_feature (1)..(1669): Ceres Seq. ID no. 12727415
  misc_feature (1)..(1669): Ortholog of  Ceres SEQ ID NO 14315162 as cited in SEQ ID NO 60005
  misc_feature (1)..(1669): Ortholog of  Ceres SEQ ID NO 13659881 as cited in SEQ ID NO 66938
agagaatttaataagagaggaagagtattaaggtgatggcggcgttgcagagcgcgagacagagaaagaaacctctctgagatacatctctctctctctctctatcccctcttaaatacactccataccgacaaaccaacttttttctcagtactaaaagaaacctctattcgatttctaaacaaaccctagatatagactactctacattcttccattaagttaatctctttcgtcttcttcttcttcatcctctcataattaaagatctctatcaagagagagatcttttattgtcttcttctgttaaaatcttttgatagatcttcactctctgaaagtcaagatcttagtctaggcaagtaaatatgtggtaaagcaaagcccttcttgaaattggtcatatatggctggtggtatcggaaaatggcaggatttttctcgttaggacacggcggaggaggaaacactccagacaaccacagaacaaacactaataatccttcttcatcgggaacagaatcttggctttggtgcagaaaccctaactctaacgctgacggtggagaagctggtccttcttacaaaggaacccttgagctatggcaacacccaaacaatcaagaaatcattttccagcagcagcagcaacagcaacaaaggctggatctttacacttccgctgcgggtttaggtgttggaccgagcaaccggagcttaattgaaacttccggcggtgcgttgatgatgatgagaagcggtagcggtagcggcggaccaagctgccaggattgtgggaatcaatctaagaaagactgctctcacatgagatgtaggacttgctgcaagagccgtggccttgactgtcccactcacgtgaagagcacgtgggttcctgccgctaaacgccgagaacgccagcagcagctttctaccggtcagcaaccgcagcaactgggagggagcgtccctaaacgacagagagagcgtatcccggcgagatcgacttccatggcctacactcgtataccttctaacaacacttcagggttggaggttgggaattttccgccggaagttagctcgtcggcagtttttcggtgcgtgcgtgtgagttccgtagatgatgaagaagaagagtatgcatataaaacagctgtgagtataggcggtcacgtcttcaaaggtgttctctacgatcaaggcccggccgagagaagctcctcgggcggtggatctcagccgttgaatctcataaccgcaggcccatcggcctcatcatcaagcccaaacgtgagctgcaacaatggagtcgttggctccacttcagatcattatatcgatcctgcctcacttaattatcctactcccattaacactttcatgactggtacgcacttcttctccaactcaagatcttgaattccacacagagagagtacaacaaatcataacttttttttagattcttacggtagaattagggttttaaaacatcttcggaggtgaagattataacgtactaatcttggttttcaaaagtaattaactaagggagataatgttctattaaaacaattgttacctgatcttttattattaagttcaaattttgtaggtataatgttaatgtaatagtatactccaattttcaactgttacaaaagtc

SEQ ID NO: 91372 - protein, 331 aa, Arabidopsis thaliana
  peptide (1)..(331): Ceres Seq. ID no. 12727416
MAGFFSLGHGGGGNTPDNHRTNTNNPSSSGTESWLWCRNPNSNADGGEAGPSYKGTLELWQHPNNQEIIFQQQQQQQQRLDLYTSAAGLGVGPSNRSLIETSGGALMMMRSGSGSGGPSCQDCGNQSKKDCSHMRCRTCCKSRGLDCPTHVKSTWVPAAKRRERQQQLSTGQQPQQLGGSVPKRQRERIPARSTSMAYTRIPSNNTSGLEVGNFPPEVSSSAVFRCVRVSSVDDEEEEYAYKTAVSIGGHVFKGVLYDQGPAERSSSGGGSQPLNLITAGPSASSSSPNVSCNNGVVGSTSDHYIDPASLNYPTPINTFMTGTHFFSNSRS

SEQ ID NO: 91373 - protein, 225 aa, Arabidopsis thaliana
  peptide (1)..(225): Ceres Seq. ID no. 12727417
MMMRSGSGSGGPSCQDCGNQSKKDCSHMRCRTCCKSRGLDCPTHVKSTWVPAAKRRERQQQLSTGQQPQQLGGSVPKRQRERIPARSTSMAYTRIPSNNTSGLEVGNFPPEVSSSAVFRCVRVSSVDDEEEEYAYKTAVSIGGHVFKGVLYDQGPAERSSSGGGSQPLNLITAGPSASSSSPNVSCNNGVVGSTSDHYIDPASLNYPTPINTFMTGTHFFSNSRS

SEQ ID NO: 91374 - protein, 224 aa, Arabidopsis thaliana
  peptide (1)..(224): Ceres Seq. ID no. 12727418
MMRSGSGSGGPSCQDCGNQSKKDCSHMRCRTCCKSRGLDCPTHVKSTWVPAAKRRERQQQLSTGQQPQQLGGSVPKRQRERIPARSTSMAYTRIPSNNTSGLEVGNFPPEVSSSAVFRCVRVSSVDDEEEEYAYKTAVSIGGHVFKGVLYDQGPAERSSSGGGSQPLNLITAGPSASSSSPNVSCNNGVVGSTSDHYIDPASLNYPTPINTFMTGTHFFSNSRS

SEQ ID NO: 91375 - DNA, 1599 bp, Arabidopsis thaliana
  misc_feature (1)..(1599): Ceres Seq. ID no. 12727429
  misc_feature (1)..(1599): Ortholog of  Ceres SEQ ID NO 12586556 as cited in SEQ ID NO 64667
  misc_feature (1)..(1599): Ortholog of  Ceres SEQ ID NO 13660894 as cited in SEQ ID NO 67475
atgttcgcatgtttgcgtattggacgctttattcgtctgggtaacgttaccgttaaatccactaatttggtactgaggtgtgtctttatccgaaattttgccacccatgccgaccacctgttcgacgaattgccgcaacgagacctctcctcacttaactctcaactctcgtctcacctccgcagtggaaacccaaatgacaccttggctctctttcttcagattcatagggctagccctgatctcagctcgcacactttcactccggttctcggggcctgttccctcttgtcgtacccagaaacaggacgccaagttcacgccttgatgatcaaacaaggcgctgaaacaggaaccatatccaaaactgcgcttattgacatgtactccaagtacggacacttggttgattccgttagggtattcgaaagcgttgaggaaaaagatctcgtctcatggaatgctctgctttcgggtttccttagaaacggtaaaggcaaagaagctcttggcgttttcgcagctatgtatagagaaagagtagaaatcagtgagttcactttgtcttctgttgttaaaacttgtgcctctctcaagattttgcagcaagggaagcaagttcatgccatggtggtggtcaccggacgcgatctcgtggttttaggaactgcaatgattagtttttactcgagtgtaggtttgatcaatgaagccatgaaggtttataacagtttgaatgttcatacggacgaggtgatgttgaattctttgatatcaggttgcattcgaaaccgaaattacaaggaagcgtttctgcttatgagtaggcagagacccaatgtgagagtgctcagtagctctcttgctggctgctctgataactctgatctgtggattggtaaacagatacactgtgtcgctttacgtaatggtttcgtttcagattctaagctatgcaatggcttaatggatatgtatggaaaatgcggtcagattgtgcaagcgcgtactattttcagagctattccatctaaaagtgtggtttcttggacgagtatgatagatgcgtatgcggttaatggggatggggttaaagctcttgaaatcttcagggaaatgtgtgaagaaggaagcggagttttaccgaattcagtgacatttcttgttgttatatcggcttgtgcacacgcaggactagttaaagaaggtaaggaatgttttggtatgatgaaggagaagtatcggttggttcctggaacagagcattacgtatgcttcatcgatatcttaagcaaggctggtgagacagaagagatatggagattagtcgagagaatgatggagaacgataatcaaagcattccttgtgctatatgggtagcggtactcagtgcttgtagtcttaatatggatcttacgcgaggcgaatatgtagcaaggaggcttatggaagagacgggtccagagaacgcgagcatttatgtgttggtttcgaatttctatgcagcgatggggaagtgggatgtcgttgaagaattgagaggaaaactgaagaataaaggtttggttaaaacagcaggacacagcttattcatatga

SEQ ID NO: 91376 - protein, 532 aa, Arabidopsis thaliana
  peptide (1)..(532): Ceres Seq. ID no. 12727430
MFACLRIGRFIRLGNVTVKSTNLVLRCVFIRNFATHADHLFDELPQRDLSSLNSQLSSHLRSGNPNDTLALFLQIHRASPDLSSHTFTPVLGACSLLSYPETGRQVHALMIKQGAETGTISKTALIDMYSKYGHLVDSVRVFESVEEKDLVSWNALLSGFLRNGKGKEALGVFAAMYRERVEISEFTLSSVVKTCASLKILQQGKQVHAMVVVTGRDLVVLGTAMISFYSSVGLINEAMKVYNSLNVHTDEVMLNSLISGCIRNRNYKEAFLLMSRQRPNVRVLSSSLAGCSDNSDLWIGKQIHCVALRNGFVSDSKLCNGLMDMYGKCGQIVQARTIFRAIPSKSVVSWTSMIDAYAVNGDGVKALEIFREMCEEGSGVLPNSVTFLVVISACAHAGLVKEGKECFGMMKEKYRLVPGTEHYVCFIDILSKAGETEEIWRLVERMMENDNQSIPCAIWVAVLSACSLNMDLTRGEYVARRLMEETGPENASIYVLVSNFYAAMGKWDVVEELRGKLKNKGLVKTAGHSLFI

SEQ ID NO: 91377 - protein, 423 aa, Arabidopsis thaliana
  peptide (1)..(423): Ceres Seq. ID no. 12727431
MIKQGAETGTISKTALIDMYSKYGHLVDSVRVFESVEEKDLVSWNALLSGFLRNGKGKEALGVFAAMYRERVEISEFTLSSVVKTCASLKILQQGKQVHAMVVVTGRDLVVLGTAMISFYSSVGLINEAMKVYNSLNVHTDEVMLNSLISGCIRNRNYKEAFLLMSRQRPNVRVLSSSLAGCSDNSDLWIGKQIHCVALRNGFVSDSKLCNGLMDMYGKCGQIVQARTIFRAIPSKSVVSWTSMIDAYAVNGDGVKALEIFREMCEEGSGVLPNSVTFLVVISACAHAGLVKEGKECFGMMKEKYRLVPGTEHYVCFIDILSKAGETEEIWRLVERMMENDNQSIPCAIWVAVLSACSLNMDLTRGEYVARRLMEETGPENASIYVLVSNFYAAMGKWDVVEELRGKLKNKGLVKTAGHSLFI

SEQ ID NO: 91378 - protein, 405 aa, Arabidopsis thaliana
  peptide (1)..(405): Ceres Seq. ID no. 12727432
MYSKYGHLVDSVRVFESVEEKDLVSWNALLSGFLRNGKGKEALGVFAAMYRERVEISEFTLSSVVKTCASLKILQQGKQVHAMVVVTGRDLVVLGTAMISFYSSVGLINEAMKVYNSLNVHTDEVMLNSLISGCIRNRNYKEAFLLMSRQRPNVRVLSSSLAGCSDNSDLWIGKQIHCVALRNGFVSDSKLCNGLMDMYGKCGQIVQARTIFRAIPSKSVVSWTSMIDAYAVNGDGVKALEIFREMCEEGSGVLPNSVTFLVVISACAHAGLVKEGKECFGMMKEKYRLVPGTEHYVCFIDILSKAGETEEIWRLVERMMENDNQSIPCAIWVAVLSACSLNMDLTRGEYVARRLMEETGPENASIYVLVSNFYAAMGKWDVVEELRGKLKNKGLVKTAGHSLFI

SEQ ID NO: 91379 - DNA, 1863 bp, Arabidopsis thaliana
  misc_feature (1)..(1863): Ceres Seq. ID no. 12727433
  misc_feature (1)..(1863): Ortholog of  Ceres SEQ ID NO 12586556 as cited in SEQ ID NO 64667
  misc_feature (1)..(1863): Ortholog of  Ceres SEQ ID NO 14316045 as cited in SEQ ID NO 66810
atgaatgtgatctcatgctccttctcattggaacataatctctacgagacaatgtcttgtctccagagatgctcaaagcaagaagaactgaagcaaatccacgctcgcatgctgaaaactggcttgatgcaggattcttatgcaatcacaaagtttctttctttctgcatttcttcaacgtcttccgactttttgccttatgcccagattgtgtttgacgggtttgatcgaccagatactttcttgtggaacctaatgatcagagggttctcgtgctcagacgaacccgagaggtctcttctcctgtatcaacgtatgctctgttcttcagctcctcataacgcgtatacttttccgtctcttctcaaagcttgttcgaacctatctgcatttgaagaaacaacgcaaattcacgcacagatcacgaaacttggatatgaaaatgatgtctatgcagtgaattctctgattaattcatatgctgtgaccgggaatttcaagctagctcaccttctctttgacagaatccccgaacctgatgatgtctcgtggaactctgtgatcaaaggttatgtaaaagctggaaaaatggatattgcattaacgttattcaggaaaatggcagaaaagaatgctatatcatggactacgatgatctctgggtatgttcaagcagacatgaacaaggaagctctgcaattgtttcatgaaatgcagaattcagatgttgagcctgataatgtttccctagctaatgctctctcagcttgtgctcagctcggagcactcgagcaagggaaatggatccattcctatcttaataagacaagaatcagaatggactctgttttgggttgtgttcttatagatatgtatgcaaagtgcggtgaaatggaagaagctttggaagttttcaagaatattaagaaaaaatcagtgcaagcatggacagctttgatttcaggatatgcataccatggccatggaagagaagctattagcaaattcatggagatgcaaaagatgggaattaagccaaatgtgatcactttcactgcggttctcacggcttgcagctacacaggactagttgaagaaggaaagttgatattctacagcatggagagagattacaacctgaaaccgaccatcgagcattatggctgtattgttgatttactcggtcgagctggattgcttgatgaagcaaaacgtttcattcaggagatgccattgaagccaaatgctgtgatatggggtgcgttgctcaaagcctgtcgaattcacaaaaacatcgaattgggagaggaaattggagaaatcttaattgcaatagatccatatcatggcggaagatatgttcataaggcaaatattcatgctatggataaaaagtgggacaaagcagctgaaacaagaagattgatgaaagaacaaggagtagcaaaagttccaggatgtagtacaattagcttggaagggaccacacacgagtttttagcgggagaccgatcacacccagagatagagaaaattcaatctaaatggagaatcatgagaaggaaacttgaggaaaacgggtacgtaccagagttagaagagatgctgcttgatctagttgatgatgatgaaagagaggctattgtgcatcagcatagcgagaaattggctattacatacgggttaatcaagactaaaccaggaaccattattcgtataatgaagaatctccgagtatgcaaagattgtcacaaagtaacgaagctcatctctaagatatacaagagggatattgtaatgagagataggacaaggttccatcatttcagagatgggaaatgcagttgtggggactactggtaa

SEQ ID NO: 91380 - protein, 620 aa, Arabidopsis thaliana
  peptide (1)..(620): Ceres Seq. ID no. 12727434
MNVISCSFSLEHNLYETMSCLQRCSKQEELKQIHARMLKTGLMQDSYAITKFLSFCISSTSSDFLPYAQIVFDGFDRPDTFLWNLMIRGFSCSDEPERSLLLYQRMLCSSAPHNAYTFPSLLKACSNLSAFEETTQIHAQITKLGYENDVYAVNSLINSYAVTGNFKLAHLLFDRIPEPDDVSWNSVIKGYVKAGKMDIALTLFRKMAEKNAISWTTMISGYVQADMNKEALQLFHEMQNSDVEPDNVSLANALSACAQLGALEQGKWIHSYLNKTRIRMDSVLGCVLIDMYAKCGEMEEALEVFKNIKKKSVQAWTALISGYAYHGHGREAISKFMEMQKMGIKPNVITFTAVLTACSYTGLVEEGKLIFYSMERDYNLKPTIEHYGCIVDLLGRAGLLDEAKRFIQEMPLKPNAVIWGALLKACRIHKNIELGEEIGEILIAIDPYHGGRYVHKANIHAMDKKWDKAAETRRLMKEQGVAKVPGCSTISLEGTTHEFLAGDRSHPEIEKIQSKWRIMRRKLEENGYVPELEEMLLDLVDDDEREAIVHQHSEKLAITYGLIKTKPGTIIRIMKNLRVCKDCHKVTKLISKIYKRDIVMRDRTRFHHFRDGKCSCGDYW

SEQ ID NO: 91381 - protein, 603 aa, Arabidopsis thaliana
  peptide (1)..(603): Ceres Seq. ID no. 12727435
MSCLQRCSKQEELKQIHARMLKTGLMQDSYAITKFLSFCISSTSSDFLPYAQIVFDGFDRPDTFLWNLMIRGFSCSDEPERSLLLYQRMLCSSAPHNAYTFPSLLKACSNLSAFEETTQIHAQITKLGYENDVYAVNSLINSYAVTGNFKLAHLLFDRIPEPDDVSWNSVIKGYVKAGKMDIALTLFRKMAEKNAISWTTMISGYVQADMNKEALQLFHEMQNSDVEPDNVSLANALSACAQLGALEQGKWIHSYLNKTRIRMDSVLGCVLIDMYAKCGEMEEALEVFKNIKKKSVQAWTALISGYAYHGHGREAISKFMEMQKMGIKPNVITFTAVLTACSYTGLVEEGKLIFYSMERDYNLKPTIEHYGCIVDLLGRAGLLDEAKRFIQEMPLKPNAVIWGALLKACRIHKNIELGEEIGEILIAIDPYHGGRYVHKANIHAMDKKWDKAAETRRLMKEQGVAKVPGCSTISLEGTTHEFLAGDRSHPEIEKIQSKWRIMRRKLEENGYVPELEEMLLDLVDDDEREAIVHQHSEKLAITYGLIKTKPGTIIRIMKNLRVCKDCHKVTKLISKIYKRDIVMRDRTRFHHFRDGKCSCGDYW

SEQ ID NO: 91382 - protein, 584 aa, Arabidopsis thaliana
  peptide (1)..(584): Ceres Seq. ID no. 12727436
MLKTGLMQDSYAITKFLSFCISSTSSDFLPYAQIVFDGFDRPDTFLWNLMIRGFSCSDEPERSLLLYQRMLCSSAPHNAYTFPSLLKACSNLSAFEETTQIHAQITKLGYENDVYAVNSLINSYAVTGNFKLAHLLFDRIPEPDDVSWNSVIKGYVKAGKMDIALTLFRKMAEKNAISWTTMISGYVQADMNKEALQLFHEMQNSDVEPDNVSLANALSACAQLGALEQGKWIHSYLNKTRIRMDSVLGCVLIDMYAKCGEMEEALEVFKNIKKKSVQAWTALISGYAYHGHGREAISKFMEMQKMGIKPNVITFTAVLTACSYTGLVEEGKLIFYSMERDYNLKPTIEHYGCIVDLLGRAGLLDEAKRFIQEMPLKPNAVIWGALLKACRIHKNIELGEEIGEILIAIDPYHGGRYVHKANIHAMDKKWDKAAETRRLMKEQGVAKVPGCSTISLEGTTHEFLAGDRSHPEIEKIQSKWRIMRRKLEENGYVPELEEMLLDLVDDDEREAIVHQHSEKLAITYGLIKTKPGTIIRIMKNLRVCKDCHKVTKLISKIYKRDIVMRDRTRFHHFRDGKCSCGDYW

SEQ ID NO: 91383 - DNA, 967 bp, Arabidopsis thaliana
  misc_feature (1)..(967): Ceres Seq. ID no. 12727437
  misc_feature (1)..(967): Ortholog of  Ceres SEQ ID NO 13598387 as cited in SEQ ID NO 62757
  misc_feature (1)..(967): Ortholog of  Ceres SEQ ID NO 13662984 as cited in SEQ ID NO 64419
atggcgattgtttccgtctctaactcttttctcactttcaattctcccaatcagctccgatttagccgaagaagattctctgccatggcttcttcaactactggagtgagagtcgctgaaggagaaggcaatttgccaaaacttgtccttacttctcctcagaacagcgaggctgagatatatctcttcggaggctgcattacttcttggaaagttgcgagcggtaaagatcttctttttgtcagaccagatgctgtcttcaataagattaagcccattagcggagggattccacattgttttccacagtttggacctgggctaattcaacagcatgggtttggaaggaacatggactggtctgttgtcgattcccagaatgcagatgacaatgctgctgttactcttgagcttaaggatggtccctatagtcgagccatgtgggactttgctttccaggctctatacaaggtcattgttggcgcggactccctttccactgagctaaagattacaaacacagacgataaaccattttctttcagcactgcgttgcatacttacttccgtgcttcttctgcgggggcctccgtgagaggtctaaagggttgtaaaactctcaataaggatccagaccctaagaacccaatagagggtaaagaagacagggatgcagtcacttttcctggatttgtggataccgtctatcttgatgctcccaatgaattgcagtttgataatggcttgggtgataaaataatcatcaaaaacacaaattggtcggatgcggtcttgtggaacccgcatactcagatggaggcttgttacagagactttgtgtgcgtggaaaatgcaaagcttggggatgtcaagctagagccgggacagtcttggactgcaacacaacttctcagcatcagttgaaaacattgtactttaaacttataatgtccagtggatccatttt

SEQ ID NO: 91384 - protein, 307 aa, Arabidopsis thaliana; identical to SEQ ID NO: 23063
  peptide (1)..(307): Ceres Seq. ID no. 12727438

SEQ ID NO: 91385 - protein, 279 aa, Arabidopsis thaliana; identical to SEQ ID NO: 23064
  peptide (1)..(279): Ceres Seq. ID no. 12727439

SEQ ID NO: 91386 - protein, 190 aa, Arabidopsis thaliana; identical to SEQ ID NO: 23065
  peptide (1)..(190): Ceres Seq. ID no. 12727440

SEQ ID NO: 91387 - DNA, 1917 bp, Arabidopsis thaliana
  misc_feature (1)..(1917): Ceres Seq. ID no. 12727441
  misc_feature (1)..(1917): Ortholog of  Ceres SEQ ID NO 13582783 as cited in SEQ ID NO 67821
cctcttctaaaacctaaccgccgtttaaaccaccttcggcaccgccattgatatactctactgttttcgtcaaatcgaaggaaccctaatttcgagggcactgaggaagctcaatcaatggctacggtaaaggattcggggtttgaagcccttgagaagcttaaggcaacagagccaccagtttttctagcgccaagttcaatatctgaggatgctcgctctgcatctcagtatctattcatgaagttgaagccgcataaccctaaatgtccatttgatcagctctcttctgatgggtttgatgcggagcagatttggcagcaaattgatatgcaatctcaacctttgttgactagcttgcggcaggaagtcaagagatttgctaaaaaccctgaagagattcgtaaacttgggaagttggcccttaaggtttctcatgaagatgatattgatgagatggatatggatggttttgactcggatgatgttgatgatgaggataaagagatagaatctaatgacagcgaaggagaagatgaagaggaagaggaagaggacgaggaagaagaagaggaggaagaggaggaggaggaggaggagaaggatggagacaatgaaggaatagaggataagttcttcaagataaaagaattggaggaatttttagaggaaggtgaagcagaagagtatgggatagaccacaaaaacaaaaaaggagtggcacagagaaagaagcaaaatttgagcgatgatgaagacgaagaagatgatgatgatgaagaagaagatgttgagtttgatgcttttgctggtggtgacgacgaagagacagataaattaggaaaagcaaggtatgatgatttctttggtggcaaaaaggagacaaaaatgaagttgaaagatttgagtgaagatgaggaagctgaaatagaaaacaaaggcaatgaaaaactctctacccatgagagagcacgactaaagcttcaatccaagattgaacagatggagaaagcaaacttggacccaaaacattggacaatgcagggagagataactgcggcaaagaggccaatgaatagtgctctagaagttgatttagattttgagcacaatgccaggcctgctcctgtaatcacagaagaagtcacagcctcacttgaagatttgatcaagagcagaatcattgaggctcgtttcgatgatgttcaacgagcacctcgtctacccactaaaggaaaaagagaagccaaggaattggacgaaagcaaaagcaagaaaggtcttgccgaagtttacgaggcagaatactttcagaaggctaatccagcttttgccccaacaactcactctgatgaactaaagaaagaggcaagcatgttgttcaagaaactatgcctgaagttggatgctctctcccacttccacttcacacctaaaccagtgattgaagaaatgtctataccaaacgtttcagccatagcaatggaagaggttgcgcccgtggccgtctcagatgcagcaatgcttgccccagaggaaatattttccgggaaaggtgacattaaggatgagtctgagctcacacaggaagatagaaagaggaggagagcgaataagaagagaaagtttaaggctgaatctgcaaatgaaccgcctaaaaaggcgctggatacaagtaccaagaacccttaaactgttacatgttgaagaaaggagagagttacagaggcaaattcaagatgataagatctcggtcaagagcattgctacacagacagcttgaagattagataaaacaacagttttgaatgagagaaatatttaaactttgtctttcacaaatttgaattttattgtatttttttctctttgtatgagtagttccattttccttgtatcgatagaaaaattccaaag

SEQ ID NO: 91388 - protein, 524 aa, Arabidopsis thaliana
  peptide (1)..(524): Ceres Seq. ID no. 12727442
MATVKDSGFEALEKLKATEPPVFLAPSSISEDARSASQYLFMKLKPHNPKCPFDQLSSDGFDAEQIWQQIDMQSQPLLTSLRQEVKRFAKNPEEIRKLGKLALKVSHEDDIDEMDMDGFDSDDVDDEDKEIESNDSEGEDEEEEEEDEEEEEEEEEEEEEEKDGDNEGIEDKFFKIKELEEFLEEGEAEEYGIDHKNKKGVAQRKKQNLSDDEDEEDDDDEEEDVEFDAFAGGDDEETDKLGKARYDDFFGGKKETKMKLKDLSEDEEAEIENKGNEKLSTHERARLKLQSKIEQMEKANLDPKHWTMQGEITAAKRPMNSALEVDLDFEHNARPAPVITEEVTASLEDLIKSRIIEARFDDVQRAPRLPTKGKREAKELDESKSKKGLAEVYEAEYFQKANPAFAPTTHSDELKKEASMLFKKLCLKLDALSHFHFTPKPVIEEMSIPNVSAIAMEEVAPVAVSDAAMLAPEEIFSGKGDIKDESELTQEDRKRRRANKKRKFKAESANEPPKKALDTSTKNP

SEQ ID NO: 91389 - protein, 483 aa, Arabidopsis thaliana
  peptide (1)..(483): Ceres Seq. ID no. 12727443
MKLKPHNPKCPFDQLSSDGFDAEQIWQQIDMQSQPLLTSLRQEVKRFAKNPEEIRKLGKLALKVSHEDDIDEMDMDGFDSDDVDDEDKEIESNDSEGEDEEEEEEDEEEEEEEEEEEEEEKDGDNEGIEDKFFKIKELEEFLEEGEAEEYGIDHKNKKGVAQRKKQNLSDDEDEEDDDDEEEDVEFDAFAGGDDEETDKLGKARYDDFFGGKKETKMKLKDLSEDEEAEIENKGNEKLSTHERARLKLQSKIEQMEKANLDPKHWTMQGEITAAKRPMNSALEVDLDFEHNARPAPVITEEVTASLEDLIKSRIIEARFDDVQRAPRLPTKGKREAKELDESKSKKGLAEVYEAEYFQKANPAFAPTTHSDELKKEASMLFKKLCLKLDALSHFHFTPKPVIEEMSIPNVSAIAMEEVAPVAVSDAAMLAPEEIFSGKGDIKDESELTQEDRKRRRANKKRKFKAESANEPPKKALDTSTKNP

SEQ ID NO: 91390 - protein, 453 aa, Arabidopsis thaliana
  peptide (1)..(453): Ceres Seq. ID no. 12727444
MQSQPLLTSLRQEVKRFAKNPEEIRKLGKLALKVSHEDDIDEMDMDGFDSDDVDDEDKEIESNDSEGEDEEEEEEDEEEEEEEEEEEEEEKDGDNEGIEDKFFKIKELEEFLEEGEAEEYGIDHKNKKGVAQRKKQNLSDDEDEEDDDDEEEDVEFDAFAGGDDEETDKLGKARYDDFFGGKKETKMKLKDLSEDEEAEIENKGNEKLSTHERARLKLQSKIEQMEKANLDPKHWTMQGEITAAKRPMNSALEVDLDFEHNARPAPVITEEVTASLEDLIKSRIIEARFDDVQRAPRLPTKGKREAKELDESKSKKGLAEVYEAEYFQKANPAFAPTTHSDELKKEASMLFKKLCLKLDALSHFHFTPKPVIEEMSIPNVSAIAMEEVAPVAVSDAAMLAPEEIFSGKGDIKDESELTQEDRKRRRANKKRKFKAESANEPPKKALDTSTKNP

SEQ ID NO: 91391 - DNA, 1845 bp, Arabidopsis thaliana
  misc_feature (1)..(1845): Ceres Seq. ID no. 12727449
  misc_feature (1)..(1845): Ortholog of  Ceres SEQ ID NO 12607856 as cited in SEQ ID NO 55419
atgggatttggagtaggtggtggaggtggtagaatgttggatttgaggattgtccaaaatcacaagcgttcaaagagtgccagctttccagaaaagaaaagagttgaaggagataaaacctcaaatagttctcatgaagcctctcaacgaatgaagctggacatgggacgttcaaatgaatcaaagcataatcaatatcattcaaacacggagacttcattgaagcaagagattactcacctcgagacaagattacaagatcagtttaaggttcgttgtgcattagagaaagccttaggttatcgaacagcatcttcttacgtactgactgaaacaaacgacattgccatgcctaagccagctactgatttaatcaaagacgttgcggtgctcgaaatggaagttatacatttggaacagtatcttctttcattatacagaaaagcctttgagcagcaaatctcttctgtatctccaaatttagagaacaagaagccaaaatctcctcctgttacaacccctagaaggcgtctagacttttctgaagatgatgataccccctcgaaaacagatcaacacacagttcctctgcttgatgataatcaaaatcaatcaaagaaaacagagattgctgcggttgaccgagaccagatggaccccagttttcgccgtagtcactctcaacgttcggcatttgggagtagaaaagcttctcccgaagattcttggggtaaagccagccgctcttgtcactcacagccactgtatgtgcagaatggagataacctaatcagtctagctgaacatcttggcacccgaatctcggatcatgttccagaaacacccaacaagttatctgaaggaatggtcaagtgcatgtcagaaatatactgcaagcttgcagagccaccttctgtgctacatcgtgggctttcatctccaaactcgtctttatcatcaagtgcattttcgccctctgaccaatacgatacatcgagccctggattcggaaacagctcctcttttgatgttcggctagataactctttccatgtagaaggagaaaaggacttcagtggaccttacagcagcattgttgaagtgctttgcatttacagagacgccaaaaaggccagtgaggtggaagatcttctgcaaaacttcaagtcacttattagtagattggaggaagtcgatccaaggaagttgaaacatgaagagaagctagcgttttggataaatgtgcacaatgcacttgtgatgcatgcgtttttagcttatgggattccacagaacaatgtgaagagagtcttacttctactcaaggctgcatataacattggtggacacacaattagcgccgaagcgatacaaagttcgattcttgggtgcaaaatgtctcatcctggacagtggcttagactactatttgcttcgaggaaattcaaagcaggggatgaaagattagcttatgcaatcgatcatcctgagcctctcctgcattttgcacttacttcaggcagccactccgatcccgcggttcgtgtatatacaccgaaaagaatccagcaagagcttgaaacgtcgaaagaagagtacataagaatgaacttaagcatacgcaagcagagaatcctattgccaaagcttgtggagacgtttgcaaaagactccggtttatgtccggcgggtttgacagagatggttaaccggagtataccggagtcttcaaggaaatgtgtaaagagatgtcaatctagtactagtaaaccacgaaagacaattgattggatccctcacagctttacatttagatatcttattcttagagaagctgccaaatga

SEQ ID NO: 91392 - protein, 614 aa, Arabidopsis thaliana
  peptide (1)..(614): Ceres Seq. ID no. 12727450
MGFGVGGGGGRMLDLRIVQNHKRSKSASFPEKKRVEGDKTSNSSHEASQRMKLDMGRSNESKHNQYHSNTETSLKQEITHLETRLQDQFKVRCALEKALGYRTASSYVLTETNDIAMPKPATDLIKDVAVLEMEVIHLEQYLLSLYRKAFEQQISSVSPNLENKKPKSPPVTTPRRRLDFSEDDDTPSKTDQHTVPLLDDNQNQSKKTEIAAVDRDQMDPSFRRSHSQRSAFGSRKASPEDSWGKASRSCHSQPLYVQNGDNLISLAEHLGTRISDHVPETPNKLSEGMVKCMSEIYCKLAEPPSVLHRGLSSPNSSLSSSAFSPSDQYDTSSPGFGNSSSFDVRLDNSFHVEGEKDFSGPYSSIVEVLCIYRDAKKASEVEDLLQNFKSLISRLEEVDPRKLKHEEKLAFWINVHNALVMHAFLAYGIPQNNVKRVLLLLKAAYNIGGHTISAEAIQSSILGCKMSHPGQWLRLLFASRKFKAGDERLAYAIDHPEPLLHFALTSGSHSDPAVRVYTPKRIQQELETSKEEYIRMNLSIRKQRILLPKLVETFAKDSGLCPAGLTEMVNRSIPESSRKCVKRCQSSTSKPRKTIDWIPHSFTFRYLILREAAK

SEQ ID NO: 91393 - protein, 603 aa, Arabidopsis thaliana
  peptide (1)..(603): Ceres Seq. ID no. 12727451
MLDLRIVQNHKRSKSASFPEKKRVEGDKTSNSSHEASQRMKLDMGRSNESKHNQYHSNTETSLKQEITHLETRLQDQFKVRCALEKALGYRTASSYVLTETNDIAMPKPATDLIKDVAVLEMEVIHLEQYLLSLYRKAFEQQISSVSPNLENKKPKSPPVTTPRRRLDFSEDDDTPSKTDQHTVPLLDDNQNQSKKTEIAAVDRDQMDPSFRRSHSQRSAFGSRKASPEDSWGKASRSCHSQPLYVQNGDNLISLAEHLGTRISDHVPETPNKLSEGMVKCMSEIYCKLAEPPSVLHRGLSSPNSSLSSSAFSPSDQYDTSSPGFGNSSSFDVRLDNSFHVEGEKDFSGPYSSIVEVLCIYRDAKKASEVEDLLQNFKSLISRLEEVDPRKLKHEEKLAFWINVHNALVMHAFLAYGIPQNNVKRVLLLLKAAYNIGGHTISAEAIQSSILGCKMSHPGQWLRLLFASRKFKAGDERLAYAIDHPEPLLHFALTSGSHSDPAVRVYTPKRIQQELETSKEEYIRMNLSIRKQRILLPKLVETFAKDSGLCPAGLTEMVNRSIPESSRKCVKRCQSSTSKPRKTIDWIPHSFTFRYLILREAAK

SEQ ID NO: 91394 - protein, 564 aa, Arabidopsis thaliana
  peptide (1)..(564): Ceres Seq. ID no. 12727452
MKLDMGRSNESKHNQYHSNTETSLKQEITHLETRLQDQFKVRCALEKALGYRTASSYVLTETNDIAMPKPATDLIKDVAVLEMEVIHLEQYLLSLYRKAFEQQISSVSPNLENKKPKSPPVTTPRRRLDFSEDDDTPSKTDQHTVPLLDDNQNQSKKTEIAAVDRDQMDPSFRRSHSQRSAFGSRKASPEDSWGKASRSCHSQPLYVQNGDNLISLAEHLGTRISDHVPETPNKLSEGMVKCMSEIYCKLAEPPSVLHRGLSSPNSSLSSSAFSPSDQYDTSSPGFGNSSSFDVRLDNSFHVEGEKDFSGPYSSIVEVLCIYRDAKKASEVEDLLQNFKSLISRLEEVDPRKLKHEEKLAFWINVHNALVMHAFLAYGIPQNNVKRVLLLLKAAYNIGGHTISAEAIQSSILGCKMSHPGQWLRLLFASRKFKAGDERLAYAIDHPEPLLHFALTSGSHSDPAVRVYTPKRIQQELETSKEEYIRMNLSIRKQRILLPKLVETFAKDSGLCPAGLTEMVNRSIPESSRKCVKRCQSSTSKPRKTIDWIPHSFTFRYLILREAAK

SEQ ID NO: 91395 - DNA, 1356 bp, Arabidopsis thaliana
  misc_feature (1)..(1356): Ceres Seq. ID no. 12727453
  misc_feature (1)..(1356): Ortholog of  Ceres SEQ ID NO 13646221 as cited in SEQ ID NO 20310
atggtacgtcggaaaagacaagaagaagatgaaaagattgagattgaaagggttaaggaagaaagtttgaagctagctaagcaggcggaagaaaagagaagattagaagagtcgaaggagcaaggcaaaagaatacaagtggacgatgatcagcttgcaaagactacttctaaagataagggacaaattaatcattccaaagatgtagtggaagaagatgtgaatcctcctcctagcagtattgatggcaaatctgagattggagatggaacatctgtcaatcctcgatgtttatgttgttttcattgccacagaccatttgttatgcacgagattttgaagaagggaaaatttcacatagattgctacaaggagtactaccgtaatcgcaactgctatgtttgccaacaaaagattcctgtaaatgcggaaggtataagaaagttcagtgagcatccgttctggaaggagaaatactgtcctattcatgatgaggatggaactgccaagtgttgcagctgtgaaagattagagcctaggggaacgaactatgtaatgcttggtgatttccggtggctatgtatagagtgtatgggatcagcggttatggatactaacgaagtccagcctttgcactttgaaatccgtgaattcttcgaaggcttgttcttgaaggttgacaaagaatttgctctgcttcttgtcgagaaacaagcgcttaataaagctgaggaagaagagaagatcgactaccatcgtgcagccgtaaccagaggtctttgcatgtctgaagagcaaattgtcccaagtataataaaagggccacggatgggaccggacaatcagctaataacagacatagttacagagtctcaaagagtgagtggattcgaggttacagggattctcatcatatatggacttcctaggttactaacaggatatatcttggctcacgagatgatgcatgcttggcttagactcaatggttataagaatcttaagttagagcttgaagaaggattatgtcaagcgttaggtctcagatggttggagtctcagacatttgcatctactgatgctgctgctgctgctgctgtagcttcttcctcttctttttcttcttccactgctcctccagccgctatcacgtcaaagaaaagtgacgactggtctattttcgagaagaagctcgtagagttttgcatgaatcagatcaaagaggatgattcaccggtctacggtctcggattcaaacaagtttacgagatgatggtctcaaataactacaacattaaggatacccttaaagatatcgttagcgcttccaacgctacaccagattcaacggtttga

SEQ ID NO: 91396 - protein, 451 aa, Arabidopsis thaliana
  peptide (1)..(451): Ceres Seq. ID no. 12727454
MVRRKRQEEDEKIEIERVKEESLKLAKQAEEKRRLEESKEQGKRIQVDDDQLAKTTSKDKGQINHSKDVVEEDVNPPPSSIDGKSEIGDGTSVNPRCLCCFHCHRPFVMHEILKKGKFHIDCYKEYYRNRNCYVCQQKIPVNAEGIRKFSEHPFWKEKYCPIHDEDGTAKCCSCERLEPRGTNYVMLGDFRWLCIECMGSAVMDTNEVQPLHFEIREFFEGLFLKVDKEFALLLVEKQALNKAEEEEKIDYHRAAVTRGLCMSEEQIVPSIIKGPRMGPDNQLITDIVTESQRVSGFEVTGILIIYGLPRLLTGYILAHEMMHAWLRLNGYKNLKLELEEGLCQALGLRWLESQTFASTDAAAAAAVASSSSFSSSTAPPAAITSKKSDDWSIFEKKLVEFCMNQIKEDDSPVYGLGFKQVYEMMVSNNYNIKDTLKDIVSASNATPDSTV

SEQ ID NO: 91397 - protein, 343 aa, Arabidopsis thaliana
  peptide (1)..(343): Ceres Seq. ID no. 12727455
MHEILKKGKFHIDCYKEYYRNRNCYVCQQKIPVNAEGIRKFSEHPFWKEKYCPIHDEDGTAKCCSCERLEPRGTNYVMLGDFRWLCIECMGSAVMDTNEVQPLHFEIREFFEGLFLKVDKEFALLLVEKQALNKAEEEEKIDYHRAAVTRGLCMSEEQIVPSIIKGPRMGPDNQLITDIVTESQRVSGFEVTGILIIYGLPRLLTGYILAHEMMHAWLRLNGYKNLKLELEEGLCQALGLRWLESQTFASTDAAAAAAVASSSSFSSSTAPPAAITSKKSDDWSIFEKKLVEFCMNQIKEDDSPVYGLGFKQVYEMMVSNNYNIKDTLKDIVSASNATPDSTV

SEQ ID NO: 91398 - protein, 266 aa, Arabidopsis thaliana
  peptide (1)..(266): Ceres Seq. ID no. 12727456
MLGDFRWLCIECMGSAVMDTNEVQPLHFEIREFFEGLFLKVDKEFALLLVEKQALNKAEEEEKIDYHRAAVTRGLCMSEEQIVPSIIKGPRMGPDNQLITDIVTESQRVSGFEVTGILIIYGLPRLLTGYILAHEMMHAWLRLNGYKNLKLELEEGLCQALGLRWLESQTFASTDAAAAAAVASSSSFSSSTAPPAAITSKKSDDWSIFEKKLVEFCMNQIKEDDSPVYGLGFKQVYEMMVSNNYNIKDTLKDIVSASNATPDSTV

SEQ ID NO: 91399 - DNA, 687 bp, Arabidopsis thaliana
  misc_feature (1)..(687): Ceres Seq. ID no. 12727465
  misc_feature (1)..(687): Ortholog of  Ceres SEQ ID NO 13661617 as cited in SEQ ID NO 61132
atggatcatggtaggttaatggatgatcaaatgatgctaggctctcaagtgtacccctacacgacccaaccccaaaattcacactgcatcatcgttaaccagatcgatggaggcgaagaatcaaaaccggtgaagcggaggaggaagaggaggagtaaaggttcatcagccaccaacgaagaagacgtggcggagatcggagggatgttgaggaagaggaagttgaccgatgaacaagtgaacatgctcgaatatagcttcgggaacgagcataagctggagtcagggaggaaggagaagatcgccggagagttaggtcttgacccgagacaggtggctgtttggttccagaaccgccgtgcacgttggaagaacaagaaactagaggaagagtacgccaaactcaaaaaccaccacgacaacgtcgtactcggccaatgccaactcgagtctcagatattgaaactaacagaacaattgagtgaagctcaaagtgaaattcgaaaactgtcggaacgacttgaagaaatgccaaccaacagttcaagttcatcgctttctgttgaagccaacaatgcaccaactgatttcgagcttgccccggaaactaattataacatcccgttttatatgttagataataattatttacaaagcatggagtattgggatggtttgtatgtataa

SEQ ID NO: 91400 - protein, 228 aa, Arabidopsis thaliana
  peptide (1)..(228): Ceres Seq. ID no. 12727466
MDHGRLMDDQMMLGSQVYPYTTQPQNSHCIIVNQIDGGEESKPVKRRRKRRSKGSSATNEEDVAEIGGMLRKRKLTDEQVNMLEYSFGNEHKLESGRKEKIAGELGLDPRQVAVWFQNRRARWKNKKLEEEYAKLKNHHDNVVLGQCQLESQILKLTEQLSEAQSEIRKLSERLEEMPTNSSSSSLSVEANNAPTDFELAPETNYNIPFYMLDNNYLQSMEYWDGLYV

SEQ ID NO: 91401 - protein, 222 aa, Arabidopsis thaliana
  peptide (1)..(222): Ceres Seq. ID no. 12727467
MDDQMMLGSQVYPYTTQPQNSHCIIVNQIDGGEESKPVKRRRKRRSKGSSATNEEDVAEIGGMLRKRKLTDEQVNMLEYSFGNEHKLESGRKEKIAGELGLDPRQVAVWFQNRRARWKNKKLEEEYAKLKNHHDNVVLGQCQLESQILKLTEQLSEAQSEIRKLSERLEEMPTNSSSSSLSVEANNAPTDFELAPETNYNIPFYMLDNNYLQSMEYWDGLYV

SEQ ID NO: 91402 - protein, 218 aa, Arabidopsis thaliana
  peptide (1)..(218): Ceres Seq. ID no. 12727468
MMLGSQVYPYTTQPQNSHCIIVNQIDGGEESKPVKRRRKRRSKGSSATNEEDVAEIGGMLRKRKLTDEQVNMLEYSFGNEHKLESGRKEKIAGELGLDPRQVAVWFQNRRARWKNKKLEEEYAKLKNHHDNVVLGQCQLESQILKLTEQLSEAQSEIRKLSERLEEMPTNSSSSSLSVEANNAPTDFELAPETNYNIPFYMLDNNYLQSMEYWDGLYV

SEQ ID NO: 91403 - DNA, 893 bp, Arabidopsis thaliana
  misc_feature (1)..(893): Ceres Seq. ID no. 12727485
  misc_feature (1)..(893): Ortholog of  Ceres SEQ ID NO 12472913 as cited in SEQ ID NO 115
  misc_feature (1)..(893): Ortholog of  Ceres SEQ ID NO 15225086 as cited in SEQ ID NO 69009
aaaccctaacgtcacatcgaactctaaaccacactgagatggcgaaatggtggcgaggcctgagatccgtgacggcggaggtggctgatcttccggcttcttcattcggtcgatcgattcgatgtattcatcagtatcagacgatccaggcgattccacgtgaagctacgggtcgaggagtatcggctcgggatcggacgattggtcgtattcccgccgtcgttttcccgcaatcgcttctagatactgatgcttcgaagcgaggcgtgtcgaggaagcagctattgacggcggataagaagcagatcaagtctattattgactctgttggtctcccattcttctgttctaccactttccagcttcagatccgagctggtcagggttcgtcgacgcttgttgaatcgggtcgagtacttcccctcaaggttcatagagacgaagaaactggaaagatacttaatttagtattcgtatgggctgatgatggggagaagttgaaggttgatgttcctgttgttttcaaagggttggatcattgtcctggtctccagaaagggggaaacctgcggacaatccgaagcactctgaaactactagggccagctgagcacattccatctaaaatcgaagtagatgtgagcaatctggacattgaagacaaagtgttattgcaagacgttgtatttcatccatcattgaagctactgagcaagaatgaaaccatgcccgtgtgtaagattgtcgccacaagcccggtgaaagaaccagaagctgttcaagcataaaataagtctttgaaaagagtaatgtaatgtctctctgaagtttctgttccatacaaaaatgatcatttgtagaattctcagaggaaagaagcagatttttagaat

SEQ ID NO: 91404 - protein, 261 aa, Arabidopsis thaliana
  peptide (1)..(261): Ceres Seq. ID no. 12727486
TLTSHRTLNHTEMAKWWRGLRSVTAEVADLPASSFGRSIRCIHQYQTIQAIPREATGRGVSARDRTIGRIPAVVFPQSLLDTDASKRGVSRKQLLTADKKQIKSIIDSVGLPFFCSTTFQLQIRAGQGSSTLVESGRVLPLKVHRDEETGKILNLVFVWADDGEKLKVDVPVVFKGLDHCPGLQKGGNLRTIRSTLKLLGPAEHIPSKIEVDVSNLDIEDKVLLQDVVFHPSLKLLSKNETMPVCKIVATSPVKEPEAVQA

SEQ ID NO: 91405 - protein, 249 aa, Arabidopsis thaliana
  peptide (1)..(249): Ceres Seq. ID no. 12727487
MAKWWRGLRSVTAEVADLPASSFGRSIRCIHQYQTIQAIPREATGRGVSARDRTIGRIPAVVFPQSLLDTDASKRGVSRKQLLTADKKQIKSIIDSVGLPFFCSTTFQLQIRAGQGSSTLVESGRVLPLKVHRDEETGKILNLVFVWADDGEKLKVDVPVVFKGLDHCPGLQKGGNLRTIRSTLKLLGPAEHIPSKIEVDVSNLDIEDKVLLQDVVFHPSLKLLSKNETMPVCKIVATSPVKEPEAVQA

SEQ ID NO: 91406 - DNA, 2430 bp, Arabidopsis thaliana
  misc_feature (1)..(2430): Ceres Seq. ID no. 12727496
  misc_feature (1)..(2430): Ortholog of  Ceres SEQ ID NO 14307030 as cited in SEQ ID NO 54041
  misc_feature (1)..(2430): Ortholog of  Ceres SEQ ID NO 14302891 as cited in SEQ ID NO 66282
atgaacgattgggctagtttgggaataggttctattggggaagctgtgttttccaagctcctgaaagttgtgattgatgaagcaaaaaagttcaaagctttcaaacccttgtccaaggatctcgtatcaacaatggagatattgtttccgttaactcaaaagattgattcgatgcaaaaagagcttgactttggtgtaaaggaactaaaggaacttagggatacgatcgaaagagctgatgtagctgttcggaagtttccaagagtcaagtggtacgagaaatctaaatatactagaaaaattgagagaatcaataaggatatgcttaagttctgtcagattgatcttcagcttcttcagcataggaatcagttgacgttgttgggtttgacgggaaaccttgtgaattcggttgatggtttaagtaaaagaatggaccttttgagtgttcctgcgcctgtttttagggatctttgttcggttcccaagcttgataaggttattgttggattggattggccattgggggagttaaagaagagactccttgacgattctgtggttactcttgtggtttctgctcctcctggttgcgggaaaaccacgctggttagtcggctttgtgacgatccagatatcaaagggaagttcaagcatatcttctttaatgttgtgtcaaatactcctaactttagggtaatagtacagaatttactccagcacaacggttacaatgcacttacatttgagaatgattctcaagcagaagttggcttaagaaaactgctggaggaacttaaagaaaatggtcctatattgttggtgttggatgatgtgtggcggggagcggattctttccttcagaaatttcaaattaagttaccaaattataagattttggtgacttctcggtttgactttccgagttttgattccaattatcgtttgaaacctttggaagatgatgatgctagagcccttctcattcattgggcatcgcgaccttgtaacacgtctcctgatgagtacgaagatctcctccagaagatattgaaacgttgcaatggattcccaatcgtaattgaagtagtgggtgtttcactcaaaggacgatctctaaatacatggaaaggtcaggtggaaagctggtctgaaggggaaaaaattcttggtaagccttatccaactgtgctagaatgtttgcagcctagttttgatgctctggatcccaaccttaaggagtgctttttggacatgggctcatttcttgaggaccaaaagatacgtgcttcggtaataattgatatgtgggtggaattatacggtaaaggtagtagtatcttgtatatgtaccttgaagaccttgcctcccagaatctacttaaacttgttcctctcggcacaaatgagcacgaagacggtttctacaatgacttcttagtgactcaacatgatatccttagggagttggctatctgtcaaagcgaatttaaggaaaacttagaaagaaaaagactaaatctggagatactagagaatacatttccagactggtgtttgaatactattaatgcctctttattgtctatctctacggatgatttgttctcatcgaaatggttggaaatggattgccccaatgttgaggctttagttctaaatctctcttcatcagactatgcattgccaagcttcatctctggaatgaagaagctgaaggttctgacaatcacaaatcacggtttttatccagcaagattgagtaatttctcgtgtctcagctcattaccaaacctgaaacggattagattggaaaaagtttcaatcactttgctagacattccccaactgcaactcagcagtcttaagaagctgtctttggtcatgtgtagtttcggtgaggttttctacgacacagaagatatagttgtctctaatgctctatcgaaattacaagagattgacatagactactgctatgatcttgatgagttaccgtattggatctctgaaattgtttcattgaagacacttagcatcacaaactgtaacaagctctctcaacttccagaagctataggcaacttgagtagactagaagtgttgaggctgtgttcttctatgaatctctctgagctgcctgaagcgactgagggactcagcaacttgcggtttctggatatttctcattgcttaggattgagaaagttgcctcaagagattggcaaactgcagaatctgaaaaagatctcgatgagaaagtgttcgggatgcgagttgccggagtcagtgacgaatctagagaatctggaggtcaaatgcgatgaagaaactggattgttgtgggaaaggctgaagccaaaaatgagaaatttgagagttcaggaggaggaaatagagcataacctgaacttgcttcaaatgttttaa

SEQ ID NO: 91407 - protein, 809 aa, Arabidopsis thaliana
  peptide (1)..(809): Ceres Seq. ID no. 12727497
MNDWASLGIGSIGEAVFSKLLKVVIDEAKKFKAFKPLSKDLVSTMEILFPLTQKIDSMQKELDFGVKELKELRDTIERADVAVRKFPRVKWYEKSKYTRKIERINKDMLKFCQIDLQLLQHRNQLTLLGLTGNLVNSVDGLSKRMDLLSVPAPVFRDLCSVPKLDKVIVGLDWPLGELKKRLLDDSVVTLVVSAPPGCGKTTLVSRLCDDPDIKGKFKHIFFNVVSNTPNFRVIVQNLLQHNGYNALTFENDSQAEVGLRKLLEELKENGPILLVLDDVWRGADSFLQKFQIKLPNYKILVTSRFDFPSFDSNYRLKPLEDDDARALLIHWASRPCNTSPDEYEDLLQKILKRCNGFPIVIEVVGVSLKGRSLNTWKGQVESWSEGEKILGKPYPTVLECLQPSFDALDPNLKECFLDMGSFLEDQKIRASVIIDMWVELYGKGSSILYMYLEDLASQNLLKLVPLGTNEHEDGFYNDFLVTQHDILRELAICQSEFKENLERKRLNLEILENTFPDWCLNTINASLLSISTDDLFSSKWLEMDCPNVEALVLNLSSSDYALPSFISGMKKLKVLTITNHGFYPARLSNFSCLSSLPNLKRIRLEKVSITLLDIPQLQLSSLKKLSLVMCSFGEVFYDTEDIVVSNALSKLQEIDIDYCYDLDELPYWISEIVSLKTLSITNCNKLSQLPEAIGNLSRLEVLRLCSSMNLSELPEATEGLSNLRFLDISHCLGLRKLPQEIGKLQNLKKISMRKCSGCELPESVTNLENLEVKCDEETGLLWERLKPKMRNLRVQEEEIEHNLNLLQMF

SEQ ID NO: 91408 - protein, 765 aa, Arabidopsis thaliana
  peptide (1)..(765): Ceres Seq. ID no. 12727498
MEILFPLTQKIDSMQKELDFGVKELKELRDTIERADVAVRKFPRVKWYEKSKYTRKIERINKDMLKFCQIDLQLLQHRNQLTLLGLTGNLVNSVDGLSKRMDLLSVPAPVFRDLCSVPKLDKVIVGLDWPLGELKKRLLDDSVVTLVVSAPPGCGKTTLVSRLCDDPDIKGKFKHIFFNVVSNTPNFRVIVQNLLQHNGYNALTFENDSQAEVGLRKLLEELKENGPILLVLDDVWRGADSFLQKFQIKLPNYKILVTSRFDFPSFDSNYRLKPLEDDDARALLIHWASRPCNTSPDEYEDLLQKILKRCNGFPIVIEVVGVSLKGRSLNTWKGQVESWSEGEKILGKPYPTVLECLQPSFDALDPNLKECFLDMGSFLEDQKIRASVIIDMWVELYGKGSSILYMYLEDLASQNLLKLVPLGTNEHEDGFYNDFLVTQHDILRELAICQSEFKENLERKRLNLEILENTFPDWCLNTINASLLSISTDDLFSSKWLEMDCPNVEALVLNLSSSDYALPSFISGMKKLKVLTITNHGFYPARLSNFSCLSSLPNLKRIRLEKVSITLLDIPQLQLSSLKKLSLVMCSFGEVFYDTEDIVVSNALSKLQEIDIDYCYDLDELPYWISEIVSLKTLSITNCNKLSQLPEAIGNLSRLEVLRLCSSMNLSELPEATEGLSNLRFLDISHCLGLRKLPQEIGKLQNLKKISMRKCSGCELPESVTNLENLEVKCDEETGLLWERLKPKMRNLRVQEEEIEHNLNLLQMF

SEQ ID NO: 91409 - protein, 752 aa, Arabidopsis thaliana
  peptide (1)..(752): Ceres Seq. ID no. 12727499
MQKELDFGVKELKELRDTIERADVAVRKFPRVKWYEKSKYTRKIERINKDMLKFCQIDLQLLQHRNQLTLLGLTGNLVNSVDGLSKRMDLLSVPAPVFRDLCSVPKLDKVIVGLDWPLGELKKRLLDDSVVTLVVSAPPGCGKTTLVSRLCDDPDIKGKFKHIFFNVVSNTPNFRVIVQNLLQHNGYNALTFENDSQAEVGLRKLLEELKENGPILLVLDDVWRGADSFLQKFQIKLPNYKILVTSRFDFPSFDSNYRLKPLEDDDARALLIHWASRPCNTSPDEYEDLLQKILKRCNGFPIVIEVVGVSLKGRSLNTWKGQVESWSEGEKILGKPYPTVLECLQPSFDALDPNLKECFLDMGSFLEDQKIRASVIIDMWVELYGKGSSILYMYLEDLASQNLLKLVPLGTNEHEDGFYNDFLVTQHDILRELAICQSEFKENLERKRLNLEILENTFPDWCLNTINASLLSISTDDLFSSKWLEMDCPNVEALVLNLSSSDYALPSFISGMKKLKVLTITNHGFYPARLSNFSCLSSLPNLKRIRLEKVSITLLDIPQLQLSSLKKLSLVMCSFGEVFYDTEDIVVSNALSKLQEIDIDYCYDLDELPYWISEIVSLKTLSITNCNKLSQLPEAIGNLSRLEVLRLCSSMNLSELPEATEGLSNLRFLDISHCLGLRKLPQEIGKLQNLKKISMRKCSGCELPESVTNLENLEVKCDEETGLLWERLKPKMRNLRVQEEEIEHNLNLLQMF

SEQ ID NO: 91410 - DNA, 2670 bp, Arabidopsis thaliana
  misc_feature (1)..(2670): Ceres Seq. ID no. 12727500
  misc_feature (1)..(2670): Ortholog of  Ceres SEQ ID NO 14307030 as cited in SEQ ID NO 54041
  misc_feature (1)..(2670): Ortholog of  Ceres SEQ ID NO 14302891 as cited in SEQ ID NO 66282
aaatctttctcaacatgttagattttcagtttctacagacaaatctgtgagctattttttcattcttggttttctctgttttggcaaattttggaggaaaggaatctgaagaggaaacaagaatggtcgtggtcgattggcttggtttgggattaggctctgttgctggagctttggtctcggaaggtctgaaagttttgatttcagaggcaaagaaggtgttagctttcaaatctgtgtctaacgagctcgcatcgacgatggagtcattgcttccggtgatcaaagagatcgaatcgatgcaagatggtatggaactacaagatcttaaagacacgatcgataaagctcttttactggttgagaagtgttcacatgtcgagaagtggaatataatcttgaaatcgaagtacacgagaaaagttgaggaaatcaataggaagatgctcaagttctgtcaggttcaacttcagcttcttctctttaggaaccaattgaagtctatgccttccatggaagctattcttaacaattatttccaaaacatcaataagaagctcgaccgtttgagtggttctcctgctcctccgcttgtttcgaagcgttgttctgttcccaagcttgataatatggttctggttggattggattggccattggtggagctgaagaagaaactccttgacaattccgtggttgtggtgtctggtcctcctggttgtgggaagaccacgctggttactaagctttgtgacgacccagagatcgaaggagaattcaagaaaatcttctatagcgttgtgtcgaatactcctaatttcagggccatagtacaaaacttactccaggacaacggttgcggagcaattacatttgacgatgattctcaagcagaaactggcttaagagatcttctggaggaactcacaaaagatggtcgtatattgttggtgttggatgatgtgtggcagggatccgagttcttgcttcgaaaatttcaaattgatttaccagattataagattttggtgacttctcagtttgattttacgagtttatggcccacttaccatttggtacctttgaaatatgaatatgctaggtcccttctcattcagtgggcatctccacctcttcacacatctccagatgagtatgaagatcttctccaaaagatattgaaacgttgcaatggattccctctcgtaattgaagtagtcggcatttcacttaaaggacaagctctgtatttatggaaaggtcaagtggaaagctggtctgaaggggaaacaattcttggtaacgctaatcctactgtgcgacaacgtctgcagcctagcttcaatgtcctgaaacctcatcttaaagagtgtttcatggacatgggttcatttcttcaggaccaaaagatacgtgcttcgcttataattgacatatggatggaattatatggtagaggtagttctagtactaacaagttcatgttataccttaatgagcttgcttcccagaatctgcttaaacttgttcatctcgggacaaataagcgcgaagacggtttttacaatgagttgttagtcactcaacataatattctgagggagttggctatttttcaaagtgaattggaaccaatcatgcaaagaaagaaactaaatttggagatacgagaggacaactttccggacgagtgtttaaatcaacctattaatgctcgacttttgtctatctatacggatgatttgttctcatcgaaatggttggaaatggattgccccaatgttgaggctttagttcttaatatctcctcattagactatgcattgccaagcttcattgctgaaatgaagaagctaaaggttctgacaatcgcaaatcacggtttttatccagcaagattgagtaatttctcgtgtctcagctcattaccaaacctgaaacggattagatttgaaaaggtttcagtcactttgctggacattcctcaattgcaactcggcagtctcaagaagctatcatttttcatgtgtagtttcggtgaggttttctacgacacagaagatatagatgtctctaaagctctatcgaatttacaagagattgacatagactactgctatgatcttgatgagttaccatattggatccccgaagttgtttcattgaagacacttagcatcacaaactgtaacaagctctctcaacttccagaagctatagggaacttgagtagactagaagtgttgaggatgtgttcttgtatgaatctctctgagctgcctgaagcaactgagagactcagcaacttgcggtctctggatatttctcattgcttaggattgagaaagttgcctcaagagattggcaaactacagaaactggagaatatctcgatgaggaagtgttcgggatgcgagttgccggattcagtgaggtatctagagaatctggaggtcaaatgcgatgaagtaactggattgttgtgggaaaggttgatgccagaaatgagaaatttgagagttcacacggaggaaacagagcataacctgaagttgcttctaacgttttaagttttgagtgaaaaaaaaaacattttcgtagcttgtgtattcttattgactctttaatgatcacaatctagactaaacgagtaataatattacaagagtc

SEQ ID NO: 91411 - protein, 815 aa, Arabidopsis thaliana
  peptide (1)..(815): Ceres Seq. ID no. 12727501
MVVVDWLGLGLGSVAGALVSEGLKVLISEAKKVLAFKSVSNELASTMESLLPVIKEIESMQDGMELQDLKDTIDKALLLVEKCSHVEKWNIILKSKYTRKVEEINRKMLKFCQVQLQLLLFRNQLKSMPSMEAILNNYFQNINKKLDRLSGSPAPPLVSKRCSVPKLDNMVLVGLDWPLVELKKKLLDNSVVVVSGPPGCGKTTLVTKLCDDPEIEGEFKKIFYSVVSNTPNFRAIVQNLLQDNGCGAITFDDDSQAETGLRDLLEELTKDGRILLVLDDVWQGSEFLLRKFQIDLPDYKILVTSQFDFTSLWPTYHLVPLKYEYARSLLIQWASPPLHTSPDEYEDLLQKILKRCNGFPLVIEVVGISLKGQALYLWKGQVESWSEGETILGNANPTVRQRLQPSFNVLKPHLKECFMDMGSFLQDQKIRASLIIDIWMELYGRGSSSTNKFMLYLNELASQNLLKLVHLGTNKREDGFYNELLVTQHNILRELAIFQSELEPIMQRKKLNLEIREDNFPDECLNQPINARLLSIYTDDLFSSKWLEMDCPNVEALVLNISSLDYALPSFIAEMKKLKVLTIANHGFYPARLSNFSCLSSLPNLKRIRFEKVSVTLLDIPQLQLGSLKKLSFFMCSFGEVFYDTEDIDVSKALSNLQEIDIDYCYDLDELPYWIPEVVSLKTLSITNCNKLSQLPEAIGNLSRLEVLRMCSCMNLSELPEATERLSNLRSLDISHCLGLRKLPQEIGKLQKLENISMRKCSGCELPDSVRYLENLEVKCDEVTGLLWERLMPEMRNLRVHTEETEHNLKLLLTF

SEQ ID NO: 91412 - protein, 769 aa, Arabidopsis thaliana
  peptide (1)..(769): Ceres Seq. ID no. 12727502
MESLLPVIKEIESMQDGMELQDLKDTIDKALLLVEKCSHVEKWNIILKSKYTRKVEEINRKMLKFCQVQLQLLLFRNQLKSMPSMEAILNNYFQNINKKLDRLSGSPAPPLVSKRCSVPKLDNMVLVGLDWPLVELKKKLLDNSVVVVSGPPGCGKTTLVTKLCDDPEIEGEFKKIFYSVVSNTPNFRAIVQNLLQDNGCGAITFDDDSQAETGLRDLLEELTKDGRILLVLDDVWQGSEFLLRKFQIDLPDYKILVTSQFDFTSLWPTYHLVPLKYEYARSLLIQWASPPLHTSPDEYEDLLQKILKRCNGFPLVIEVVGISLKGQALYLWKGQVESWSEGETILGNANPTVRQRLQPSFNVLKPHLKECFMDMGSFLQDQKIRASLIIDIWMELYGRGSSSTNKFMLYLNELASQNLLKLVHLGTNKREDGFYNELLVTQHNILRELAIFQSELEPIMQRKKLNLEIREDNFPDECLNQPINARLLSIYTDDLFSSKWLEMDCPNVEALVLNISSLDYALPSFIAEMKKLKVLTIANHGFYPARLSNFSCLSSLPNLKRIRFEKVSVTLLDIPQLQLGSLKKLSFFMCSFGEVFYDTEDIDVSKALSNLQEIDIDYCYDLDELPYWIPEVVSLKTLSITNCNKLSQLPEAIGNLSRLEVLRMCSCMNLSELPEATERLSNLRSLDISHCLGLRKLPQEIGKLQKLENISMRKCSGCELPDSVRYLENLEVKCDEVTGLLWERLMPEMRNLRVHTEETEHNLKLLLTF

SEQ ID NO: 91413 - protein, 756 aa, Arabidopsis thaliana
  peptide (1)..(756): Ceres Seq. ID no. 12727503
MQDGMELQDLKDTIDKALLLVEKCSHVEKWNIILKSKYTRKVEEINRKMLKFCQVQLQLLLFRNQLKSMPSMEAILNNYFQNINKKLDRLSGSPAPPLVSKRCSVPKLDNMVLVGLDWPLVELKKKLLDNSVVVVSGPPGCGKTTLVTKLCDDPEIEGEFKKIFYSVVSNTPNFRAIVQNLLQDNGCGAITFDDDSQAETGLRDLLEELTKDGRILLVLDDVWQGSEFLLRKFQIDLPDYKILVTSQFDFTSLWPTYHLVPLKYEYARSLLIQWASPPLHTSPDEYEDLLQKILKRCNGFPLVIEVVGISLKGQALYLWKGQVESWSEGETILGNANPTVRQRLQPSFNVLKPHLKECFMDMGSFLQDQKIRASLIIDIWMELYGRGSSSTNKFMLYLNELASQNLLKLVHLGTNKREDGFYNELLVTQHNILRELAIFQSELEPIMQRKKLNLEIREDNFPDECLNQPINARLLSIYTDDLFSSKWLEMDCPNVEALVLNISSLDYALPSFIAEMKKLKVLTIANHGFYPARLSNFSCLSSLPNLKRIRFEKVSVTLLDIPQLQLGSLKKLSFFMCSFGEVFYDTEDIDVSKALSNLQEIDIDYCYDLDELPYWIPEVVSLKTLSITNCNKLSQLPEAIGNLSRLEVLRMCSCMNLSELPEATERLSNLRSLDISHCLGLRKLPQEIGKLQKLENISMRKCSGCELPDSVRYLENLEVKCDEVTGLLWERLMPEMRNLRVHTEETEHNLKLLLTF

SEQ ID NO: 91414 - DNA, 1016 bp, Arabidopsis thaliana
  misc_feature (1)..(1016): Ceres Seq. ID no. 12727504
  misc_feature (1)..(1016): Ortholog of  Ceres SEQ ID NO 12627139 as cited in SEQ ID NO 64036
aaggacgatcagaagaaatcttagagaaatcggaaaattctcttactcgggttttgcatcggtgaatatgaattgcgaagtttgtcagctaaaggaactggaagtggaatccttcgagatacgcgaagttttgcgctgcattctacatacgattgtctttcatcgtgcgcttggtcttatccgccctaaagatattgatttggagctttttgagatcacttatgtacaatgcggtgaaattgaagtggagaagaaaatcgatgaaaagattgagcagttcattaactggattgagaaacacccaaacaaaaagagtcagatttgtctatcgttctatgaagtcaaaagcaaacagccttcttggttcaccaaaatcgaacggttgtactgggaacaatggtacatcaatctgaatgtgcttcagcccactaagccccctgtcggaaagtctcaccattctaaactagttatggaccctggaggttcgattgatcaatttcctgttctcatctccaaaaattacatctttttattattataagagtgtgaagtgattgtcatgctctaatcaataactgtagaggcatcggaggagagaagttctcgtaggacactgcttgagcaatcccttcaagaagtcttgttccaaatcataaaattcgtgaatgagaagaaggatcatgttcctcccattaacgatggtgtaatctactacccttttgagatcactatcccaagctcatcggactctgcctttgggatggatatgttcaagaggatactacacagtggccatccatcaatgctcggctaaattccattttccacttaacttagtacatatacactttgatgtttcttggtgcagcctaactccaatcaacactttcctagttacattttctgtgtaaatatattatatgttaccctctcctcgtcgatggataatgttaccttatctatgctttgttgtatataagtgatgtgttgtatataaatttcagacttgcatttcc

SEQ ID NO: 91415 - protein, 179 aa, Arabidopsis thaliana
  peptide (1)..(179): Ceres Seq. ID no. 12727505
RTIRRNLREIGKFSYSGFASVNMNCEVCQLKELEVESFEIREVLRCILHTIVFHRALGLIRPKDIDLELFEITYVQCGEIEVEKKIDEKIEQFINWIEKHPNKKSQICLSFYEVKSKQPSWFTKIERLYWEQWYINLNVLQPTKPPVGKSHHSKLVMDPGGSIDQFPVLISKNYIFLLL

SEQ ID NO: 91416 - protein, 157 aa, Arabidopsis thaliana
  peptide (1)..(157): Ceres Seq. ID no. 12727506
MNCEVCQLKELEVESFEIREVLRCILHTIVFHRALGLIRPKDIDLELFEITYVQCGEIEVEKKIDEKIEQFINWIEKHPNKKSQICLSFYEVKSKQPSWFTKIERLYWEQWYINLNVLQPTKPPVGKSHHSKLVMDPGGSIDQFPVLISKNYIFLLL

SEQ ID NO: 91417 - DNA, 726 bp, Arabidopsis thaliana
  misc_feature (1)..(726): Ceres Seq. ID no. 12727525
  misc_feature (1)..(726): Ortholog of  Ceres SEQ ID NO 14313088 as cited in SEQ ID NO 58870
  misc_feature (1)..(726): Ortholog of  Ceres SEQ ID NO 14314571 as cited in SEQ ID NO 59360
atggattctgacataatgaacatgatgatgcatcagatggagaagcttcctgagttttgtaaccctaattcctctttcttctctcccgaccacaacaacacttacccttttctctttaactccactcattaccagtccgatcactcaatgaccaacgaaccaggtttccgctacggttccggtttactcactaacccttcttctatctctcccaacacagcttactcttccgtttttcttgacaaaagaaacaacagtaacaacaacaataatggcacgaacatggcagctatgcgagagatgatcttccgtatcgccgtgatgcaaccgatccatatcgatcccgaggcggttaagccaccgaagaggaggaacgtcaggatctctaaagatcctcaaagcgtggcggctaggcatagaagggagagaataagcgagaggattcggattttgcaacggcttgttcctggtgggacgaagatggatacagcttcgatgctcgatgaagcaattcattatgtgaagtttttaaagaaacaggtgcagtctctggaggagcaggcggtggttactggcggagggggaggaggaggaggaagggttttgatcggtggaggtggaatgacggcggcgagtggtggtggtggcggcgggggagtggttatgaaagggtgtggaacagtggggactcatcagatggtgggcaatgcacagattcttagatga

SEQ ID NO: 91418 - protein, 241 aa, Arabidopsis thaliana
  peptide (1)..(241): Ceres Seq. ID no. 12727526
MDSDIMNMMMHQMEKLPEFCNPNSSFFSPDHNNTYPFLFNSTHYQSDHSMTNEPGFRYGSGLLTNPSSISPNTAYSSVFLDKRNNSNNNNNGTNMAAMREMIFRIAVMQPIHIDPEAVKPPKRRNVRISKDPQSVAARHRRERISERIRILQRLVPGGTKMDTASMLDEAIHYVKFLKKQVQSLEEQAVVTGGGGGGGGRVLIGGGGMTAASGGGGGGGVVMKGCGTVGTHQMVGNAQILR

SEQ ID NO: 91419 - protein, 236 aa, Arabidopsis thaliana
  peptide (1)..(236): Ceres Seq. ID no. 12727527
MNMMMHQMEKLPEFCNPNSSFFSPDHNNTYPFLFNSTHYQSDHSMTNEPGFRYGSGLLTNPSSISPNTAYSSVFLDKRNNSNNNNNGTNMAAMREMIFRIAVMQPIHIDPEAVKPPKRRNVRISKDPQSVAARHRRERISERIRILQRLVPGGTKMDTASMLDEAIHYVKFLKKQVQSLEEQAVVTGGGGGGGGRVLIGGGGMTAASGGGGGGGVVMKGCGTVGTHQMVGNAQILR

SEQ ID NO: 91420 - protein, 234 aa, Arabidopsis thaliana
  peptide (1)..(234): Ceres Seq. ID no. 12727528
MMMHQMEKLPEFCNPNSSFFSPDHNNTYPFLFNSTHYQSDHSMTNEPGFRYGSGLLTNPSSISPNTAYSSVFLDKRNNSNNNNNGTNMAAMREMIFRIAVMQPIHIDPEAVKPPKRRNVRISKDPQSVAARHRRERISERIRILQRLVPGGTKMDTASMLDEAIHYVKFLKKQVQSLEEQAVVTGGGGGGGGRVLIGGGGMTAASGGGGGGGVVMKGCGTVGTHQMVGNAQILR

SEQ ID NO: 91421 - DNA, 954 bp, Arabidopsis thaliana
  misc_feature (1)..(954): Ceres Seq. ID no. 12727547
  misc_feature (1)..(954): Ortholog of  Ceres SEQ ID NO 15171378 as cited in SEQ ID NO 51582
atgaaaagtggagggaacacaaacactaaactcatacttgttcatccatacattcaaaagcaaacaagcacaaatcgtctatggcttctcgctttcgtttctttcttcacaatcgcttttctcctaactcttctctacaccaccgactccatcatctcttctaaaaacaactccgccaccgtctcctccgccgtcaattctgccgtcaccaccgctaccatctctcagttaccaacaacagccatcaatgcaatgcttcactacgcttcaagatcaaacgacagctaccacatgtcatacggagagatgaaatcaatctccgacgtcctccgccgctgctctccgccgtgtaatctcttagtcttcggtcttacacacgaaacccttctctggaaatcgctaaaccacaacgggcgtacagttttcatcgaagagaatcgttactacgctgcttacttcgaagaaatccacccggagatcgaagtcttcgatgttcagtacacgaccaaagctcgtgaggcgcgtgagcttgtgtcggcggttaaagaagcggcgaggaacgagtgtcgtccagtgcagaatcttctcttttcagattgtaaattaggactcaatgatttgccgaatcatgtatacgatgttgattgggatgtgatcttagttgatggaccacgtggcgacggtggagatgtaccggggaggatgtcgtcgattttcacggcggcggttcttgctcggagtaaaaaaggcgggaatccgaagacgcatgtgtttgttcatgattattacagagatgttgagagactttgtggggatgagtttctttgccgggagaatcttgtggaatctaatgatctgcttgcgcactacgtgttggagaagatggataaaaacagcacgcagttctgtcgtggtcgtaagaagaaacgctctgtttcttctccatcggcttga

SEQ ID NO: 91422 - protein, 317 aa, Arabidopsis thaliana
  peptide (1)..(317): Ceres Seq. ID no. 12727548
MKSGGNTNTKLILVHPYIQKQTSTNRLWLLAFVSFFTIAFLLTLLYTTDSIISSKNNSATVSSAVNSAVTTATISQLPTTAINAMLHYASRSNDSYHMSYGEMKSISDVLRRCSPPCNLLVFGLTHETLLWKSLNHNGRTVFIEENRYYAAYFEEIHPEIEVFDVQYTTKAREARELVSAVKEAARNECRPVQNLLFSDCKLGLNDLPNHVYDVDWDVILVDGPRGDGGDVPGRMSSIFTAAVLARSKKGGNPKTHVFVHDYYRDVERLCGDEFLCRENLVESNDLLAHYVLEKMDKNSTQFCRGRKKKRSVSSPSA

SEQ ID NO: 91423 - protein, 233 aa, Arabidopsis thaliana
  peptide (1)..(233): Ceres Seq. ID no. 12727549
MLHYASRSNDSYHMSYGEMKSISDVLRRCSPPCNLLVFGLTHETLLWKSLNHNGRTVFIEENRYYAAYFEEIHPEIEVFDVQYTTKAREARELVSAVKEAARNECRPVQNLLFSDCKLGLNDLPNHVYDVDWDVILVDGPRGDGGDVPGRMSSIFTAAVLARSKKGGNPKTHVFVHDYYRDVERLCGDEFLCRENLVESNDLLAHYVLEKMDKNSTQFCRGRKKKRSVSSPSA

SEQ ID NO: 91424 - protein, 220 aa, Arabidopsis thaliana
  peptide (1)..(220): Ceres Seq. ID no. 12727550
MSYGEMKSISDVLRRCSPPCNLLVFGLTHETLLWKSLNHNGRTVFIEENRYYAAYFEEIHPEIEVFDVQYTTKAREARELVSAVKEAARNECRPVQNLLFSDCKLGLNDLPNHVYDVDWDVILVDGPRGDGGDVPGRMSSIFTAAVLARSKKGGNPKTHVFVHDYYRDVERLCGDEFLCRENLVESNDLLAHYVLEKMDKNSTQFCRGRKKKRSVSSPSA

SEQ ID NO: 91425 - DNA, 1956 bp, Arabidopsis thaliana
  misc_feature (1)..(1956): Ceres Seq. ID no. 12727555
  misc_feature (1)..(1956): Ortholog of  Ceres SEQ ID NO 14310655 as cited in SEQ ID NO 53681
aaaataaagggaaaaaaaaaaaattggagaggaagagaaaggaggaaatcgaaaccattcggttggtgatgggccaagcgccgtcgtctacggcggaatcgaacggacgagagttagatttgaggttatggtctccggtgattgttgctggaggtgaatcgatggctgtggggaatgttgtggatcgggatttcaccggagatctgccggatgagtgtttagctcatgtgtttcagtttcttggagctggagatcggaagcgatgctctcttgtttgtaaacggtggttgctcgtcgacggtcagagtcgtcatcggttatctctagatgctaaggatgagatctcctctttccttacctctatgttcaatcgattcgattcggtgacgaagcttgctctccgatgtgatcggaagtctgttagcttgagcgatgaagctttggctatgatctctgttcgttgtttgaatctgactcgtgttaagcttcgtggttgtcgcgagattacggatctgggaatggaagacttcgctaagaattgtaaaaatcttaagaagctatctgttggatcttgcaatttcggagctaaaggcgtgaacgcgatgctcgaacattgtaagcttctggaggaattgtcggtgaagcgacttcgaggaattcatgaagcagctgagttgattcacctacctgatgatgcttcatcttcttcgctcaggtctatttgcttgaaggagctcgttaatggccaggtatttgaaccgttgcttgctactacaagaacactgaaaacactgaaaatcattcgttgtttgggtgattgggataaagttcttcagatgattgcaaatggtaagagttctttaagtgaaattcacttagagaggctccaagttagtgacattgggctatctgcgatatctaaatgctcaaatgttgagacattgcatatagtgaaaactccagaatgttcaaactttggtctgatttatgtagctgagagatgtaagctgctgaggaagcttcatattgatggttggaggactaataggataggtgatgaaggtttactttctgtagccaaacactgtttaaacttgcaagaacttgtgctgattggtgttaatgcaacacatatgagtttagcagccattgcttcaaactgtgagaaactcgaacggttagcactttgcggaagtggaacaataggcgatacagagattgcttgcatcgctaggaaatgtggagcattgaggaaattctgtattaaaggatgtcctgtttcggatcgagggattgaggcgctcgctgttggttgtcctaatctggttaaattgaaggtgaagaaatgtaaagttgtgactggagagattggagattggctgcgtgaacaaaggaggacactagtggtgagtatggatggtgatgaaaccgaagcagtggtggtggtggatggtgaggttgaaaccgttgtggaggagccaagggtggctcaagcaggtggaattgtggcagagattggttcaagtaatggtggtggaggaagtagattagcgatgattaggtcaaagttagggtttcttgctggaagaaacttggtaacttgcacattcagaagatggtctcacaatgataatgctagtagttctacttgatcagctataactatgaaagcggtaattgtcaaaaaaaaaatctttttaagagaaatttctatctgtattttgtaatcctcgttcgttttcatgtgtgcaagacttgttgattagaaaagtcattacaatggagaccatttattgtattgactattgatttggtgtcatatttgttttctctgtttggaatctcaacattagtcatttgatgggaatgaattgtcatttttttttacttatagttacaatgtagctgtgttggtaaggtttgcaaaggttttgtttcttaagaaactattttggt

SEQ ID NO: 91426 - protein, 549 aa, Arabidopsis thaliana
  peptide (1)..(549): Ceres Seq. ID no. 12727556
NKGKKKKLERKRKEEIETIRLVMGQAPSSTAESNGRELDLRLWSPVIVAGGESMAVGNVVDRDFTGDLPDECLAHVFQFLGAGDRKRCSLVCKRWLLVDGQSRHRLSLDAKDEISSFLTSMFNRFDSVTKLALRCDRKSVSLSDEALAMISVRCLNLTRVKLRGCREITDLGMEDFAKNCKNLKKLSVGSCNFGAKGVNAMLEHCKLLEELSVKRLRGIHEAAELIHLPDDASSSSLRSICLKELVNGQVFEPLLATTRTLKTLKIIRCLGDWDKVLQMIANGKSSLSEIHLERLQVSDIGLSAISKCSNVETLHIVKTPECSNFGLIYVAERCKLLRKLHIDGWRTNRIGDEGLLSVAKHCLNLQELVLIGVNATHMSLAAIASNCEKLERLALCGSGTIGDTEIACIARKCGALRKFCIKGCPVSDRGIEALAVGCPNLVKLKVKKCKVVTGEIGDWLREQRRTLVVSMDGDETEAVVVVDGEVETVVEEPRVAQAGGIVAEIGSSNGGGGSRLAMIRSKLGFLAGRNLVTCTFRRWSHNDNASSST

SEQ ID NO: 91427 - protein, 527 aa, Arabidopsis thaliana
  peptide (1)..(527): Ceres Seq. ID no. 12727557
MGQAPSSTAESNGRELDLRLWSPVIVAGGESMAVGNVVDRDFTGDLPDECLAHVFQFLGAGDRKRCSLVCKRWLLVDGQSRHRLSLDAKDEISSFLTSMFNRFDSVTKLALRCDRKSVSLSDEALAMISVRCLNLTRVKLRGCREITDLGMEDFAKNCKNLKKLSVGSCNFGAKGVNAMLEHCKLLEELSVKRLRGIHEAAELIHLPDDASSSSLRSICLKELVNGQVFEPLLATTRTLKTLKIIRCLGDWDKVLQMIANGKSSLSEIHLERLQVSDIGLSAISKCSNVETLHIVKTPECSNFGLIYVAERCKLLRKLHIDGWRTNRIGDEGLLSVAKHCLNLQELVLIGVNATHMSLAAIASNCEKLERLALCGSGTIGDTEIACIARKCGALRKFCIKGCPVSDRGIEALAVGCPNLVKLKVKKCKVVTGEIGDWLREQRRTLVVSMDGDETEAVVVVDGEVETVVEEPRVAQAGGIVAEIGSSNGGGGSRLAMIRSKLGFLAGRNLVTCTFRRWSHNDNASSST

SEQ ID NO: 91428 - protein, 496 aa, Arabidopsis thaliana
  peptide (1)..(496): Ceres Seq. ID no. 12727558
MAVGNVVDRDFTGDLPDECLAHVFQFLGAGDRKRCSLVCKRWLLVDGQSRHRLSLDAKDEISSFLTSMFNRFDSVTKLALRCDRKSVSLSDEALAMISVRCLNLTRVKLRGCREITDLGMEDFAKNCKNLKKLSVGSCNFGAKGVNAMLEHCKLLEELSVKRLRGIHEAAELIHLPDDASSSSLRSICLKELVNGQVFEPLLATTRTLKTLKIIRCLGDWDKVLQMIANGKSSLSEIHLERLQVSDIGLSAISKCSNVETLHIVKTPECSNFGLIYVAERCKLLRKLHIDGWRTNRIGDEGLLSVAKHCLNLQELVLIGVNATHMSLAAIASNCEKLERLALCGSGTIGDTEIACIARKCGALRKFCIKGCPVSDRGIEALAVGCPNLVKLKVKKCKVVTGEIGDWLREQRRTLVVSMDGDETEAVVVVDGEVETVVEEPRVAQAGGIVAEIGSSNGGGGSRLAMIRSKLGFLAGRNLVTCTFRRWSHNDNASSST

SEQ ID NO: 91429 - DNA, 1207 bp, Arabidopsis thaliana
  misc_feature (1)..(1207): Ceres Seq. ID no. 12727579
  misc_feature (1)..(1207): Ortholog of  Ceres SEQ ID NO 13581579 as cited in SEQ ID NO 58361
  misc_feature (1)..(1207): Ortholog of  Ceres SEQ ID NO 13598714 as cited in SEQ ID NO 62656
  misc_feature (1)..(1207): Ortholog of  Ceres SEQ ID NO 13596969 as cited in SEQ ID NO 63375
  misc_feature (1)..(1207): Ortholog of  Ceres SEQ ID NO 13597870 as cited in SEQ ID NO 64982
  misc_feature (1)..(1207): Ortholog of  Ceres SEQ ID NO 13595926 as cited in SEQ ID NO 67778
  misc_feature (1)..(1207): Ortholog of  Ceres SEQ ID NO 12567001 as cited in SEQ ID NO 0
cattcctgtaaacacaaaaacttgtaatttccaacgaaatggcgcggttcagtctggttgtagtcgtgactcttagtcttgccatctctatgttccctgacacaaccactgctcaactcaaaaccaatttctacggaaactcatgtccgaatgttgaacaaatcgtgaaaaaagtcgtccaagaaaaaatcaaacagaccttcgtcaccatcccagctactctccgcctcttcttccacgattgcttcgtcaatggatgtgatgcgtcggtcatgattcaatcaacgcctaccaacaaagccgagaaggatcatccagacaatatttctttggccggagatggatttgacgttgtgatcaaagccaagaaagctcttgacgctatcccaagttgcaaaaacaaagtctcttgtgctgatattcttgctttagccacccgtgatgttgttgtcgccgccaaaggtccgtcgtacgcagtggaactcggaaggtttgatggtttggtgtcgactgcggctagcgttaacggaaacttgcccggaccaaataacaaagttacagaacttaacaagctttttgccaaaaacaaacttacccaagaggacatgatcgctctttcagcggctcacacacttggattcgcccattgtggcaaagtgttcaacagaatctacaacttcaacctcacacacgccgttgacccaactctaaacaaagcctacgctaaagaacttcagttggcttgtcccaagacagttgacccaagaatcgccatcaacatggacccaaccactccaagacaattcgacaacatttacttcaagaatctgcaacaaggcaaaggactcttcacttccgaccaagttctcttcaccgatggtcgctcaaagcccaccgttaacgattgggccaagaattctgttgctttcaacaaggctttcgtaaccgctatgaccaaactcggccgcgttggcgttaagactagacgcaacggtaacattcgtcgtgactgtggtgcctttaactgatcatcctttttgggttttgttttcgagatttgttctttgacatgttatgagtttttgttttgttgtcttctgtttgtttctgcttcttgtatttttgaaaaacacattaacgaatctataccgttgttttatttctcgtgactgtaatattaataatcttatttctattaaacttgttt

SEQ ID NO: 91430 - protein, 329 aa, Arabidopsis thaliana
  peptide (1)..(329): Ceres Seq. ID no. 12727580
MARFSLVVVVTLSLAISMFPDTTTAQLKTNFYGNSCPNVEQIVKKVVQEKIKQTFVTIPATLRLFFHDCFVNGCDASVMIQSTPTNKAEKDHPDNISLAGDGFDVVIKAKKALDAIPSCKNKVSCADILALATRDVVVAAKGPSYAVELGRFDGLVSTAASVNGNLPGPNNKVTELNKLFAKNKLTQEDMIALSAAHTLGFAHCGKVFNRIYNFNLTHAVDPTLNKAYAKELQLACPKTVDPRIAINMDPTTPRQFDNIYFKNLQQGKGLFTSDQVLFTDGRSKPTVNDWAKNSVAFNKAFVTAMTKLGRVGVKTRRNGNIRRDCGAFN

SEQ ID NO: 91431 - protein, 312 aa, Arabidopsis thaliana
  peptide (1)..(312): Ceres Seq. ID no. 12727581
MFPDTTTAQLKTNFYGNSCPNVEQIVKKVVQEKIKQTFVTIPATLRLFFHDCFVNGCDASVMIQSTPTNKAEKDHPDNISLAGDGFDVVIKAKKALDAIPSCKNKVSCADILALATRDVVVAAKGPSYAVELGRFDGLVSTAASVNGNLPGPNNKVTELNKLFAKNKLTQEDMIALSAAHTLGFAHCGKVFNRIYNFNLTHAVDPTLNKAYAKELQLACPKTVDPRIAINMDPTTPRQFDNIYFKNLQQGKGLFTSDQVLFTDGRSKPTVNDWAKNSVAFNKAFVTAMTKLGRVGVKTRRNGNIRRDCGAFN

SEQ ID NO: 91432 - protein, 251 aa, Arabidopsis thaliana
  peptide (1)..(251): Ceres Seq. ID no. 12727582
MIQSTPTNKAEKDHPDNISLAGDGFDVVIKAKKALDAIPSCKNKVSCADILALATRDVVVAAKGPSYAVELGRFDGLVSTAASVNGNLPGPNNKVTELNKLFAKNKLTQEDMIALSAAHTLGFAHCGKVFNRIYNFNLTHAVDPTLNKAYAKELQLACPKTVDPRIAINMDPTTPRQFDNIYFKNLQQGKGLFTSDQVLFTDGRSKPTVNDWAKNSVAFNKAFVTAMTKLGRVGVKTRRNGNIRRDCGAFN

SEQ ID NO: 91433 - DNA, 1356 bp, Arabidopsis thaliana
  misc_feature (1)..(1356): Ceres Seq. ID no. 12727622
  misc_feature (1)..(1356): Ortholog of  Ceres SEQ ID NO 13599900 as cited in SEQ ID NO 531
  misc_feature (1)..(1356): Ortholog of  Ceres SEQ ID NO 13659971 as cited in SEQ ID NO 67565
  misc_feature (1)..(1356): Ortholog of  Ceres SEQ ID NO 13500385 as cited in SEQ ID NO 67583
atgagtggaagcagaaggaaggcgacgccggcgagtaggacgcgagtagggaattacgagatgggacgaactctcggagaaggaagcttcgctaaggtgaaatacgccaagaacaccgtcaccggagatcaagccgctatcaaaatcctcgaccgagaaaaggtcttccgtcacaaaatggtcgaacagcttaaaagagaaatatctacaatgaaactgattaaacatccaaatgtggttgaaatcattgaggttatggcgagcaaaacgaagatctatatcgttcttgagcttgtcaatggaggtgaactctttgataaaatcgcgcaacaagggaggcttaaggaggatgaagctcggagatattttcagcagctcatcaatgctgtggattactgccacagtcgaggtgtctaccacagagatctcaagcctgaaaatctgatccttgacgcaaatggggttttgaaagtctctgattttgggttaagcgccttctcacgacaagttcgggaagatggtttgcttcatacagcttgtggaacgccaaactacgttgcccctgaggttttgtcggacaaaggctatgacggtgcagcagcagatgtctggtcttgtggtgtcattctctttgtgcttatggctggttacttgccttttgatgagccgaatctcatgacattatacaaacgtatatgcaaggctgagtttagctgcccaccatggttctcgcaaggtgccaagagagtcatcaagcgtattctcgaacccaaccctattaccagaataagtattgcagagttgctcgaagatgaatggttcaagaaagggtacaagccgccatcatttgaccaagatgacgaggacataaccatagatgatgttgatgctgcttttagtaactccaaggaatgtcttgtaactgagaagaaggagaaacctgtatccatgaacgctttcgaacttatctctagctcaagcgagttcagtcttgaaaacttgttcgagaagcaagcgcaacttgtgaagaaagaaacgcggtttacttctcaacgatctgcgagtgaaataatgtcgaaaatggaagaaaccgcaaagccattaggctttaatgtccgtaaagacaactacaagataaaaatgaaaggagacaaaagtggtcgtaaaggtcagctctccgtagctacagaggtgtttgaagtggcgccatcattgcatgtggtagagcttaggaaaaccggtggtgataccctcgagtttcacaaggtatgtgattcgttctacaaaaacttctcatctggattaaaggatgtagtctggaatactgatgcagccgctgaagaacaaaagcaataa

SEQ ID NO: 91434 - protein, 451 aa, Arabidopsis thaliana
  peptide (1)..(451): Ceres Seq. ID no. 12727623
MSGSRRKATPASRTRVGNYEMGRTLGEGSFAKVKYAKNTVTGDQAAIKILDREKVFRHKMVEQLKREISTMKLIKHPNVVEIIEVMASKTKIYIVLELVNGGELFDKIAQQGRLKEDEARRYFQQLINAVDYCHSRGVYHRDLKPENLILDANGVLKVSDFGLSAFSRQVREDGLLHTACGTPNYVAPEVLSDKGYDGAAADVWSCGVILFVLMAGYLPFDEPNLMTLYKRICKAEFSCPPWFSQGAKRVIKRILEPNPITRISIAELLEDEWFKKGYKPPSFDQDDEDITIDDVDAAFSNSKECLVTEKKEKPVSMNAFELISSSSEFSLENLFEKQAQLVKKETRFTSQRSASEIMSKMEETAKPLGFNVRKDNYKIKMKGDKSGRKGQLSVATEVFEVAPSLHVVELRKTGGDTLEFHKVCDSFYKNFSSGLKDVVWNTDAAAEEQKQ

SEQ ID NO: 91435 - protein, 431 aa, Arabidopsis thaliana
  peptide (1)..(431): Ceres Seq. ID no. 12727624
MGRTLGEGSFAKVKYAKNTVTGDQAAIKILDREKVFRHKMVEQLKREISTMKLIKHPNVVEIIEVMASKTKIYIVLELVNGGELFDKIAQQGRLKEDEARRYFQQLINAVDYCHSRGVYHRDLKPENLILDANGVLKVSDFGLSAFSRQVREDGLLHTACGTPNYVAPEVLSDKGYDGAAADVWSCGVILFVLMAGYLPFDEPNLMTLYKRICKAEFSCPPWFSQGAKRVIKRILEPNPITRISIAELLEDEWFKKGYKPPSFDQDDEDITIDDVDAAFSNSKECLVTEKKEKPVSMNAFELISSSSEFSLENLFEKQAQLVKKETRFTSQRSASEIMSKMEETAKPLGFNVRKDNYKIKMKGDKSGRKGQLSVATEVFEVAPSLHVVELRKTGGDTLEFHKVCDSFYKNFSSGLKDVVWNTDAAAEEQKQ

SEQ ID NO: 91436 - protein, 392 aa, Arabidopsis thaliana
  peptide (1)..(392): Ceres Seq. ID no. 12727625
MVEQLKREISTMKLIKHPNVVEIIEVMASKTKIYIVLELVNGGELFDKIAQQGRLKEDEARRYFQQLINAVDYCHSRGVYHRDLKPENLILDANGVLKVSDFGLSAFSRQVREDGLLHTACGTPNYVAPEVLSDKGYDGAAADVWSCGVILFVLMAGYLPFDEPNLMTLYKRICKAEFSCPPWFSQGAKRVIKRILEPNPITRISIAELLEDEWFKKGYKPPSFDQDDEDITIDDVDAAFSNSKECLVTEKKEKPVSMNAFELISSSSEFSLENLFEKQAQLVKKETRFTSQRSASEIMSKMEETAKPLGFNVRKDNYKIKMKGDKSGRKGQLSVATEVFEVAPSLHVVELRKTGGDTLEFHKVCDSFYKNFSSGLKDVVWNTDAAAEEQKQ

SEQ ID NO: 91437 - DNA, 780 bp, Arabidopsis thaliana
  misc_feature (1)..(780): Ceres Seq. ID no. 12727654
  misc_feature (1)..(780): Ortholog of  Ceres SEQ ID NO 13594918 as cited in SEQ ID NO 55747
  misc_feature (1)..(780): Ortholog of  Ceres SEQ ID NO 12587066 as cited in SEQ ID NO 63204
atgggagatcatttcgtgctgctggtggatcggttgataacagaatccacgattgaggctgcgattcagagcaggaaccagatgttgcaagctaatatacccgttgaggaatgtacaatcttggacgataaaacacttgagatgctgcgtaacggagatttgtcaatggctgagtgcaggatctgtcacgacgaggacttggattccaacatggagactccttgttcttgcagcggcagcgtcaagtatgcgcataggaggtgcgtacagagatggtgtaacgagaaaggtgataccacctgcgagatttgccatcaggaattcaagccggattatacagcgccgcctccgttgctagagttaggccatgttcctctccatttcaggggaaactggggaatctctcaacgggagcatcgtttcatcacagttgtacctgctgattccacttttattgaccaaccatatcctctttcttccaccacaagcttcatctgttgccgttcccttgttctcattttcatggctcttctcattctccgacataccctccctttagtcctcaccggatcaaaccttcatgtcttccctttgttcacgttgttatttctgagaatactcggaatcatgctacccatctacgttgtcaccaaagcagtcgccacctgccgccgccattctcggaccttagacacctctccctccgatgattcatctgatgaagaaacagattcatggcgcttgcctcaaacgcaatcttacattataggcgtacgatga

SEQ ID NO: 91438 - protein, 259 aa, Arabidopsis thaliana
  peptide (1)..(259): Ceres Seq. ID no. 12727655
MGDHFVLLVDRLITESTIEAAIQSRNQMLQANIPVEECTILDDKTLEMLRNGDLSMAECRICHDEDLDSNMETPCSCSGSVKYAHRRCVQRWCNEKGDTTCEICHQEFKPDYTAPPPLLELGHVPLHFRGNWGISQREHRFITVVPADSTFIDQPYPLSSTTSFICCRSLVLIFMALLILRHTLPLVLTGSNLHVFPLFTLLFLRILGIMLPIYVVTKAVATCRRHSRTLDTSPSDDSSDEETDSWRLPQTQSYIIGVR

SEQ ID NO: 91439 - protein, 232 aa, Arabidopsis thaliana
  peptide (1)..(232): Ceres Seq. ID no. 12727656
MLQANIPVEECTILDDKTLEMLRNGDLSMAECRICHDEDLDSNMETPCSCSGSVKYAHRRCVQRWCNEKGDTTCEICHQEFKPDYTAPPPLLELGHVPLHFRGNWGISQREHRFITVVPADSTFIDQPYPLSSTTSFICCRSLVLIFMALLILRHTLPLVLTGSNLHVFPLFTLLFLRILGIMLPIYVVTKAVATCRRHSRTLDTSPSDDSSDEETDSWRLPQTQSYIIGVR

SEQ ID NO: 91440 - protein, 212 aa, Arabidopsis thaliana
  peptide (1)..(212): Ceres Seq. ID no. 12727657
MLRNGDLSMAECRICHDEDLDSNMETPCSCSGSVKYAHRRCVQRWCNEKGDTTCEICHQEFKPDYTAPPPLLELGHVPLHFRGNWGISQREHRFITVVPADSTFIDQPYPLSSTTSFICCRSLVLIFMALLILRHTLPLVLTGSNLHVFPLFTLLFLRILGIMLPIYVVTKAVATCRRHSRTLDTSPSDDSSDEETDSWRLPQTQSYIIGVR

SEQ ID NO: 91441 - DNA, 1755 bp, Arabidopsis thaliana
  misc_feature (1)..(1755): Ceres Seq. ID no. 12727681
  misc_feature (1)..(1755): Ortholog of  Ceres SEQ ID NO 12586556 as cited in SEQ ID NO 64667
  misc_feature (1)..(1755): Ortholog of  Ceres SEQ ID NO 13660894 as cited in SEQ ID NO 67475
atgcttgcgaaacaaacgccattaacaaaacaaatgctctccgagctcttacgagcaagttcttcaaagccgaagcagcttaagaagatccatgcgattgtactaaggacaggtttctctgaaaagaacagtcttttaactcagctgttagagaatcttgtagttattggtgacatgtgttacgcacgccaggtgttcgacgaaatgcacaagccgaggatcttcctttggaacactcttttcaaagggtacgttagaaaccagctcccttttgaaagtctcctactttataagaaaatgcgtgatcttggtgtccgtcctgatgaatttacttacccgtttgtggtgaaagcgatctctcagcttggggatttttcctgtgggtttgctcttcatgcccatgtggtgaaatatggttttgggtgtcttgggattgttgcaactgagttggtaatgatgtacatgaagtttggtgaattgagttcggctgagtttttgtttgagtcaatgcaagtcaaagatttagtggcttggaatgcgtttcttgcggtttgtgttcaaacggggaactccgctatagctcttgagtatttcaacaaaatgtgcgcggatgcagttcagtttgattcgtttactgtcgtgagtatgctttctgcttgtggtcagctaggctctttggagattggagaagaaatttatgatcgtgcgaggaaagaagagattgattgtaacataatagtcgaaaatgcaaggcttgatatgcacttaaagtgtggtaacactgaagctgccagggtattattcgaggaaatgaaacagaggaatgtggtttcatggagcacaatgattgtaggatatgcaatgaatggagatagcagagaagctttgacattgttcactacgatgcagaatgagggacttagacctaactacgtgacatttctcggggtattatctgcttgtagccacgctggactagtgaatgaaggaaaaaggtatttcagtctcatggttcagtcgaatgataagaatctggagcctagaaaagagcattatgcatgtatggttgatctattgggacgctctggtcttctagaggaggcttatgaatttatcaaaaagatgccagtggaaccagataccggtatctggggagctttgttgggtgcttgtgcagttcatcgtgatatgatattagggcagaaagtggcagacgttcttgttgaaacagctcctgatattggttcataccacgtactactgtctaatatctacgcagctgctggtaaatgggattgtgttgacaaagtaaggagtaaaatgaggaagctgggcactaaaaaggttgcagcctatagttctgttgaattcgagggcaaaatccattttttcaatagaggagacaaatcacatccgcaatcaaaggcgatatatgagaaattggatgaaatcttgaagaagataaggaaaatggggtatgttccagatacgtgttcagtatttcatgatgtggaaatggaggaaaaagaatgttctctgagtcatcacagtgagaagctcgctattgcatttggactcattaaagggagaccgggacatcctatacgggttatgaagaacttgagaacctgtgatgattgccacgctttctccaagtttgtttccagtcttacttcgacagaaatcatcatgcgagacaagaacaggtttcaccacttcaggaatggtgtctgctcttgcaaagagttctggtga

SEQ ID NO: 91442 - protein, 584 aa, Arabidopsis thaliana
  peptide (1)..(584): Ceres Seq. ID no. 12727682
MLAKQTPLTKQMLSELLRASSSKPKQLKKIHAIVLRTGFSEKNSLLTQLLENLVVIGDMCYARQVFDEMHKPRIFLWNTLFKGYVRNQLPFESLLLYKKMRDLGVRPDEFTYPFVVKAISQLGDFSCGFALHAHVVKYGFGCLGIVATELVMMYMKFGELSSAEFLFESMQVKDLVAWNAFLAVCVQTGNSAIALEYFNKMCADAVQFDSFTVVSMLSACGQLGSLEIGEEIYDRARKEEIDCNIIVENARLDMHLKCGNTEAARVLFEEMKQRNVVSWSTMIVGYAMNGDSREALTLFTTMQNEGLRPNYVTFLGVLSACSHAGLVNEGKRYFSLMVQSNDKNLEPRKEHYACMVDLLGRSGLLEEAYEFIKKMPVEPDTGIWGALLGACAVHRDMILGQKVADVLVETAPDIGSYHVLLSNIYAAAGKWDCVDKVRSKMRKLGTKKVAAYSSVEFEGKIHFFNRGDKSHPQSKAIYEKLDEILKKIRKMGYVPDTCSVFHDVEMEEKECSLSHHSEKLAIAFGLIKGRPGHPIRVMKNLRTCDDCHAFSKFVSSLTSTEIIMRDKNRFHHFRNGVCSCKEFW

SEQ ID NO: 91443 - protein, 573 aa, Arabidopsis thaliana
  peptide (1)..(573): Ceres Seq. ID no. 12727683
MLSELLRASSSKPKQLKKIHAIVLRTGFSEKNSLLTQLLENLVVIGDMCYARQVFDEMHKPRIFLWNTLFKGYVRNQLPFESLLLYKKMRDLGVRPDEFTYPFVVKAISQLGDFSCGFALHAHVVKYGFGCLGIVATELVMMYMKFGELSSAEFLFESMQVKDLVAWNAFLAVCVQTGNSAIALEYFNKMCADAVQFDSFTVVSMLSACGQLGSLEIGEEIYDRARKEEIDCNIIVENARLDMHLKCGNTEAARVLFEEMKQRNVVSWSTMIVGYAMNGDSREALTLFTTMQNEGLRPNYVTFLGVLSACSHAGLVNEGKRYFSLMVQSNDKNLEPRKEHYACMVDLLGRSGLLEEAYEFIKKMPVEPDTGIWGALLGACAVHRDMILGQKVADVLVETAPDIGSYHVLLSNIYAAAGKWDCVDKVRSKMRKLGTKKVAAYSSVEFEGKIHFFNRGDKSHPQSKAIYEKLDEILKKIRKMGYVPDTCSVFHDVEMEEKECSLSHHSEKLAIAFGLIKGRPGHPIRVMKNLRTCDDCHAFSKFVSSLTSTEIIMRDKNRFHHFRNGVCSCKEFW

SEQ ID NO: 91444 - protein, 526 aa, Arabidopsis thaliana
  peptide (1)..(526): Ceres Seq. ID no. 12727684
MCYARQVFDEMHKPRIFLWNTLFKGYVRNQLPFESLLLYKKMRDLGVRPDEFTYPFVVKAISQLGDFSCGFALHAHVVKYGFGCLGIVATELVMMYMKFGELSSAEFLFESMQVKDLVAWNAFLAVCVQTGNSAIALEYFNKMCADAVQFDSFTVVSMLSACGQLGSLEIGEEIYDRARKEEIDCNIIVENARLDMHLKCGNTEAARVLFEEMKQRNVVSWSTMIVGYAMNGDSREALTLFTTMQNEGLRPNYVTFLGVLSACSHAGLVNEGKRYFSLMVQSNDKNLEPRKEHYACMVDLLGRSGLLEEAYEFIKKMPVEPDTGIWGALLGACAVHRDMILGQKVADVLVETAPDIGSYHVLLSNIYAAAGKWDCVDKVRSKMRKLGTKKVAAYSSVEFEGKIHFFNRGDKSHPQSKAIYEKLDEILKKIRKMGYVPDTCSVFHDVEMEEKECSLSHHSEKLAIAFGLIKGRPGHPIRVMKNLRTCDDCHAFSKFVSSLTSTEIIMRDKNRFHHFRNGVCSCKEFW

SEQ ID NO: 91445 - DNA, 576 bp, Arabidopsis thaliana
  misc_feature (1)..(576): Ceres Seq. ID no. 12727685
  misc_feature (1)..(576): Ortholog of  Ceres SEQ ID NO 15180555 as cited in SEQ ID NO 1214
atggcagattccgacatagagacgagcagcaaccaaaatagcaatagcaacaccagccattcaactacttcaaccacgagtgttcatgttacggctctcgatgggattgtaagtgctaattctctcttcacggttgcagtctttgtcggaatctccttcgaccagccaagtgacctcaccctcacggacagaacagagtgcagtgcaggacgagacgtggaacgtgacctggttgtgtttgaagtcatctcatttgccttctttctcttctcctcccttgtggctcaagggatgaagctagccatcaaccttttgaacagcaaagaaacggacgaagtgtttaaagcgaatatcaacagagatgtgcttcgtttcggtgtggttggtgcagctggtggatctatcttgggttgtgtatttcttctgttgtcaattgttgatgttatacaactccgtctggggcttctctcttgcggcaatgctttggcgattcataccgtgctggtgcttgtggtattggtctcttctgctctcagtgtttatatcttcacagtgttctactctttcaggaaatga

SEQ ID NO: 91446 - protein, 191 aa, Arabidopsis thaliana
  peptide (1)..(191): Ceres Seq. ID no. 12727686
MADSDIETSSNQNSNSNTSHSTTSTTSVHVTALDGIVSANSLFTVAVFVGISFDQPSDLTLTDRTECSAGRDVERDLVVFEVISFAFFLFSSLVAQGMKLAINLLNSKETDEVFKANINRDVLRFGVVGAAGGSILGCVFLLLSIVDVIQLRLGLLSCGNALAIHTVLVLVVLVSSALSVYIFTVFYSFRK

SEQ ID NO: 91447 - DNA, 1680 bp, Arabidopsis thaliana
  misc_feature (1)..(1680): Ceres Seq. ID no. 12727701
  misc_feature (1)..(1680): Ortholog of  Ceres SEQ ID NO 13657677 as cited in SEQ ID NO 66119
atggtcagagaagctcttcaatttctttctcgcctgagaaaatcctcgaatctcccagacccattcacctgcaacaagcatattcatcagctaatcaattccaattgcggcattctatctctcaaattcttagcttacttagtctccagaggttacactcctcatcgttcttcattcaattcggtcgtatcgtttgtttgtaaactagggcaagttaaattcgctgaagatatcgttcactcgatgcctagattcgggtgtgaaccagatgttatatcttataactctctcattgatgggcattgtagaaatggagatatcagaagtgctagtttggttttagagagtttaagagcctctcatgggtttatctgcaagcctgacatagttagttttaattctctgtttaatgggtttagcaagatgaagatgttagatgaggtttttgtgtatatgggtgttatgttgaagtgttgttcgccgaatgttgttacttatagtacttggatcgacacgttctgcaaatccggggagttgcagttggcgttgaagagttttcactctatgaagagagatgctttatctccaaatgtggttactttcacttgtttgattgatgggtactgtaaagctggtgacttggaggttgcggtttcgttatacaaagaaatgagacgcgttcggatgtctttgaatgttgttacttatactgctttgatagatggtttctgcaagaagggggaaatgcagagagctgaggaaatgtattcaaggatggtcgaggatagagttgagccaaactctcttgtatacactacgattatcgatggtttttttcagagaggagattcggataatgccatgaagtttctggccaaaatgctcaatcaagggatgagacttgatataacagcttacggcgtaatcatatcaggcctttgtggtaatggtaaactaaaggaggcaactgagattgtagaagatatggagaaaagtgatttagttcctgatatggtgatttttactacaatgatgaatgcatattttaaatccggacgcatgaaggctgcggttaacatgtaccacaaattaattgagagaggctttgagcccgatgttgtagctctttcgactatgatcgatgggattgcgaagaatggacaactacatgaagctatagtttatttctgtatagagaaagctaatgatgttatgtacactgtgcttattgatgctttgtgcaaagaaggagactttatagaagttgagagattgtttagtaaaatctcagaggctggacttgttccagataagttcatgtacacttcttggatagctggtttgtgtaagcaagggaatttggtggatgcgtttaagttaaaaaccagaatggttcaggaaggtcttttgcttgatttgttagcctatactacattgatttacgggctagctagcaagggtttgatggttgaggcaagacaagttttcgatgaaatgttgaatagcggaataagtcctgattcggctgtttttgatctcttgattagagcttatgaaaaggagggaaacatggccgctgcttcggatttgcttcttgatatgcagagaagggggcttgtaacagcagtaagtgatgcggattgcagcaaacagtgtggcaatgaagtgaactgttcgtga

SEQ ID NO: 91448 - protein, 559 aa, Arabidopsis thaliana
  peptide (1)..(559): Ceres Seq. ID no. 12727702
MVREALQFLSRLRKSSNLPDPFTCNKHIHQLINSNCGILSLKFLAYLVSRGYTPHRSSFNSVVSFVCKLGQVKFAEDIVHSMPRFGCEPDVISYNSLIDGHCRNGDIRSASLVLESLRASHGFICKPDIVSFNSLFNGFSKMKMLDEVFVYMGVMLKCCSPNVVTYSTWIDTFCKSGELQLALKSFHSMKRDALSPNVVTFTCLIDGYCKAGDLEVAVSLYKEMRRVRMSLNVVTYTALIDGFCKKGEMQRAEEMYSRMVEDRVEPNSLVYTTIIDGFFQRGDSDNAMKFLAKMLNQGMRLDITAYGVIISGLCGNGKLKEATEIVEDMEKSDLVPDMVIFTTMMNAYFKSGRMKAAVNMYHKLIERGFEPDVVALSTMIDGIAKNGQLHEAIVYFCIEKANDVMYTVLIDALCKEGDFIEVERLFSKISEAGLVPDKFMYTSWIAGLCKQGNLVDAFKLKTRMVQEGLLLDLLAYTTLIYGLASKGLMVEARQVFDEMLNSGISPDSAVFDLLIRAYEKEGNMAAASDLLLDMQRRGLVTAVSDADCSKQCGNEVNCS

SEQ ID NO: 91449 - protein, 478 aa, Arabidopsis thaliana
  peptide (1)..(478): Ceres Seq. ID no. 12727703
MPRFGCEPDVISYNSLIDGHCRNGDIRSASLVLESLRASHGFICKPDIVSFNSLFNGFSKMKMLDEVFVYMGVMLKCCSPNVVTYSTWIDTFCKSGELQLALKSFHSMKRDALSPNVVTFTCLIDGYCKAGDLEVAVSLYKEMRRVRMSLNVVTYTALIDGFCKKGEMQRAEEMYSRMVEDRVEPNSLVYTTIIDGFFQRGDSDNAMKFLAKMLNQGMRLDITAYGVIISGLCGNGKLKEATEIVEDMEKSDLVPDMVIFTTMMNAYFKSGRMKAAVNMYHKLIERGFEPDVVALSTMIDGIAKNGQLHEAIVYFCIEKANDVMYTVLIDALCKEGDFIEVERLFSKISEAGLVPDKFMYTSWIAGLCKQGNLVDAFKLKTRMVQEGLLLDLLAYTTLIYGLASKGLMVEARQVFDEMLNSGISPDSAVFDLLIRAYEKEGNMAAASDLLLDMQRRGLVTAVSDADCSKQCGNEVNCS

SEQ ID NO: 91450 - protein, 418 aa, Arabidopsis thaliana
  peptide (1)..(418): Ceres Seq. ID no. 12727704
MKMLDEVFVYMGVMLKCCSPNVVTYSTWIDTFCKSGELQLALKSFHSMKRDALSPNVVTFTCLIDGYCKAGDLEVAVSLYKEMRRVRMSLNVVTYTALIDGFCKKGEMQRAEEMYSRMVEDRVEPNSLVYTTIIDGFFQRGDSDNAMKFLAKMLNQGMRLDITAYGVIISGLCGNGKLKEATEIVEDMEKSDLVPDMVIFTTMMNAYFKSGRMKAAVNMYHKLIERGFEPDVVALSTMIDGIAKNGQLHEAIVYFCIEKANDVMYTVLIDALCKEGDFIEVERLFSKISEAGLVPDKFMYTSWIAGLCKQGNLVDAFKLKTRMVQEGLLLDLLAYTTLIYGLASKGLMVEARQVFDEMLNSGISPDSAVFDLLIRAYEKEGNMAAASDLLLDMQRRGLVTAVSDADCSKQCGNEVNCS

SEQ ID NO: 91451 - DNA, 1214 bp, Arabidopsis thaliana
  misc_feature (1)..(1214): Ceres Seq. ID no. 12727733
  misc_feature (1)..(1214): Ortholog of  Ceres SEQ ID NO 13594740 as cited in SEQ ID NO 51721
  misc_feature (1)..(1214): Ortholog of  Ceres SEQ ID NO 14316497 as cited in SEQ ID NO 58285
  misc_feature (1)..(1214): Ortholog of  Ceres SEQ ID NO 13595944 as cited in SEQ ID NO 68153
aggtccatcacctcttacattttttctccaaagtctctcaatggatagcttgagagatgttaagcctatcaaactcatattttctattttctgtctagttattatactatccgcctgtaattcaacggcagagctaccgcggttcgtccaaccaccagaacccgatggttcactcagttttctcgttgtcggcgactggggaagaagaggttcttataatcagtcccaagtagctcttcagatgggaaaaatagggaaggacttaaatattgatttcctcatttcgactggagataacttttatgatgatggaataatcagtccatatgattctcaatttcaagattcgtttaccaatatttacacagcaactagcttacaaaaaccatggtacaatgtattaggaaatcatgattatagaggtaacgtctatgcgcaactcagccccatactcagggatttggactgccgttggatttgtttaagatcttatgttgttaacgccgagattgtcgatattttcttcgtggatacaacaccgttcgtagatagatattttgatgaaccaaaggaccatgtatatgattggagaggcgtattaccgagaaataaataccttaacagtctcttaacggatgtggatgtggcattgcaagaatcaatggctaaatggaaaatagtggtaggccatcacacgatcaaaagtgcaggtcaccacggaaataccatagagcttgagaaacaacttttacctatcctcgaggctaatgaagtggatctctatataaacgggcatgatcattgcttggagcacataagcagcatcaacagtggaatacaatttatgacaagtggaggtggctccaaggcgtggaaaggagatgtgaatgattggaacccacaagagatgaggttttactatgatggacaaggattcatgtcggtttacacatccgaagctgaactacgcgtcgttttctatgatggtcttggtcacgttttgcatcgatggagcactcttaagaatggggtttattccgatatctaatcgatggtcagacaaaaaagtagttaagagttacgacataattatttatattaattagtccattgtttattatgttgatatttcatgtgagttaaacattttttaatgttgtgtgattattttcgaattcttaatggtatcttaatacatggagacatatcttctc

SEQ ID NO: 91452 - protein, 348 aa, Arabidopsis thaliana
  peptide (1)..(348): Ceres Seq. ID no. 12727734
GPSPLTFFLQSLSMDSLRDVKPIKLIFSIFCLVIILSACNSTAELPRFVQPPEPDGSLSFLVVGDWGRRGSYNQSQVALQMGKIGKDLNIDFLISTGDNFYDDGIISPYDSQFQDSFTNIYTATSLQKPWYNVLGNHDYRGNVYAQLSPILRDLDCRWICLRSYVVNAEIVDIFFVDTTPFVDRYFDEPKDHVYDWRGVLPRNKYLNSLLTDVDVALQESMAKWKIVVGHHTIKSAGHHGNTIELEKQLLPILEANEVDLYINGHDHCLEHISSINSGIQFMTSGGGSKAWKGDVNDWNPQEMRFYYDGQGFMSVYTSEAELRVVFYDGLGHVLHRWSTLKNGVYSDI

SEQ ID NO: 91453 - protein, 335 aa, Arabidopsis thaliana
  peptide (1)..(335): Ceres Seq. ID no. 12727735
MDSLRDVKPIKLIFSIFCLVIILSACNSTAELPRFVQPPEPDGSLSFLVVGDWGRRGSYNQSQVALQMGKIGKDLNIDFLISTGDNFYDDGIISPYDSQFQDSFTNIYTATSLQKPWYNVLGNHDYRGNVYAQLSPILRDLDCRWICLRSYVVNAEIVDIFFVDTTPFVDRYFDEPKDHVYDWRGVLPRNKYLNSLLTDVDVALQESMAKWKIVVGHHTIKSAGHHGNTIELEKQLLPILEANEVDLYINGHDHCLEHISSINSGIQFMTSGGGSKAWKGDVNDWNPQEMRFYYDGQGFMSVYTSEAELRVVFYDGLGHVLHRWSTLKNGVYSDI

SEQ ID NO: 91454 - protein, 268 aa, Arabidopsis thaliana
  peptide (1)..(268): Ceres Seq. ID no. 12727736
MGKIGKDLNIDFLISTGDNFYDDGIISPYDSQFQDSFTNIYTATSLQKPWYNVLGNHDYRGNVYAQLSPILRDLDCRWICLRSYVVNAEIVDIFFVDTTPFVDRYFDEPKDHVYDWRGVLPRNKYLNSLLTDVDVALQESMAKWKIVVGHHTIKSAGHHGNTIELEKQLLPILEANEVDLYINGHDHCLEHISSINSGIQFMTSGGGSKAWKGDVNDWNPQEMRFYYDGQGFMSVYTSEAELRVVFYDGLGHVLHRWSTLKNGVYSDI

SEQ ID NO: 91455 - DNA, 1827 bp, Arabidopsis thaliana
  misc_feature (1)..(1827): Ceres Seq. ID no. 12727741
  misc_feature (1)..(1827): Ortholog of  Ceres SEQ ID NO 15169092 as cited in SEQ ID NO 60430
  misc_feature (1)..(1827): Ortholog of  Ceres SEQ ID NO 14303680 as cited in SEQ ID NO 66019
  misc_feature (1)..(1827): Ortholog of  Ceres SEQ ID NO 15224940 as cited in SEQ ID NO 0
atgctggaaattggaagtcccaatgctctgtttttccgtacgaatactacttgtaataatcttctccgtgagcttcagaaaatatgggttgaaattggtgagactgagactgagaaagatagaatgcttatggaattagagagagaatgtcttcaaatctatcaaagaaaagttgatgaggctgcaaattctaaggcaaagcttcatcagtctgttgcatcaatagaagctgaagttgcttctttaatggctgcccttggtgtgttaaacatcaactcaccgattaaactggataaaggttcaaaatcattgaaagaaaagcttgcagctgtgacacctctagttgaggaattgagaattcaaaaagaggagagaatgaagcagttttccgatataaaggcgcaaattgagaagattagtggggaaatctcaggatacagtgaccatctcaacaaggccatgaacatttcattgactcttgaagaacaagacttgactttgaggaaccttaacgagtatcaaacacatctccgcacacttcaaaaggaaaagtctgatcgtctcaacaaagtgttgggttatgtcaacgaagtccacgcactatgcggtgttcttggagttgactttagtcaaacagttagtgcagttcatccaagcttgcatagaacagaccaagagcaatctacaaacattagtgatagcacattagagggtcttgagcacatgattcaaaagcttaaaactgaaagaaaatcccgatttcaaaagctaaaggatgtagtggcttcactcttcgagctatggaatctaatggacacaccacaggaagacagaactaaatttgggaaagttacttatgttgtaagatcatctgaagctaatatcactgagccgggaatcctttcgaccgaaacaattgaacaggtatctacggaagtggacagtctcagtaaactgaaagcaagcagaatgaaggagcttgtaatgaaacgaagatccgagttagaggatctttgcagactaactcacattcaacctgacacaagcacttccgctgagaaatcaacggcattaatagattctggattagtggacccttcagagcttcttgcaaatattgaaatgcaaataaacaaaattaaagacgaagcacagagtcgaaaagatatcatggacagaattgaccgttggctctctgcatgtgaagaagaaaattggctggaagagtataatctggatgagaaccggtatagtgctggaagagggggacatgtaaacctcaagcgtgcagagcgagctcgggttacaatcaataagatccccggaatggttgacactcttatcaagaaaacacttgtgtgggaagaagacatgcagaagtcatttctatacgacggtgttcgattggttaacatactagaagactataaactgacaaggaaacaacaggaagaggaaaagaaaagatacagggatcaaaagaagaggcaggatctcctactaacccaaagggaatccatttacggatcaaaaccgagtccaagaagaagcagcagcttcagaaagcccaatggtttcaacattagcaatgggaatggttcagtgcctcccacgcctcgtagaggctcggtagggacaacaactcctgacgttcttctaaccccaagatcttactctggtcatcatcgccaaaacgggtatttcaaagaagttagaagactctctactactcccttaaactatgtggccatgcaaaaggaagatactgtttctactacctacacatcgatttatagctctgagccagactcgcctctccaaggctga

SEQ ID NO: 91456 - protein, 608 aa, Arabidopsis thaliana
  peptide (1)..(608): Ceres Seq. ID no. 12727742
MLEIGSPNALFFRTNTTCNNLLRELQKIWVEIGETETEKDRMLMELERECLQIYQRKVDEAANSKAKLHQSVASIEAEVASLMAALGVLNINSPIKLDKGSKSLKEKLAAVTPLVEELRIQKEERMKQFSDIKAQIEKISGEISGYSDHLNKAMNISLTLEEQDLTLRNLNEYQTHLRTLQKEKSDRLNKVLGYVNEVHALCGVLGVDFSQTVSAVHPSLHRTDQEQSTNISDSTLEGLEHMIQKLKTERKSRFQKLKDVVASLFELWNLMDTPQEDRTKFGKVTYVVRSSEANITEPGILSTETIEQVSTEVDSLSKLKASRMKELVMKRRSELEDLCRLTHIQPDTSTSAEKSTALIDSGLVDPSELLANIEMQINKIKDEAQSRKDIMDRIDRWLSACEEENWLEEYNLDENRYSAGRGGHVNLKRAERARVTINKIPGMVDTLIKKTLVWEEDMQKSFLYDGVRLVNILEDYKLTRKQQEEEKKRYRDQKKRQDLLLTQRESIYGSKPSPRRSSSFRKPNGFNISNGNGSVPPTPRRGSVGTTTPDVLLTPRSYSGHHRQNGYFKEVRRLSTTPLNYVAMQKEDTVSTTYTSIYSSEPDSPLQG

SEQ ID NO: 91457 - protein, 567 aa, Arabidopsis thaliana
  peptide (1)..(567): Ceres Seq. ID no. 12727743
MLMELERECLQIYQRKVDEAANSKAKLHQSVASIEAEVASLMAALGVLNINSPIKLDKGSKSLKEKLAAVTPLVEELRIQKEERMKQFSDIKAQIEKISGEISGYSDHLNKAMNISLTLEEQDLTLRNLNEYQTHLRTLQKEKSDRLNKVLGYVNEVHALCGVLGVDFSQTVSAVHPSLHRTDQEQSTNISDSTLEGLEHMIQKLKTERKSRFQKLKDVVASLFELWNLMDTPQEDRTKFGKVTYVVRSSEANITEPGILSTETIEQVSTEVDSLSKLKASRMKELVMKRRSELEDLCRLTHIQPDTSTSAEKSTALIDSGLVDPSELLANIEMQINKIKDEAQSRKDIMDRIDRWLSACEEENWLEEYNLDENRYSAGRGGHVNLKRAERARVTINKIPGMVDTLIKKTLVWEEDMQKSFLYDGVRLVNILEDYKLTRKQQEEEKKRYRDQKKRQDLLLTQRESIYGSKPSPRRSSSFRKPNGFNISNGNGSVPPTPRRGSVGTTTPDVLLTPRSYSGHHRQNGYFKEVRRLSTTPLNYVAMQKEDTVSTTYTSIYSSEPDSPLQG

SEQ ID NO: 91458 - protein, 565 aa, Arabidopsis thaliana
  peptide (1)..(565): Ceres Seq. ID no. 12727744
MELERECLQIYQRKVDEAANSKAKLHQSVASIEAEVASLMAALGVLNINSPIKLDKGSKSLKEKLAAVTPLVEELRIQKEERMKQFSDIKAQIEKISGEISGYSDHLNKAMNISLTLEEQDLTLRNLNEYQTHLRTLQKEKSDRLNKVLGYVNEVHALCGVLGVDFSQTVSAVHPSLHRTDQEQSTNISDSTLEGLEHMIQKLKTERKSRFQKLKDVVASLFELWNLMDTPQEDRTKFGKVTYVVRSSEANITEPGILSTETIEQVSTEVDSLSKLKASRMKELVMKRRSELEDLCRLTHIQPDTSTSAEKSTALIDSGLVDPSELLANIEMQINKIKDEAQSRKDIMDRIDRWLSACEEENWLEEYNLDENRYSAGRGGHVNLKRAERARVTINKIPGMVDTLIKKTLVWEEDMQKSFLYDGVRLVNILEDYKLTRKQQEEEKKRYRDQKKRQDLLLTQRESIYGSKPSPRRSSSFRKPNGFNISNGNGSVPPTPRRGSVGTTTPDVLLTPRSYSGHHRQNGYFKEVRRLSTTPLNYVAMQKEDTVSTTYTSIYSSEPDSPLQG

SEQ ID NO: 91459 - DNA, 1881 bp, Arabidopsis thaliana
  misc_feature (1)..(1881): Ceres Seq. ID no. 12727775
  misc_feature (1)..(1881): Ortholog of  Ceres SEQ ID NO 14313893 as cited in SEQ ID NO 54646
  misc_feature (1)..(1881): Ortholog of  Ceres SEQ ID NO 13656797 as cited in SEQ ID NO 65756
  misc_feature (1)..(1881): Ortholog of  Ceres SEQ ID NO 13658498 as cited in SEQ ID NO 66557
  misc_feature (1)..(1881): Ortholog of  Ceres SEQ ID NO 15227053 as cited in SEQ ID NO 0
atgggtaagtctagtggtagaaatggtaacggaagctttaacggcaataaatttcacggagttagaccttacgtacggtctccagttccacggcttagatggacgccggatcttcaccgttgtttcgttcacgccgtcgagattctcggtggtcaacaccgagcaacaccaaaacttgttcttaagatgatggatgtgaagggacttaccatttcacatgtcaaaagccaccttcagatgtatagaggaggttcaaagctcactttggagaaaccagaagaaagctcatcatcttcaataagaagaagacaagacagtgaagaagattattatcttcatgacaacttgtctttacacacaaggaatgattgtcttttgggttttcactcttttcctctttcttcacattcttcatttagaggaggaggaggaggaagaacaaaagagcagcagacttcagagtctggtggttatgatgatgatgctgactttcttcacatcaagaagatgaacgatacgacgacgtttttgtcacatcatttccccaagggaacagaggagtggcgggaacaagaacacgaagaagaagaagaagatttgtcgttgtctctgtcgttaaatcatcatcattggagaagcaatggatcatcggtgatgaatctatcgaaccgttttggctccaattccaagacggcgatactcaacgattcttactccgacgagaatcattcttcctccgccgccgccgccgtaacttccgtcgtaatcccaccgtgctccggcaatgtactccgagccgttctcttgctcttcttcatctgcttctgcttctccctctacagaacttctggttatctccgaatcgtctctgactcttcctccaccctctctcgcattttcccctctgtcaacgattcttcttcgtctccgtctccatctccgtctctgtctccggaggaaattgaggaacctaagctagaagaagtattgcgtagagcagcaactaaagatggtacagtgattttgacaactttgaatgaagcttgggcggctccaggatctgtgattgatcttttctttgagagttttagaattggtaaaggaacaagaaggctattgaaacacttggtgatcattgctttggatgctaaagcttattcacgttgtcaagaactgcataagcattgcttcagacttgaaacagaaggtgttgatttctctggtggtgaagcttatttcatgactccttcttacttgacaatgatgtggagacgaatctctttccttcgctctgttcttgaaaagggttacaactttgttttcacggatgctgatgtgatgtggttcaggaacccttttcgacggttttacgaagacggtgatttccagattgcttgtgaccattacataggaaggccgaatgattttaggaatagaccaaatggaggatttacctttgtgagagccaataaccgaagtataggcttctacaagttctggtatgattcaaggaccaagtaccccaaaaaccacgaccaggatgttctaaacttcatcaagacagatcctttcctttggaaactaaggattaggattaggttcttgaacacagtgtattttggtggattctgtgaaccaagcaaagatttgaatcttgtttgtacaatgcatgcgaattgctgctttggtttggatagtaagcttcatgatcttagaatcatgcttcaagactggagagatttcaagtctttaccacttcatagtaaccaatcctctggtttcacctggagcgtcccacagaattgcagtcttgattcacttaggcctgttgattctaaggatgaagaagagagtgaaccaccaggagaatctacacagtga

SEQ ID NO: 91460 - protein, 626 aa, Arabidopsis thaliana
  peptide (1)..(626): Ceres Seq. ID no. 12727776
MGKSSGRNGNGSFNGNKFHGVRPYVRSPVPRLRWTPDLHRCFVHAVEILGGQHRATPKLVLKMMDVKGLTISHVKSHLQMYRGGSKLTLEKPEESSSSSIRRRQDSEEDYYLHDNLSLHTRNDCLLGFHSFPLSSHSSFRGGGGGRTKEQQTSESGGYDDDADFLHIKKMNDTTTFLSHHFPKGTEEWREQEHEEEEEDLSLSLSLNHHHWRSNGSSVMNLSNRFGSNSKTAILNDSYSDENHSSSAAAAVTSVVIPPCSGNVLRAVLLLFFICFCFSLYRTSGYLRIVSDSSSTLSRIFPSVNDSSSSPSPSPSLSPEEIEEPKLEEVLRRAATKDGTVILTTLNEAWAAPGSVIDLFFESFRIGKGTRRLLKHLVIIALDAKAYSRCQELHKHCFRLETEGVDFSGGEAYFMTPSYLTMMWRRISFLRSVLEKGYNFVFTDADVMWFRNPFRRFYEDGDFQIACDHYIGRPNDFRNRPNGGFTFVRANNRSIGFYKFWYDSRTKYPKNHDQDVLNFIKTDPFLWKLRIRIRFLNTVYFGGFCEPSKDLNLVCTMHANCCFGLDSKLHDLRIMLQDWRDFKSLPLHSNQSSGFTWSVPQNCSLDSLRPVDSKDEEESEPPGESTQ

SEQ ID NO: 91461 - protein, 564 aa, Arabidopsis thaliana
  peptide (1)..(564): Ceres Seq. ID no. 12727777
MMDVKGLTISHVKSHLQMYRGGSKLTLEKPEESSSSSIRRRQDSEEDYYLHDNLSLHTRNDCLLGFHSFPLSSHSSFRGGGGGRTKEQQTSESGGYDDDADFLHIKKMNDTTTFLSHHFPKGTEEWREQEHEEEEEDLSLSLSLNHHHWRSNGSSVMNLSNRFGSNSKTAILNDSYSDENHSSSAAAAVTSVVIPPCSGNVLRAVLLLFFICFCFSLYRTSGYLRIVSDSSSTLSRIFPSVNDSSSSPSPSPSLSPEEIEEPKLEEVLRRAATKDGTVILTTLNEAWAAPGSVIDLFFESFRIGKGTRRLLKHLVIIALDAKAYSRCQELHKHCFRLETEGVDFSGGEAYFMTPSYLTMMWRRISFLRSVLEKGYNFVFTDADVMWFRNPFRRFYEDGDFQIACDHYIGRPNDFRNRPNGGFTFVRANNRSIGFYKFWYDSRTKYPKNHDQDVLNFIKTDPFLWKLRIRIRFLNTVYFGGFCEPSKDLNLVCTMHANCCFGLDSKLHDLRIMLQDWRDFKSLPLHSNQSSGFTWSVPQNCSLDSLRPVDSKDEEESEPPGESTQ

SEQ ID NO: 91462 - protein, 563 aa, Arabidopsis thaliana
  peptide (1)..(563): Ceres Seq. ID no. 12727778
MDVKGLTISHVKSHLQMYRGGSKLTLEKPEESSSSSIRRRQDSEEDYYLHDNLSLHTRNDCLLGFHSFPLSSHSSFRGGGGGRTKEQQTSESGGYDDDADFLHIKKMNDTTTFLSHHFPKGTEEWREQEHEEEEEDLSLSLSLNHHHWRSNGSSVMNLSNRFGSNSKTAILNDSYSDENHSSSAAAAVTSVVIPPCSGNVLRAVLLLFFICFCFSLYRTSGYLRIVSDSSSTLSRIFPSVNDSSSSPSPSPSLSPEEIEEPKLEEVLRRAATKDGTVILTTLNEAWAAPGSVIDLFFESFRIGKGTRRLLKHLVIIALDAKAYSRCQELHKHCFRLETEGVDFSGGEAYFMTPSYLTMMWRRISFLRSVLEKGYNFVFTDADVMWFRNPFRRFYEDGDFQIACDHYIGRPNDFRNRPNGGFTFVRANNRSIGFYKFWYDSRTKYPKNHDQDVLNFIKTDPFLWKLRIRIRFLNTVYFGGFCEPSKDLNLVCTMHANCCFGLDSKLHDLRIMLQDWRDFKSLPLHSNQSSGFTWSVPQNCSLDSLRPVDSKDEEESEPPGESTQ

SEQ ID NO: 91463 - DNA, 1647 bp, Arabidopsis thaliana
  misc_feature (1)..(1647): Ceres Seq. ID no. 12727851
  misc_feature (1)..(1647): Ortholog of  Ceres SEQ ID NO 15170151 as cited in SEQ ID NO 53069
  misc_feature (1)..(1647): Ortholog of  Ceres SEQ ID NO 13594209 as cited in SEQ ID NO 59089
  misc_feature (1)..(1647): Ortholog of  Ceres SEQ ID NO 14316039 as cited in SEQ ID NO 62062
  misc_feature (1)..(1647): Ortholog of  Ceres SEQ ID NO 13502874 as cited in SEQ ID NO 66298
  misc_feature (1)..(1647): Ortholog of  Ceres SEQ ID NO 12614124 as cited in SEQ ID NO 68392
atcacaaagaaaacttgagacgtacgttaatacggaaaaatggctacgatttggtttctttcacttctctttctctgttgtattctcctcgccgcctttaaacacaagaagcgtcggacaaatcagcagcaaccaccgtcccctcctggctttccgatcatcggaaacttgcatcagcttggagaattaccacatcaatctctatggagtctttccaaaacgtatggtccggtgatgcttttgaagcttggaagtgtcccaacggtcgtagtttcttcttctgagacggcaaaacaagttctgaaaatcaatgatctacattgttgtagccgtcctagcttagcaggggcaaaagagctctcttacaattacttggacattgctttctctccttttgatgattattggaaagaattaaggaggatttgtgtccaagaactctttagtgctaagcgagttcactctattcaacccatcaaggaagaagaagtgaggaaactgatcgtttcagccacggaatcagcctctcagaaatcaccagttaacttgagcgagaagtttcttgatttaactgtaagcgtgatatgcaaggcagcattcagtctagacttccatacttcagttctcaataatgatggatttgacaagttaatccacgatgcgtttttgtttttggggagcttctcggcctcaaacttcttcccaaatggtggctggatcatcgactggctcacgggtctacaaaggcggagagaaaaaagcgtcaaggatcttgatgtgttctatcaacaaatgtttgatctgcataaacaagaaaacaaacaaggagtcgaagatttcgtggacttgctcttgaagttagagaaagaagaaactgttcttggatatggcaagctcacaagaaaccatgtcaaagccatcttaatgaacgttcttcttggggccatcaatacttctgcaatgacaatgacatgggccatggcagaactaataagaaacccgcgagtgatgaagaaagtacaatccgaaatcagaaaccaaatgataaacaaatcagtgatcaccttagatgatatagatcatctaccttacttgaagatggtgatcaaagaaacatggaggctacatcctccagtacctcttctacttccaagagaagttatgtctgaatttgagatcaatggctacaagatacaacccaagacattgctttacgtgaatgtttgggctatagggcgtgatcctgattcctggaaagatgcagatatgttttatccagaaaggtttatggataataacattgatgctaaaggacagaactttgagctgttaccgtttggaagtggccggagaatctgtcctggaatgtacatggggacaacaatggtggagtttggtctagcgaatatgttgtatcagtttgattgggaagtaccagatggtatggtggtcgaagatattgacatggaagaatctcctggactcgccgtgggcaaaaaaaatgagcttctacttgttcctgtcaagtatttaggtcattgatgatcacttaaagtactaattttcttcctttgagtacaaaactaaatgtgttccctaaataaaactaaatcttgtattccattgtctctcggagtggatcaatcc

SEQ ID NO: 91464 - protein, 500 aa, Arabidopsis thaliana
  peptide (1)..(500): Ceres Seq. ID no. 12727852
MATIWFLSLLFLCCILLAAFKHKKRRTNQQQPPSPPGFPIIGNLHQLGELPHQSLWSLSKTYGPVMLLKLGSVPTVVVSSSETAKQVLKINDLHCCSRPSLAGAKELSYNYLDIAFSPFDDYWKELRRICVQELFSAKRVHSIQPIKEEEVRKLIVSATESASQKSPVNLSEKFLDLTVSVICKAAFSLDFHTSVLNNDGFDKLIHDAFLFLGSFSASNFFPNGGWIIDWLTGLQRRREKSVKDLDVFYQQMFDLHKQENKQGVEDFVDLLLKLEKEETVLGYGKLTRNHVKAILMNVLLGAINTSAMTMTWAMAELIRNPRVMKKVQSEIRNQMINKSVITLDDIDHLPYLKMVIKETWRLHPPVPLLLPREVMSEFEINGYKIQPKTLLYVNVWAIGRDPDSWKDADMFYPERFMDNNIDAKGQNFELLPFGSGRRICPGMYMGTTMVEFGLANMLYQFDWEVPDGMVVEDIDMEESPGLAVGKKNELLLVPVKYLGH

SEQ ID NO: 91465 - protein, 435 aa, Arabidopsis thaliana
  peptide (1)..(435): Ceres Seq. ID no. 12727853
MLLKLGSVPTVVVSSSETAKQVLKINDLHCCSRPSLAGAKELSYNYLDIAFSPFDDYWKELRRICVQELFSAKRVHSIQPIKEEEVRKLIVSATESASQKSPVNLSEKFLDLTVSVICKAAFSLDFHTSVLNNDGFDKLIHDAFLFLGSFSASNFFPNGGWIIDWLTGLQRRREKSVKDLDVFYQQMFDLHKQENKQGVEDFVDLLLKLEKEETVLGYGKLTRNHVKAILMNVLLGAINTSAMTMTWAMAELIRNPRVMKKVQSEIRNQMINKSVITLDDIDHLPYLKMVIKETWRLHPPVPLLLPREVMSEFEINGYKIQPKTLLYVNVWAIGRDPDSWKDADMFYPERFMDNNIDAKGQNFELLPFGSGRRICPGMYMGTTMVEFGLANMLYQFDWEVPDGMVVEDIDMEESPGLAVGKKNELLLVPVKYLGH

SEQ ID NO: 91466 - DNA, 768 bp, Arabidopsis thaliana
  misc_feature (1)..(768): Ceres Seq. ID no. 12727892
  misc_feature (1)..(768): Ortholog of  Ceres SEQ ID NO 14311713 as cited in SEQ ID NO 51356
  misc_feature (1)..(768): Ortholog of  Ceres SEQ ID NO 14303126 as cited in SEQ ID NO 67219
atgagctattctcgtcaaagcatgggttctggtagtagaagtacaaggggctatgagtttggaaggacttatgttgtgaggcctaaaggaaagcaccaagctactattgtttggttgcacggtcttggagacaatggctccagctcgtctcagctattggaaagcctacctcttccaaacatcaaatggatttgtccaactgctccttcgcgtcctgtttcgcttctcggtggatttccttgcactgcctggtttgacgtgggagaaatttctgaggatcttcatgatgatatagaaggcttagatgcttcagctgcacatattgctaacctattatctgctgagccaacagatgtcaaagttgggataggaggtttcagtatgggtgcagcaatagctctctactccacgacgtgctacgctcttggacgttatggaaccggacatgcttatactataaacctacgagctactgtaggacttagcggttggcttcctggttggaggagcttaaggagcaaaatagaaagttcgaatgaggttgcaaggcgcgctgcatcgataccgatcttacttgcacatggaacttcggacgatgtagttccttatagatttggagaaaaatctgctcattcacttgccatggctggattccgacaaactatgttcaaaccatatgaagggcttggtcactatacggttcctaaagaaatggatgaggtggttcactggctcgtctcaaggcttggtctcgagggttcgcgttaa

SEQ ID NO: 91467 - protein, 255 aa, Arabidopsis thaliana
  peptide (1)..(255): Ceres Seq. ID no. 12727893
MSYSRQSMGSGSRSTRGYEFGRTYVVRPKGKHQATIVWLHGLGDNGSSSSQLLESLPLPNIKWICPTAPSRPVSLLGGFPCTAWFDVGEISEDLHDDIEGLDASAAHIANLLSAEPTDVKVGIGGFSMGAAIALYSTTCYALGRYGTGHAYTINLRATVGLSGWLPGWRSLRSKIESSNEVARRAASIPILLAHGTSDDVVPYRFGEKSAHSLAMAGFRQTMFKPYEGLGHYTVPKEMDEVVHWLVSRLGLEGSR

SEQ ID NO: 91468 - protein, 248 aa, Arabidopsis thaliana
  peptide (1)..(248): Ceres Seq. ID no. 12727894
MGSGSRSTRGYEFGRTYVVRPKGKHQATIVWLHGLGDNGSSSSQLLESLPLPNIKWICPTAPSRPVSLLGGFPCTAWFDVGEISEDLHDDIEGLDASAAHIANLLSAEPTDVKVGIGGFSMGAAIALYSTTCYALGRYGTGHAYTINLRATVGLSGWLPGWRSLRSKIESSNEVARRAASIPILLAHGTSDDVVPYRFGEKSAHSLAMAGFRQTMFKPYEGLGHYTVPKEMDEVVHWLVSRLGLEGSR

SEQ ID NO: 91469 - protein, 128 aa, Arabidopsis thaliana
  peptide (1)..(128): Ceres Seq. ID no. 12727895
MGAAIALYSTTCYALGRYGTGHAYTINLRATVGLSGWLPGWRSLRSKIESSNEVARRAASIPILLAHGTSDDVVPYRFGEKSAHSLAMAGFRQTMFKPYEGLGHYTVPKEMDEVVHWLVSRLGLEGSR

SEQ ID NO: 91470 - DNA, 1200 bp, Arabidopsis thaliana
  misc_feature (1)..(1200): Ceres Seq. ID no. 12727909
  misc_feature (1)..(1200): Ortholog of  Ceres SEQ ID NO 13596816 as cited in SEQ ID NO 62287
atgggttattgtgttcctcttcgaaagtctccaacttcacatatggttttctcttctttcttcctttcgtttctcttagtcttctctatactctcttcacaaacggccgtagcattcatcggaacatatggtgtaaactacggtcgcatagcggataatcttccgtctcctgacgcggtagcaactctccttaaatcagcaaagattagaaacacccgtatctacgatgctgaccactctgtactcacggcgttccgcgggaccgggattgaaatcatcgttggcttaggcaacgagtttctcaaagacattagtgtaggagaagaccgagccatgaactggattaaagaaaacgtcgagcctttcatacgaggcggtactaaaattagcggtatcgcggtgggtaacgagattttaggtggcaccgatatcgggctttgggaagctctcttacccgcagccaagaacgtttactccgctcttcgccgtctcggtcttcacaatgtcgtcgaggtgtcgagtccacattcagaggcagtgtttgcgaactcgtatccaccgtcttcgtgtacgttcagggacgatgtggcgccgtttatgaagccgttgttagcgtttttttggcaaattcagtcgccgttctacattaacgcctacccttttcttgcatataaatccgacccgattacaattgacatcaattacgcccttttcgagcacaacaaaggcatcttggaccctaaaaccaagcttcattacgataacatgttcgacgccatggtcgatgcttcttatgctgctctcgaaaaagctggctacacaaaagtcccggtgattgtttcggagacgggatgggcatcaaaaggcgatgcagacgagcctggagcgtcggtaaagaacgcgagaacatataatcggaatcttaggaagcggctgcagaagaggaaaggaacaccgtacagaccagacatggtggtgagagcttacgtgtttgctcttttcaacgagaactcgaaaccaggtcccacttccgagagaaactttggcctttttaaacccgatggtactattgcctacgatattggcttaaccggactcaagtcctcttctgccacacggtatcgttttaagtcgtctcttgtttccgcttctgctttcacgtgtcttcttcttctttttcaccggttgttccacttgtga

SEQ ID NO: 91471 - protein, 399 aa, Arabidopsis thaliana
  peptide (1)..(399): Ceres Seq. ID no. 12727910
MGYCVPLRKSPTSHMVFSSFFLSFLLVFSILSSQTAVAFIGTYGVNYGRIADNLPSPDAVATLLKSAKIRNTRIYDADHSVLTAFRGTGIEIIVGLGNEFLKDISVGEDRAMNWIKENVEPFIRGGTKISGIAVGNEILGGTDIGLWEALLPAAKNVYSALRRLGLHNVVEVSSPHSEAVFANSYPPSSCTFRDDVAPFMKPLLAFFWQIQSPFYINAYPFLAYKSDPITIDINYALFEHNKGILDPKTKLHYDNMFDAMVDASYAALEKAGYTKVPVIVSETGWASKGDADEPGASVKNARTYNRNLRKRLQKRKGTPYRPDMVVRAYVFALFNENSKPGPTSERNFGLFKPDGTIAYDIGLTGLKSSSATRYRFKSSLVSASAFTCLLLLFHRLFHL

SEQ ID NO: 91472 - protein, 385 aa, Arabidopsis thaliana
  peptide (1)..(385): Ceres Seq. ID no. 12727911
MVFSSFFLSFLLVFSILSSQTAVAFIGTYGVNYGRIADNLPSPDAVATLLKSAKIRNTRIYDADHSVLTAFRGTGIEIIVGLGNEFLKDISVGEDRAMNWIKENVEPFIRGGTKISGIAVGNEILGGTDIGLWEALLPAAKNVYSALRRLGLHNVVEVSSPHSEAVFANSYPPSSCTFRDDVAPFMKPLLAFFWQIQSPFYINAYPFLAYKSDPITIDINYALFEHNKGILDPKTKLHYDNMFDAMVDASYAALEKAGYTKVPVIVSETGWASKGDADEPGASVKNARTYNRNLRKRLQKRKGTPYRPDMVVRAYVFALFNENSKPGPTSERNFGLFKPDGTIAYDIGLTGLKSSSATRYRFKSSLVSASAFTCLLLLFHRLFHL

SEQ ID NO: 91473 - protein, 288 aa, Arabidopsis thaliana
  peptide (1)..(288): Ceres Seq. ID no. 12727912
MNWIKENVEPFIRGGTKISGIAVGNEILGGTDIGLWEALLPAAKNVYSALRRLGLHNVVEVSSPHSEAVFANSYPPSSCTFRDDVAPFMKPLLAFFWQIQSPFYINAYPFLAYKSDPITIDINYALFEHNKGILDPKTKLHYDNMFDAMVDASYAALEKAGYTKVPVIVSETGWASKGDADEPGASVKNARTYNRNLRKRLQKRKGTPYRPDMVVRAYVFALFNENSKPGPTSERNFGLFKPDGTIAYDIGLTGLKSSSATRYRFKSSLVSASAFTCLLLLFHRLFHL

SEQ ID NO: 91474 - DNA, 2256 bp, Arabidopsis thaliana
  misc_feature (1)..(2256): Ceres Seq. ID no. 12727913
  misc_feature (1)..(2256): Ortholog of  Ceres SEQ ID NO 13586013 as cited in SEQ ID NO 1182
acaacacaatctcacaacaattacacactaaacaaaattcaattttgcatctccatttctcgagaaactttcgttttcgtagacttataaaaccatgggtcatggcactaacagagtagaagacatggcgtcaccaaacaatggaaccgcaggagaaacggtcgtggagatacacagcgtttgtctaccgccgaagaaaacagcgtttcagaaactgaaaaaacgcgttggggacgtgttcttccctgatgatccgttacagaggtttaggaaccaaacatggagaaacagagtgattctaggtcttcaaagcttgttcccgatattcacatggggttctcagtacgatctcaagcttcttaggtccgatgttatctctggtctcaccattgccagtctcgccattcctcagggaatcagctatgcaaagctagcaaacttaccacctatagttggtctttattcaagctttgtgccaccactgatatatgcagttcttgggagttcaagacatcttgcagttggtcctgtctcaatagcatcacttgtgatgggctcaatgctaagtgaaagtgtttcaccaacacaagattcaattctatatctcaaattggctttcacttcaactttctttgctggtgtcttccaagcctcccttggccttcttaggctaggatttatgattgactttttgtcaaaggcaactttgattggtttcactgctggtgctgcagttatcgtgtcacttcaacaacttaagggtcttcttggaattgttcatttcactggcaaaatgcaaattgttcctgtcatgtcttctgttttcaaccatagatctgaatggtcttgggaaactattgtcatggggattggcttcttgagcattctcttaaccacaagacacattagcatgaggaagccaaaactgttctggatatctgctgcatcacctttggcatcggttattatatcaactctgcttgtatacctcattagatccaagactcatgccatctctttcattggacatctaccaaagggtttgaatccaccttcattaaacatgttgtacttcagtggtgctcatcttgctcttgccatcaaaaccggtatcatcaccgggattctttctcttacagaagggattgctgtagggagaacctttgcatctctaaagaactatcaagttaatggaaacaaagaaatgatggctataggttttatgaacatggctggttcttgcacctcttgctatgttacaacagggtctttctctcgatctgcggtaaactataatgctggagcgaaaacagcggtttctaacattgtgatggcctctgcagttctagtgacccttctgtttttgatgccactcttctattacactcctaatgtgatcctagctgctatcatcttaaccgcggtgataggcctcattgattatcaagcggcttacaagctttggaaagttgacaaattcgatttcttcacttgcttgtgttccttctttggcgttctctttgtttctgtacctcttggcctagcaatagcagtggcagtttcagttatcaagatcttgttgcacgtaaccaggccaaacacttcagaatttgggaatatcccagggactcagatttatcagagtcttggaagatacagagaagcttcaagaatcccaggcttcctaatccttgctattgaatctcctatatatttcgccaatagcacttatcttcaagacaggattttgagatgggccagggaagaggaaaatcggataaaggagaacaatggtactaccttgaaatgcataattcttgacatgacagctgtgtctgcgatagacacaagcgggcttgaagcggtgtttgaacttaggaggagactcgagaagcaatctcttcagcttgtgctggtgaatcctgtggggactgtgatggaaaagctacacaagtccaagatcattgaggcattgggtctgagtggactttatctaacagttggtgaagctgtggctgatctctcatcaacatggaaagctaatggccagccttgaaacaaagcagtctctaatctaatagagagactgtttctgaagatggagcagcctcttgtgaaacatttttggtgctagctgaaaactccttgagggagtttctgttttaattgtagaataaatgtaatttcatcttttaacaattcggtatgtatacataatttggatataaatagcctatgcaaagcatttatcttctc

SEQ ID NO: 91475 - protein, 653 aa, Arabidopsis thaliana
  peptide (1)..(653): Ceres Seq. ID no. 12727914
MGHGTNRVEDMASPNNGTAGETVVEIHSVCLPPKKTAFQKLKKRVGDVFFPDDPLQRFRNQTWRNRVILGLQSLFPIFTWGSQYDLKLLRSDVISGLTIASLAIPQGISYAKLANLPPIVGLYSSFVPPLIYAVLGSSRHLAVGPVSIASLVMGSMLSESVSPTQDSILYLKLAFTSTFFAGVFQASLGLLRLGFMIDFLSKATLIGFTAGAAVIVSLQQLKGLLGIVHFTGKMQIVPVMSSVFNHRSEWSWETIVMGIGFLSILLTTRHISMRKPKLFWISAASPLASVIISTLLVYLIRSKTHAISFIGHLPKGLNPPSLNMLYFSGAHLALAIKTGIITGILSLTEGIAVGRTFASLKNYQVNGNKEMMAIGFMNMAGSCTSCYVTTGSFSRSAVNYNAGAKTAVSNIVMASAVLVTLLFLMPLFYYTPNVILAAIILTAVIGLIDYQAAYKLWKVDKFDFFTCLCSFFGVLFVSVPLGLAIAVAVSVIKILLHVTRPNTSEFGNIPGTQIYQSLGRYREASRIPGFLILAIESPIYFANSTYLQDRILRWAREEENRIKENNGTTLKCIILDMTAVSAIDTSGLEAVFELRRRLEKQSLQLVLVNPVGTVMEKLHKSKIIEALGLSGLYLTVGEAVADLSSTWKANGQP

SEQ ID NO: 91476 - protein, 643 aa, Arabidopsis thaliana
  peptide (1)..(643): Ceres Seq. ID no. 12727915
MASPNNGTAGETVVEIHSVCLPPKKTAFQKLKKRVGDVFFPDDPLQRFRNQTWRNRVILGLQSLFPIFTWGSQYDLKLLRSDVISGLTIASLAIPQGISYAKLANLPPIVGLYSSFVPPLIYAVLGSSRHLAVGPVSIASLVMGSMLSESVSPTQDSILYLKLAFTSTFFAGVFQASLGLLRLGFMIDFLSKATLIGFTAGAAVIVSLQQLKGLLGIVHFTGKMQIVPVMSSVFNHRSEWSWETIVMGIGFLSILLTTRHISMRKPKLFWISAASPLASVIISTLLVYLIRSKTHAISFIGHLPKGLNPPSLNMLYFSGAHLALAIKTGIITGILSLTEGIAVGRTFASLKNYQVNGNKEMMAIGFMNMAGSCTSCYVTTGSFSRSAVNYNAGAKTAVSNIVMASAVLVTLLFLMPLFYYTPNVILAAIILTAVIGLIDYQAAYKLWKVDKFDFFTCLCSFFGVLFVSVPLGLAIAVAVSVIKILLHVTRPNTSEFGNIPGTQIYQSLGRYREASRIPGFLILAIESPIYFANSTYLQDRILRWAREEENRIKENNGTTLKCIILDMTAVSAIDTSGLEAVFELRRRLEKQSLQLVLVNPVGTVMEKLHKSKIIEALGLSGLYLTVGEAVADLSSTWKANGQP

SEQ ID NO: 91477 - protein, 501 aa, Arabidopsis thaliana
  peptide (1)..(501): Ceres Seq. ID no. 12727916
MGSMLSESVSPTQDSILYLKLAFTSTFFAGVFQASLGLLRLGFMIDFLSKATLIGFTAGAAVIVSLQQLKGLLGIVHFTGKMQIVPVMSSVFNHRSEWSWETIVMGIGFLSILLTTRHISMRKPKLFWISAASPLASVIISTLLVYLIRSKTHAISFIGHLPKGLNPPSLNMLYFSGAHLALAIKTGIITGILSLTEGIAVGRTFASLKNYQVNGNKEMMAIGFMNMAGSCTSCYVTTGSFSRSAVNYNAGAKTAVSNIVMASAVLVTLLFLMPLFYYTPNVILAAIILTAVIGLIDYQAAYKLWKVDKFDFFTCLCSFFGVLFVSVPLGLAIAVAVSVIKILLHVTRPNTSEFGNIPGTQIYQSLGRYREASRIPGFLILAIESPIYFANSTYLQDRILRWAREEENRIKENNGTTLKCIILDMTAVSAIDTSGLEAVFELRRRLEKQSLQLVLVNPVGTVMEKLHKSKIIEALGLSGLYLTVGEAVADLSSTWKANGQP

SEQ ID NO: 91478 - DNA, 1334 bp, Arabidopsis thaliana
  misc_feature (1)..(1334): Ceres Seq. ID no. 12727921
  misc_feature (1)..(1334): Ortholog of  Ceres SEQ ID NO 13656147 as cited in SEQ ID NO 64422
  misc_feature (1)..(1334): Ortholog of  Ceres SEQ ID NO 13596496 as cited in SEQ ID NO 68639
acgacgccgttttgcgattccaccctaaccatttctcagtgacgaacagtctcagaagtttctagaccaaaccacactcttcttcgtcttctccgttctctctatatttctcctcaccttcaacgcagctttctcgttctcgtctcagatcgtgttactaacaaacaccgtttctccggcgaaaagctctctgttactaaaaactcacagaacctaaaaatggcggatcaagctatgacggatcaagatcaaggagctgttactctctacagcggcacagccattaccgacgcgaagaaaaaccatccgttctctgttaaggtcggattagctcaggtacttcgtggcggcgccattgttgaagtttcctcggttaaccaagctaagctcgctgaatccgccggcgcatgttctgtaatcgtctcagatccggttcgatctcgcggcggtgttcgtcgtatgccggatccggttctcatcaaagaggtaaaacgagctgtgtctgtacctgtgatggcacgagctcgcgttggtcattttgttgaggctcagatcttggaatctcttgcggttgattacattgacgagagcgagattatctctgttgcggatgatgatcatttcatcaacaaacataatttccgatctccgttcatttgtggttgccgtgatacaggagaagctttgaggagaatcagagaaggtgctgctatgattaggatccaaggagatttaaccgcaacaggtaacattgcagagactgtgaagaacgttaggtcattgatgggtgaagttagagtcttgaacaacatggatgatgatgaggtgttcacgtttgctaagaagatttcagcaccgtatgatcttgtggctcagactaagcagatgggtagggttccggttgttcagtttgcatcaggtgggatcacgactcctgctgatgcagctttgatgatgcagctaggttgtgatggggtttttgtgggttctgaggtttttgatggtcctgatccgtttaagaaacttaggagcattgttcaagctgttcaacattacaatgatcctcatgtgttggctgagatgagttctggattggagaatgcaatggagagcttaaatgttcgtggtgacaggattcaagactttggccaaggcagtgtttgatgaaaaggttcgaagctgcaaactttttgggacttctaaagtcgtaatcttttttggttttgagtctcaaaatatcggttgttttttgttaatgctggtgcatatgatccgtttggtttaatcgaaacttgcaacaactaaaacctcaatgaaaagttgcagaatttttg

SEQ ID NO: 91479 - protein, 314 aa, Arabidopsis thaliana
  peptide (1)..(314): Ceres Seq. ID no. 12727922
MADQAMTDQDQGAVTLYSGTAITDAKKNHPFSVKVGLAQVLRGGAIVEVSSVNQAKLAESAGACSVIVSDPVRSRGGVRRMPDPVLIKEVKRAVSVPVMARARVGHFVEAQILESLAVDYIDESEIISVADDDHFINKHNFRSPFICGCRDTGEALRRIREGAAMIRIQGDLTATGNIAETVKNVRSLMGEVRVLNNMDDDEVFTFAKKISAPYDLVAQTKQMGRVPVVQFASGGITTPADAALMMQLGCDGVFVGSEVFDGPDPFKKLRSIVQAVQHYNDPHVLAEMSSGLENAMESLNVRGDRIQDFGQGSV

SEQ ID NO: 91480 - protein, 309 aa, Arabidopsis thaliana
  peptide (1)..(309): Ceres Seq. ID no. 12727923
MTDQDQGAVTLYSGTAITDAKKNHPFSVKVGLAQVLRGGAIVEVSSVNQAKLAESAGACSVIVSDPVRSRGGVRRMPDPVLIKEVKRAVSVPVMARARVGHFVEAQILESLAVDYIDESEIISVADDDHFINKHNFRSPFICGCRDTGEALRRIREGAAMIRIQGDLTATGNIAETVKNVRSLMGEVRVLNNMDDDEVFTFAKKISAPYDLVAQTKQMGRVPVVQFASGGITTPADAALMMQLGCDGVFVGSEVFDGPDPFKKLRSIVQAVQHYNDPHVLAEMSSGLENAMESLNVRGDRIQDFGQGSV

SEQ ID NO: 91481 - protein, 234 aa, Arabidopsis thaliana
  peptide (1)..(234): Ceres Seq. ID no. 12727924
MPDPVLIKEVKRAVSVPVMARARVGHFVEAQILESLAVDYIDESEIISVADDDHFINKHNFRSPFICGCRDTGEALRRIREGAAMIRIQGDLTATGNIAETVKNVRSLMGEVRVLNNMDDDEVFTFAKKISAPYDLVAQTKQMGRVPVVQFASGGITTPADAALMMQLGCDGVFVGSEVFDGPDPFKKLRSIVQAVQHYNDPHVLAEMSSGLENAMESLNVRGDRIQDFGQGSV

SEQ ID NO: 91482 - DNA, 1412 bp, Arabidopsis thaliana
  misc_feature (1)..(1412): Ceres Seq. ID no. 12727960
  misc_feature (1)..(1412): Ortholog of  Ceres SEQ ID NO 14303434 as cited in SEQ ID NO 53963
atcatacttaagttctcaatagagagaatcaaaaatcaaaatgacttctcctactgcgactaagtatgatgtctttctgagtttcagaggagtcgacactcgtcgcaacttcatcagttttctctacaaagaattcgttcgaaggaaaattcgaactttcaaagacgacaaggagcttgagaatggccggaggatttctccggagctcaaacgcgccatcgaggagtcgaaattcgccgtcgttgttgtctctgtaaactacgctgcgtctccttggtgtctcgatgagcttgtgaagattatggatttcgaaaacaagggttccatcaccgtgatgcctatcttctacggtgtggatccgtgtcatttgaggaggcagatcggagatgtcgctgaacagtttaagaagcacgaggctagagaagaagatcatgagaaagttgcttcgtggagacgagcattgaccagtttggctagtatctccggagattgttcatccaaatgtgaagatgaagcgaagctggtggacgaaattgctgacaagatatcaaaaaatctgatgactgttacaacaataagcaatgggaagaacctagttgggattgatacacacatgaaggctcttaacaaaaaactggatttgaattccaacaaaagtttgagagtggttgggatttgggcaagaggatacaatggtagatcagctttagctaaatatgtttatcaagacatctgtcaccactttgacagccattgtttcttgggaagcgtgaaaaggatttctcagggtcgtcacttatcgcatctacacgaagagtttctgataaggattcaaggaagtaaacataatctcaaggaccaaaaggttttgcttgtggctgatgatgtttataagcttgaacagttagatgctcttgctgaggatttcaacgggtttggtccgggaagtgttgttatcatcactacacaagacaagcatctgtttgtttctgctggtataaagcttgtctacgaagttgagcttttgaaattccagaaagtttgtgaactcttccgacaattcgcctttaaaaagagagacatttctgctgcggtcaagttggtttactatagggcaacaaattggttaggttgtctaagtggtagatctggttaggggggaagtgttaagaatcaattttgaagctaaatctcttttcataggcaaatagacattaagttaagggaatgtggctttgattaagtttgaagcctctccaaataaccttccggttctcgtttgggataccatcctatccttttattactttgttttcctttccactcgtgtaaaagcgagttccttggcaaagagttccgtttgcttaattgtgattttgtatctttggtttaattaatcttaaaggaaattg

SEQ ID NO: 91483 - protein, 371 aa, Arabidopsis thaliana
  peptide (1)..(371): Ceres Seq. ID no. 12727961
MTSPTATKYDVFLSFRGVDTRRNFISFLYKEFVRRKIRTFKDDKELENGRRISPELKRAIEESKFAVVVVSVNYAASPWCLDELVKIMDFENKGSITVMPIFYGVDPCHLRRQIGDVAEQFKKHEAREEDHEKVASWRRALTSLASISGDCSSKCEDEAKLVDEIADKISKNLMTVTTISNGKNLVGIDTHMKALNKKLDLNSNKSLRVVGIWARGYNGRSALAKYVYQDICHHFDSHCFLGSVKRISQGRHLSHLHEEFLIRIQGSKHNLKDQKVLLVADDVYKLEQLDALAEDFNGFGPGSVVIITTQDKHLFVSAGIKLVYEVELLKFQKVCELFRQFAFKKRDISAAVKLVYYRATNWLGCLSGRSG

SEQ ID NO: 91484 - protein, 284 aa, Arabidopsis thaliana
  peptide (1)..(284): Ceres Seq. ID no. 12727962
MDFENKGSITVMPIFYGVDPCHLRRQIGDVAEQFKKHEAREEDHEKVASWRRALTSLASISGDCSSKCEDEAKLVDEIADKISKNLMTVTTISNGKNLVGIDTHMKALNKKLDLNSNKSLRVVGIWARGYNGRSALAKYVYQDICHHFDSHCFLGSVKRISQGRHLSHLHEEFLIRIQGSKHNLKDQKVLLVADDVYKLEQLDALAEDFNGFGPGSVVIITTQDKHLFVSAGIKLVYEVELLKFQKVCELFRQFAFKKRDISAAVKLVYYRATNWLGCLSGRSG

SEQ ID NO: 91485 - protein, 273 aa, Arabidopsis thaliana
  peptide (1)..(273): Ceres Seq. ID no. 12727963
MPIFYGVDPCHLRRQIGDVAEQFKKHEAREEDHEKVASWRRALTSLASISGDCSSKCEDEAKLVDEIADKISKNLMTVTTISNGKNLVGIDTHMKALNKKLDLNSNKSLRVVGIWARGYNGRSALAKYVYQDICHHFDSHCFLGSVKRISQGRHLSHLHEEFLIRIQGSKHNLKDQKVLLVADDVYKLEQLDALAEDFNGFGPGSVVIITTQDKHLFVSAGIKLVYEVELLKFQKVCELFRQFAFKKRDISAAVKLVYYRATNWLGCLSGRSG

SEQ ID NO: 91486 - DNA, 2101 bp, Arabidopsis thaliana
  misc_feature (1)..(2101): Ceres Seq. ID no. 12727964
  misc_feature (1)..(2101): Ortholog of  Ceres SEQ ID NO 14312408 as cited in SEQ ID NO 55042
aaaagccacataagaagttgatgcagaagcaataataacaaaacaaaaaaacattaaaaaaaaaagctcttcagttttggtttctgcagtctccaatggctctcaagctctttctctttgctcttcttctctgtctcccgacttctctctcctccactgcctctaaaggtaaagagaagaagtcgaagtttaatccatacagatacacattcatcgataaagcaagcacattctcatcatcttcctcatcttcattttcatccaacggtcaagattcgtcctacgactacatagtcatcggaggtggaaccgcagggtgtcctctcgccgcaacgttgtcgcagaatttcagcgttcttgttttagagagaggtggcgttccgtttacaaacgcaaacgtttctttcctcaggaattttcacatcggacttgctgacatttcagcttcttccgcgtctcaagcgtttgtttccactgacggcgtttacaacgcccgtgctagagttctcggtggcggttcctgtattaacgccggtttttactccagagccgatgctgcgttcgtgaagcgagcaggatgggatccgaagctggtgaaggagtcgtatccatgggtggagagagagattgttcatcagccaaagttaacgttatggcagaaagctctcagagacagtcttttagaggttggagtcagacctttcaatggtttcacttacgatcacgtttccggaaccaaaatcggcggtacaattttcgacagattcggccgtcgtcacaccgcggcggagcttctcgcttacgctaatcctcagaagcttagagtcttgatctacgccaccgtgcaaaaaatcgtctttgacacttctggaacaaggcctcgagtaacaggagtaatattcaaagatgagaaaggtaatcaacaccaggctttactctcgaatagaaagggaagtgaagtgatcttatctagtggagctattgggtcaccacagatgctgatgttaagtgggattggacctaagaaggagcttcagaggctgaagattcctgtggttttagagaatgagcatgtaggaaaaggaatggctgataatcccatgaacacgatcttggtgccttcaaaggcgcctatagagcagtcacttattcagactgttggaattacaaagatgggtgtgtatgttgaagccagtactggctttgggcaatctcctgagagtattcatactcactatgggattatgtcgaacaagaatgaattgttttccaccattcctgcaaagcagagaagaccagaagcaacgcaagcttacatcacaagaaacaaataccaacttcacgaagcattcaatggaagtttcatcttggagaaacttgcttacccgatctctagagggcatttgagcttggtcaacacaaatgttgatgacaacccttcagtcaccttcaattactttaaacacccggtggatctccaacgctgtgttgaagccattcgtcttgtttccaaagtggtgacgtctaaccgtttcttaaactacacgcagtgtgacaagcaaaacgtacacaagatgcttagcttaagcgtcaaggcaaacatcaatctaaggccaaagcaactgaacgataccaaatcaatggctcagttctgcaaagacactgttgtcacaatctggcactaccatggtggatgtcttgtgggtaaagttgtgagccctaaccgcaaagttcttggtgtcgacaggctcagagttattgatggttcaacgtttgacgagtctccaggaaccaacccgcaagctactatgatgatgatgggaagatacatgggagtcaagattcttcgggagagacttggaaacaaagctggtgtttagtttgcagattgagcttttatggtagacaaattcgtagcagataattctgttgtggaattgtgttggagaatatctctctctgtctccttctctgttatttgatattcgattcattaaagtataggatcatattgtctaatgaactgtgtaaccctctattgggcaatcggctctgttgcttattagcttgtgtgaaaagttaatcacgttttctgtttcaa

SEQ ID NO: 91487 - protein, 594 aa, Arabidopsis thaliana; identical to SEQ ID NO: 76779
  peptide (1)..(594): Ceres Seq. ID no. 12727965

SEQ ID NO: 91488 - DNA, 630 bp, Arabidopsis thaliana
  misc_feature (1)..(630): Ceres Seq. ID no. 12727970
  misc_feature (1)..(630): Ortholog of  Ceres SEQ ID NO 13599448 as cited in SEQ ID NO 521
  misc_feature (1)..(630): Ortholog of  Ceres SEQ ID NO 13596408 as cited in SEQ ID NO 62028
atgaatcttgctccaatccatgatccatcatcatcatcaacaacaacaacatcatcgtcaacaccatacggattaacaaaggacgagttctcaacactagactccatcatccgaacacaccacacgttcccaagatcgccaaacacgtgcacatcactcatagcacaccgtgtagacgcaccggcacatgccatatggagattcgtccgcgacttcgccaatccaaacaaatacaaacacttcatcaagagttgcaccatcagagttaacggtaacggcatcaaagagattaaagttgggactataagggaagttagcgtggtctctggtcttccagcgtcaacaagcgttgagatactcgaagttcttgacgaagagaaacgaatcttgagttttcgtgttcttggaggagaacaccggttaaataattaccggtcggttacatcggtcaacgagttcgtcgtcttggaaaaggataagaagaagagagtgtatagtgtggtattggagtcttacattgttgatataccacaaggtaacacggaagaagatacaaggatgtttgtggatacggtcgttaagtcgaatctacagaatctcgccgtcatttccacggcttctccgacctga

SEQ ID NO: 91489 - protein, 209 aa, Arabidopsis thaliana
  peptide (1)..(209): Ceres Seq. ID no. 12727971
MNLAPIHDPSSSSTTTTSSSTPYGLTKDEFSTLDSIIRTHHTFPRSPNTCTSLIAHRVDAPAHAIWRFVRDFANPNKYKHFIKSCTIRVNGNGIKEIKVGTIREVSVVSGLPASTSVEILEVLDEEKRILSFRVLGGEHRLNNYRSVTSVNEFVVLEKDKKKRVYSVVLESYIVDIPQGNTEEDTRMFVDTVVKSNLQNLAVISTASPT

SEQ ID NO: 91490 - DNA, 1461 bp, Arabidopsis thaliana
  misc_feature (1)..(1461): Ceres Seq. ID no. 12727996
  misc_feature (1)..(1461): Ortholog of  Ceres SEQ ID NO 13596984 as cited in SEQ ID NO 63196
atggccttcaagaaccattcttcaagaacaactctttcttcttcttcttccacttcattttcattcagattcacaacaatcattaccttagcattcatcttttgttcttcttactacattttcttctcacagtttgattactctccggtgacttcttcaccggaaaatcctcctttcgcaggagatcttcgagacctgacattcccttggaacaaactctcacttggaccaatctcggagaagctcaaactcgctgtcttctgcaagtcatggcctgttggttcgatccccggaggaatggagcgtcatgcttacacactctacacttctctcgcctcaagaggtcacgagattcacgtcttcacggtttcttccgacagaagtaaccgagaagagtactacaacaaaggagatctccatgtctactttgctccaaacgaacacggctcacttaaccactctcgagcttttgagatcttccataaaatcaacagtctagatcatcattcctttgattatgttcacactgagagtgtttctctgcctcattggcgagtcaaaatggtgcctaatggtgacatagctgtgacatggcacggaatctggtacgagattatgcattcaaatctttttcaagaactttccaatgatcgtcctagctctgatcttcaacaaacgatgcctagactcgtcgatgaaatcagattcttcccaaaatataaacagcatatttgcattagcaacagcgcgcgcgaggtactagttaacatctatcaacttcctaagagaaaagttcacgttatagtcaacggtgttgaccaaaccaagttcgtgtattctcctgaatctggagctaggttcagggcgaaacacggtattcctgacaatgggacatatattgtgatgggtgtgtctggacgtttggtgagagacaaaggacatccacttctatatgaagcgtttgctttgctcgttaaaatgcacccgaaagtctatttgcttgtggctggatctggtccttggggcaaaagatacgcggaattaggcgaaaacgttagggttttaggagctttagagccagaggagctctctggtttctacaacgctttagatgtgtttgtgaatccgacgttgagaccacaggggcttgatttgacgatcattgaggcgatgcagtgtgggaaacctgtcgtggcacctaattatccaagcattgttgggacagtggttgtggacgagcgttttgggtacacattttctccaaacgtgagatctcttgttgagactttggattctgttgtaagagatgggcctagggttttggagatgaaaggaatagcttgtaagggatacgctctttcgatgtttacagcgactcaaatggcttcggcttatgagagattctttatgtgtatgaaaaatgagaggtactgtaggtaccctctttccacagataactga

SEQ ID NO: 91491 - protein, 486 aa, Arabidopsis thaliana
  peptide (1)..(486): Ceres Seq. ID no. 12727997
MAFKNHSSRTTLSSSSSTSFSFRFTTIITLAFIFCSSYYIFFSQFDYSPVTSSPENPPFAGDLRDLTFPWNKLSLGPISEKLKLAVFCKSWPVGSIPGGMERHAYTLYTSLASRGHEIHVFTVSSDRSNREEYYNKGDLHVYFAPNEHGSLNHSRAFEIFHKINSLDHHSFDYVHTESVSLPHWRVKMVPNGDIAVTWHGIWYEIMHSNLFQELSNDRPSSDLQQTMPRLVDEIRFFPKYKQHICISNSAREVLVNIYQLPKRKVHVIVNGVDQTKFVYSPESGARFRAKHGIPDNGTYIVMGVSGRLVRDKGHPLLYEAFALLVKMHPKVYLLVAGSGPWGKRYAELGENVRVLGALEPEELSGFYNALDVFVNPTLRPQGLDLTIIEAMQCGKPVVAPNYPSIVGTVVVDERFGYTFSPNVRSLVETLDSVVRDGPRVLEMKGIACKGYALSMFTATQMASAYERFFMCMKNERYCRYPLSTDN

SEQ ID NO: 91492 - protein, 387 aa, Arabidopsis thaliana
  peptide (1)..(387): Ceres Seq. ID no. 12727998
MERHAYTLYTSLASRGHEIHVFTVSSDRSNREEYYNKGDLHVYFAPNEHGSLNHSRAFEIFHKINSLDHHSFDYVHTESVSLPHWRVKMVPNGDIAVTWHGIWYEIMHSNLFQELSNDRPSSDLQQTMPRLVDEIRFFPKYKQHICISNSAREVLVNIYQLPKRKVHVIVNGVDQTKFVYSPESGARFRAKHGIPDNGTYIVMGVSGRLVRDKGHPLLYEAFALLVKMHPKVYLLVAGSGPWGKRYAELGENVRVLGALEPEELSGFYNALDVFVNPTLRPQGLDLTIIEAMQCGKPVVAPNYPSIVGTVVVDERFGYTFSPNVRSLVETLDSVVRDGPRVLEMKGIACKGYALSMFTATQMASAYERFFMCMKNERYCRYPLSTDN

SEQ ID NO: 91493 - protein, 299 aa, Arabidopsis thaliana
  peptide (1)..(299): Ceres Seq. ID no. 12727999
MVPNGDIAVTWHGIWYEIMHSNLFQELSNDRPSSDLQQTMPRLVDEIRFFPKYKQHICISNSAREVLVNIYQLPKRKVHVIVNGVDQTKFVYSPESGARFRAKHGIPDNGTYIVMGVSGRLVRDKGHPLLYEAFALLVKMHPKVYLLVAGSGPWGKRYAELGENVRVLGALEPEELSGFYNALDVFVNPTLRPQGLDLTIIEAMQCGKPVVAPNYPSIVGTVVVDERFGYTFSPNVRSLVETLDSVVRDGPRVLEMKGIACKGYALSMFTATQMASAYERFFMCMKNERYCRYPLSTDN

SEQ ID NO: 91494 - DNA, 981 bp, Arabidopsis thaliana
  misc_feature (1)..(981): Ceres Seq. ID no. 12728004
  misc_feature (1)..(981): Ortholog of  Ceres SEQ ID NO 13655598 as cited in SEQ ID NO 64077
acactttgttgttaatttcaagtgtttgatcataatggcaacatcagctcgtagagcatacggtttcggtagagccgatgaggctacacaccctgactccattagagcaactttagctgagtttctctccacttttgtcttcgtctttgcagctgaaggctctatcctctctctcgataagttgtattgggaacatgcggctcatgcggggacaaacacaccaggagggctgattttagtagcgttggctcatgcgtttgctctgtttgctgctgtttcagcagccattaatgtctccggcggacacgttaacccggcagtcacttttggtgctcttgttggaggcagagttacagcgatccgcgccatctactactggatcgctcagcttcttggagccatcctcgcttgtctcttgttaaggctcacaacaaacggcatgagaccagttggtttccgtctagcatcaggtgttggagcggttaatggacttgtattagagatcattttaacatttggcttagtctacgtagtgtattccactttgattgatccaaaacgtggaagcctcgggatcatagcaccgcttgcaatcggactcatagttggggcaaacatcttagtaggtggaccattttctggtgcttcgatgaatccagctagagcttttggtccagcgttggtgggatggagatggcatgaccactggatctattgggtcggaccattcatcggtagtgctttagccgcccttatatatgagtacatggtcatacccaccgaaccacctacccaccacgcacatggtgtacaccagcccttggcccctgaagattactagatggaactttcctcatgtcaccactgcttttgttcgttgttcaagctctctttgtctgtatgatgagatcacttgcatagatactttttttcttatgctactcttatgttgtaataataaaaaataaagaacgatttcgc

SEQ ID NO: 91495 - protein, 279 aa, Arabidopsis thaliana
  peptide (1)..(279): Ceres Seq. ID no. 12728005
HFVVNFKCLIIMATSARRAYGFGRADEATHPDSIRATLAEFLSTFVFVFAAEGSILSLDKLYWEHAAHAGTNTPGGLILVALAHAFALFAAVSAAINVSGGHVNPAVTFGALVGGRVTAIRAIYYWIAQLLGAILACLLLRLTTNGMRPVGFRLASGVGAVNGLVLEIILTFGLVYVVYSTLIDPKRGSLGIIAPLAIGLIVGANILVGGPFSGASMNPARAFGPALVGWRWHDHWIYWVGPFIGSALAALIYEYMVIPTEPPTHHAHGVHQPLAPEDY

SEQ ID NO: 91496 - protein, 268 aa, Arabidopsis thaliana
  peptide (1)..(268): Ceres Seq. ID no. 12728006
MATSARRAYGFGRADEATHPDSIRATLAEFLSTFVFVFAAEGSILSLDKLYWEHAAHAGTNTPGGLILVALAHAFALFAAVSAAINVSGGHVNPAVTFGALVGGRVTAIRAIYYWIAQLLGAILACLLLRLTTNGMRPVGFRLASGVGAVNGLVLEIILTFGLVYVVYSTLIDPKRGSLGIIAPLAIGLIVGANILVGGPFSGASMNPARAFGPALVGWRWHDHWIYWVGPFIGSALAALIYEYMVIPTEPPTHHAHGVHQPLAPEDY

SEQ ID NO: 91497 - DNA, 2340 bp, Arabidopsis thaliana
  misc_feature (1)..(2340): Ceres Seq. ID no. 12728007
  misc_feature (1)..(2340): Ortholog of  Ceres SEQ ID NO 14310729 as cited in SEQ ID NO 53317
atggtttcgtttacgggtttcgctttcgtatttggaattctacttgggattcttgcgatcgttacggcggaagttgtagggtttttgtatcttctgaagcgattgaatcggaaaagagatcgtcaggaatcgaattcgagttctgatccaaacttcaagagttttgatcctcgccaatccattgattttagtctcaacaaacagggagtgatctggatattggaattagatgaaaatgtaaaagattggatgaaggagaaattaccaaaagagcaaaagaagaagagagtagatctcttggaggtacatccagttaggagatttgctcgcatcaaagatcataagctcatcttgtctgattcattagatggccctcagactcctattactttgaaaggttgctttgttgacgctgtttcaggctctggaccaacaaggaaatgggctaaaagatttcctatacaagtagaaagcaaaacttctgtcttgtataaaggaaacagagtgttttacattttcttagagacttcttgggagaaggagtcatggtgtaaagctcttcgtcttgctgcttgcgagaatcaggaaaggtttatttggtccaccaaattgaaagaagatttccggaactatctggcttcccttaatgctgcctatccttcttttatgaaaccatcagctgggtttagttttgagtcattggacaaggggcttaaagcagatggtccttcatcaaaggttcgtttgatctggaagaaattttcgaaaaagtgctcaactaaagtgaattttcccccgtcgattcgtgacgacaagaagacttcatcccgttcttaccaagattcacaatctactggtagctctggaaagagtacctcagcaaggaggatgcaagataacatcccggaggaaactgatgtccaagttatctcacgttcttggagccatagcagtcatgcatcagatgtagattcagaagacaagtcttttgatgaaggaacattggcattgaacgtagtattatctcggctgttttttgatgttaaacagaacacagtactgaagaatttagtgcgcgaacgaatccagcggataatgtccaacatgagaattcccagctacataggcgaattaatctgctgtgacgtagacattggaaatctcccgccttacatacacggtacgagaattcttccaatggagatgaatggtgtgtgggcgttcgaaatagatattgaatacactggtggtgcgggacttgaagttgaaactcgggttgatgctcgagaggaagatttgcagaaaggcatagctgagggaaagttgcagccaaattctgctggggatgttccaccagatctccttgaaggtcttgcagattttgaaaagcaattaaatgttcccggaggaactgttgatgcacaagatgtgaaaagtggtggaactgataaagctgatgaatcgaagggtccaaaaggtacaaaaacaggttcgagcaatggatccaagtggaagtctatgctgaagaacatcgttgaacaagtttcccaggtcccaattactttgtctataggggtgtcttcgcttcgagggacactgtgtgtacacatgaagccgcctccatctgatcaactgtggtttggcttcacaagcatgcctgatattgaattcaaccttgtctcttctgttggtgaacacaaaatcacaaacagccatgttgctatgttcttggtcaaccggttcaagacggcgatacgagacgtcatggtgctccccaattgtgaaagcgttaccattccttggatgacagctgaaaaggatgattgggtcgaacgcaatgtcgctccattcatgtggctgaatcaagactccaccagtgatcgcgaaaatttggaagctgcagaagcgaaatctaaagctgacaagccaccgacttctgaacaaatgcagaaaactgtcaacatcccgcagaagcctagaattgaggaagaatctgtgtcggctgacactgcaccatcagctaattccatagctctcctagtagagagtgacaaatccttagaagaactcaagactccactgctggaaagcagcgaaaagcatgatacaatagcgagaggaggcagtgcgggagatataattccgggtattggtcaatcaccgtctatgtcgactgtttcgggtgaagaggatgattcaaattcaaaaggaaagaaaatgggggcagcaaaggcgaggatgttcgattttaggaagaaagtgggagagaagtttgaagagaagaaacgtcacgttgaggaaaaaagtagacagattgttgaaaagatgagaggaccttga

SEQ ID NO: 91498 - protein, 779 aa, Arabidopsis thaliana
  peptide (1)..(779): Ceres Seq. ID no. 12728008
MVSFTGFAFVFGILLGILAIVTAEVVGFLYLLKRLNRKRDRQESNSSSDPNFKSFDPRQSIDFSLNKQGVIWILELDENVKDWMKEKLPKEQKKKRVDLLEVHPVRRFARIKDHKLILSDSLDGPQTPITLKGCFVDAVSGSGPTRKWAKRFPIQVESKTSVLYKGNRVFYIFLETSWEKESWCKALRLAACENQERFIWSTKLKEDFRNYLASLNAAYPSFMKPSAGFSFESLDKGLKADGPSSKVRLIWKKFSKKCSTKVNFPPSIRDDKKTSSRSYQDSQSTGSSGKSTSARRMQDNIPEETDVQVISRSWSHSSHASDVDSEDKSFDEGTLALNVVLSRLFFDVKQNTVLKNLVRERIQRIMSNMRIPSYIGELICCDVDIGNLPPYIHGTRILPMEMNGVWAFEIDIEYTGGAGLEVETRVDAREEDLQKGIAEGKLQPNSAGDVPPDLLEGLADFEKQLNVPGGTVDAQDVKSGGTDKADESKGPKGTKTGSSNGSKWKSMLKNIVEQVSQVPITLSIGVSSLRGTLCVHMKPPPSDQLWFGFTSMPDIEFNLVSSVGEHKITNSHVAMFLVNRFKTAIRDVMVLPNCESVTIPWMTAEKDDWVERNVAPFMWLNQDSTSDRENLEAAEAKSKADKPPTSEQMQKTVNIPQKPRIEEESVSADTAPSANSIALLVESDKSLEELKTPLLESSEKHDTIARGGSAGDIIPGIGQSPSMSTVSGEEDDSNSKGKKMGAAKARMFDFRKKVGEKFEEKKRHVEEKSRQIVEKMRGP

SEQ ID NO: 91499 - protein, 696 aa, Arabidopsis thaliana
  peptide (1)..(696): Ceres Seq. ID no. 12728009
MKEKLPKEQKKKRVDLLEVHPVRRFARIKDHKLILSDSLDGPQTPITLKGCFVDAVSGSGPTRKWAKRFPIQVESKTSVLYKGNRVFYIFLETSWEKESWCKALRLAACENQERFIWSTKLKEDFRNYLASLNAAYPSFMKPSAGFSFESLDKGLKADGPSSKVRLIWKKFSKKCSTKVNFPPSIRDDKKTSSRSYQDSQSTGSSGKSTSARRMQDNIPEETDVQVISRSWSHSSHASDVDSEDKSFDEGTLALNVVLSRLFFDVKQNTVLKNLVRERIQRIMSNMRIPSYIGELICCDVDIGNLPPYIHGTRILPMEMNGVWAFEIDIEYTGGAGLEVETRVDAREEDLQKGIAEGKLQPNSAGDVPPDLLEGLADFEKQLNVPGGTVDAQDVKSGGTDKADESKGPKGTKTGSSNGSKWKSMLKNIVEQVSQVPITLSIGVSSLRGTLCVHMKPPPSDQLWFGFTSMPDIEFNLVSSVGEHKITNSHVAMFLVNRFKTAIRDVMVLPNCESVTIPWMTAEKDDWVERNVAPFMWLNQDSTSDRENLEAAEAKSKADKPPTSEQMQKTVNIPQKPRIEEESVSADTAPSANSIALLVESDKSLEELKTPLLESSEKHDTIARGGSAGDIIPGIGQSPSMSTVSGEEDDSNSKGKKMGAAKARMFDFRKKVGEKFEEKKRHVEEKSRQIVEKMRGP

SEQ ID NO: 91500 - protein, 557 aa, Arabidopsis thaliana
  peptide (1)..(557): Ceres Seq. ID no. 12728010
MKPSAGFSFESLDKGLKADGPSSKVRLIWKKFSKKCSTKVNFPPSIRDDKKTSSRSYQDSQSTGSSGKSTSARRMQDNIPEETDVQVISRSWSHSSHASDVDSEDKSFDEGTLALNVVLSRLFFDVKQNTVLKNLVRERIQRIMSNMRIPSYIGELICCDVDIGNLPPYIHGTRILPMEMNGVWAFEIDIEYTGGAGLEVETRVDAREEDLQKGIAEGKLQPNSAGDVPPDLLEGLADFEKQLNVPGGTVDAQDVKSGGTDKADESKGPKGTKTGSSNGSKWKSMLKNIVEQVSQVPITLSIGVSSLRGTLCVHMKPPPSDQLWFGFTSMPDIEFNLVSSVGEHKITNSHVAMFLVNRFKTAIRDVMVLPNCESVTIPWMTAEKDDWVERNVAPFMWLNQDSTSDRENLEAAEAKSKADKPPTSEQMQKTVNIPQKPRIEEESVSADTAPSANSIALLVESDKSLEELKTPLLESSEKHDTIARGGSAGDIIPGIGQSPSMSTVSGEEDDSNSKGKKMGAAKARMFDFRKKVGEKFEEKKRHVEEKSRQIVEKMRGP

SEQ ID NO: 91501 - DNA, 1326 bp, Arabidopsis thaliana
  misc_feature (1)..(1326): Ceres Seq. ID no. 12728015
  misc_feature (1)..(1326): Ortholog of  Ceres SEQ ID NO 13663419 as cited in SEQ ID NO 66561
atggcaaacgactacatttcctttgttttcaagtcgctgcttctgttaattcaccttgtattcttaggtcagcaccatgttgattctgcctcagtcgtcaagtctcttcctggttttgaaggccctcttccctttgagctcgaaaccgggtatattggtgttggtgaggaagaggaagtgcaactgttctactacttcatcaagtctgagaggaacccaaaagaagaccctcttcttctctggctaactggaggacctggctgctctgccatctctggccttctttatgagaatggccctttgactatgaagcttgatgtttacaatggaactcttccttccttggtatctactacatattcatggacaaagaattcgagcatgatattcttggatcagcccgttggaactggcttctcctattcaagaactgaactttttaataaacccagtgatacaggagaagccaaacggatccatgagtttcttcaaaagtggctaggcaagcatcaagaattttcctccaaccctttctatgttggtggagattcttattccggtatcactgttccggctactgttcaagaaatctccaaaggaaattatcaatgctgcaaacctccaataaatcttcagggttatatgctcggtaacccaataacagactccaaaattgatggtaacagccaaattccgtatgctcatggaatggcactgatatctgatgaactctacgagtcgctaaagagaatctgcaaaggagaatatgaacatgttgatccatataacacagaatgcttgaaacttcttgaagaatttaatgagtgtacaagtaaactatacagatcacatatattatacccattgtgtgaaatgacaaatccggattgctatatttatcggtattcactaagtcactactgggttaatgacgaaaccgtacgcaaagctcttcaaatcaataaggagagtataagggaatggaaacgatgtgattggagtaagccatacactaaagacattataagcagcgtaccttaccatatgaacaatagcataaatggctatcgttctctcattttcagtggtgatcacgatttcgaagtacctttaattggaactcaagtttggataaagtctctcaactatgccatcgttgataaatggagaccatggatgatcaacaatcaagtcgctggatacacaagaacttatgcgaataaaatgacatttgctactgtcaaaggaggtgggcacacagcagagtataagccagatgaaacctttatcatgttccaaaggtggatcaatggacaagctctgtaa

SEQ ID NO: 91502 - protein, 441 aa, Arabidopsis thaliana
  peptide (1)..(441): Ceres Seq. ID no. 12728016
MANDYISFVFKSLLLLIHLVFLGQHHVDSASVVKSLPGFEGPLPFELETGYIGVGEEEEVQLFYYFIKSERNPKEDPLLLWLTGGPGCSAISGLLYENGPLTMKLDVYNGTLPSLVSTTYSWTKNSSMIFLDQPVGTGFSYSRTELFNKPSDTGEAKRIHEFLQKWLGKHQEFSSNPFYVGGDSYSGITVPATVQEISKGNYQCCKPPINLQGYMLGNPITDSKIDGNSQIPYAHGMALISDELYESLKRICKGEYEHVDPYNTECLKLLEEFNECTSKLYRSHILYPLCEMTNPDCYIYRYSLSHYWVNDETVRKALQINKESIREWKRCDWSKPYTKDIISSVPYHMNNSINGYRSLIFSGDHDFEVPLIGTQVWIKSLNYAIVDKWRPWMINNQVAGYTRTYANKMTFATVKGGGHTAEYKPDETFIMFQRWINGQAL

SEQ ID NO: 91503 - protein, 339 aa, Arabidopsis thaliana
  peptide (1)..(339): Ceres Seq. ID no. 12728017
MKLDVYNGTLPSLVSTTYSWTKNSSMIFLDQPVGTGFSYSRTELFNKPSDTGEAKRIHEFLQKWLGKHQEFSSNPFYVGGDSYSGITVPATVQEISKGNYQCCKPPINLQGYMLGNPITDSKIDGNSQIPYAHGMALISDELYESLKRICKGEYEHVDPYNTECLKLLEEFNECTSKLYRSHILYPLCEMTNPDCYIYRYSLSHYWVNDETVRKALQINKESIREWKRCDWSKPYTKDIISSVPYHMNNSINGYRSLIFSGDHDFEVPLIGTQVWIKSLNYAIVDKWRPWMINNQVAGYTRTYANKMTFATVKGGGHTAEYKPDETFIMFQRWINGQAL

SEQ ID NO: 91504 - protein, 314 aa, Arabidopsis thaliana
  peptide (1)..(314): Ceres Seq. ID no. 12728018
MIFLDQPVGTGFSYSRTELFNKPSDTGEAKRIHEFLQKWLGKHQEFSSNPFYVGGDSYSGITVPATVQEISKGNYQCCKPPINLQGYMLGNPITDSKIDGNSQIPYAHGMALISDELYESLKRICKGEYEHVDPYNTECLKLLEEFNECTSKLYRSHILYPLCEMTNPDCYIYRYSLSHYWVNDETVRKALQINKESIREWKRCDWSKPYTKDIISSVPYHMNNSINGYRSLIFSGDHDFEVPLIGTQVWIKSLNYAIVDKWRPWMINNQVAGYTRTYANKMTFATVKGGGHTAEYKPDETFIMFQRWINGQAL

SEQ ID NO: 91505 - DNA, 1326 bp, Arabidopsis thaliana
  misc_feature (1)..(1326): Ceres Seq. ID no. 12728019
  misc_feature (1)..(1326): Ortholog of  Ceres SEQ ID NO 13663419 as cited in SEQ ID NO 66561
atggctagcaactacgttttctctgttctgaggtcgctgcttctgttaattcacactgtattcttaggtcagcaccatgttagttctgccacaattatcaagtctcttcctggttttgaaggccctcttccctttgagctcgaaaccgggtatattggtgttggtgaggaagaggaagtgcaactattctactacttcataaagtctgagaggaacccaaaagaagaccctcttcttctctggctaagtggaggacctggctgctcttccatctctggccttctttttgagaatgggcctctggctatgaagcttgatgtttacaatggaactcttccttctttggtctctactacatattcatggacaaaggcctcgagcatgatattcttggatcagcccgttggagctggcttctcctactcaagaactcaacttttaaataaacctagtgattcaggagaagccaaacggattcatgagtttctgcaaaagtggctaggcaagcatcaagagttttcctccaatcctttctatgttggaggagattcttactctggtatggttgttccggctaccgttcaagaaatctcaaaaggaaattatgaatgctgcaatcctccaataaatcttcagggctatgtgctcggtaacccgttaacagactttgtatatgattacaactcccgcattccatttgctcatggaatggcactaatctctgatgaactcttcgagtcattgaagaaaacctgcaaaggagactatagaaatgttcatccacgtaatacagaatgcttgaaattcattgaagaatttaataagtgtacaaacagcatatgtcaacgacgtataatagatccattttgtgaaactgaaactccaaattgctatatttaccgttttttgctagctgcctattgggccaatgacgaaaccgtacgcaaagctcttcaaatcaagaaggagactataggggaatgggtacgatgtcattatggtattccttacaattatgacattaaaagtagcataccttaccatatgaataacagcatcaatggttatcgttcactaatctacagtggtgatcacgatttcgaagtacccttccttggaacccaagcttggataagatctctcaactattcagtcatcgatgattggaggccatggatgatcaaagatcaaattgctggatacacaaggacttatgccaataaaatgacatttgctactatcagaggaggtgggcacacaatagagtttaaaccagaggaagcctctatcatgtttcaaagatggatcaaaggccaacctctgtaa

SEQ ID NO: 91506 - protein, 441 aa, Arabidopsis thaliana
  peptide (1)..(441): Ceres Seq. ID no. 12728020
MASNYVFSVLRSLLLLIHTVFLGQHHVSSATIIKSLPGFEGPLPFELETGYIGVGEEEEVQLFYYFIKSERNPKEDPLLLWLSGGPGCSSISGLLFENGPLAMKLDVYNGTLPSLVSTTYSWTKASSMIFLDQPVGAGFSYSRTQLLNKPSDSGEAKRIHEFLQKWLGKHQEFSSNPFYVGGDSYSGMVVPATVQEISKGNYECCNPPINLQGYVLGNPLTDFVYDYNSRIPFAHGMALISDELFESLKKTCKGDYRNVHPRNTECLKFIEEFNKCTNSICQRRIIDPFCETETPNCYIYRFLLAAYWANDETVRKALQIKKETIGEWVRCHYGIPYNYDIKSSIPYHMNNSINGYRSLIYSGDHDFEVPFLGTQAWIRSLNYSVIDDWRPWMIKDQIAGYTRTYANKMTFATIRGGGHTIEFKPEEASIMFQRWIKGQPL

SEQ ID NO: 91507 - protein, 339 aa, Arabidopsis thaliana
  peptide (1)..(339): Ceres Seq. ID no. 12728021
MKLDVYNGTLPSLVSTTYSWTKASSMIFLDQPVGAGFSYSRTQLLNKPSDSGEAKRIHEFLQKWLGKHQEFSSNPFYVGGDSYSGMVVPATVQEISKGNYECCNPPINLQGYVLGNPLTDFVYDYNSRIPFAHGMALISDELFESLKKTCKGDYRNVHPRNTECLKFIEEFNKCTNSICQRRIIDPFCETETPNCYIYRFLLAAYWANDETVRKALQIKKETIGEWVRCHYGIPYNYDIKSSIPYHMNNSINGYRSLIYSGDHDFEVPFLGTQAWIRSLNYSVIDDWRPWMIKDQIAGYTRTYANKMTFATIRGGGHTIEFKPEEASIMFQRWIKGQPL

SEQ ID NO: 91508 - protein, 314 aa, Arabidopsis thaliana
  peptide (1)..(314): Ceres Seq. ID no. 12728022
MIFLDQPVGAGFSYSRTQLLNKPSDSGEAKRIHEFLQKWLGKHQEFSSNPFYVGGDSYSGMVVPATVQEISKGNYECCNPPINLQGYVLGNPLTDFVYDYNSRIPFAHGMALISDELFESLKKTCKGDYRNVHPRNTECLKFIEEFNKCTNSICQRRIIDPFCETETPNCYIYRFLLAAYWANDETVRKALQIKKETIGEWVRCHYGIPYNYDIKSSIPYHMNNSINGYRSLIYSGDHDFEVPFLGTQAWIRSLNYSVIDDWRPWMIKDQIAGYTRTYANKMTFATIRGGGHTIEFKPEEASIMFQRWIKGQPL

SEQ ID NO: 91509 - DNA, 1317 bp, Arabidopsis thaliana
  misc_feature (1)..(1317): Ceres Seq. ID no. 12728023
  misc_feature (1)..(1317): Ortholog of  Ceres SEQ ID NO 13663419 as cited in SEQ ID NO 66561
atggctaactacatttcctctgttttgaagtcgctgcttctgcttcttcatcttgtcttcttgattcagcagcatgttgattctgcctctatcgtcaagtttcttcctggttttgaagggtctcttccctttgagctcgaaaccgggtatattggtattggtgaggaagaggaagtgcaactgttctactacttcatcaagtctgagaggaatccaaaagaagaccctcttcttctctggctaagtggaggacctggctgctcttccatctctggccttctttttgagaatgggcctctggctatgaagctcgatgtttacaatggaactctcccttctttggtccctactacatattcttggacaaagacttcgagcatgatattcttggatcagcccgttggaactggcttctcctattcaagaactcaacaatataataaacctagtgattcaggagaagccaaacggattcatgagtttcttcaaaagtggctaagcaagcatcaagagttttcctccaacccattctatgtcgccggtgattcttattccggtatggttgttccagctaccgttcaagaaatctccaaaggaaattatcaatgctgcagtcctccgataaatcttcagggctatgtactcggtaacccgataacagaacatgcaatcgattataactaccgcattccatttgcacatggaatggcattgatctctgatgaactttacgagtcgttgaagagagtctgcaaaggagaatatgttgatccacgtgacacagaatgcttgaaactcgttgaagaatttagtaagtgtaccaaaggagtatgccaagaagttgtaataaaaccattgtgcgtaactgaaactccaaattgctatatttatcgatatttgctaactacgtactgggtcaatgacgtgaatgtacgcaaagctcttcaaatcaacaaggagagtataggggaatgggtacgatgttattttggtattccttacactcatgacattaaaagtagtgtaccttaccatatgaataacagcatcaatggttatcgttctctcatttacagtggtgatcatgatttgaatgtacctttccttgcaactcaagcttgggtaagatctctcaactattccatcattgataactggaggccatggatgatcaaagatcaaatcgggggatacacaaagacttatgccaataaaatgacatttgcaactgtcagagcaagtgggcacacagcagagtacaagccatatgaaacctatatcatgttccacaggtggatcaatggccaacctctttaa

SEQ ID NO: 91510 - protein, 438 aa, Arabidopsis thaliana
  peptide (1)..(438): Ceres Seq. ID no. 12728024
MANYISSVLKSLLLLLHLVFLIQQHVDSASIVKFLPGFEGSLPFELETGYIGIGEEEEVQLFYYFIKSERNPKEDPLLLWLSGGPGCSSISGLLFENGPLAMKLDVYNGTLPSLVPTTYSWTKTSSMIFLDQPVGTGFSYSRTQQYNKPSDSGEAKRIHEFLQKWLSKHQEFSSNPFYVAGDSYSGMVVPATVQEISKGNYQCCSPPINLQGYVLGNPITEHAIDYNYRIPFAHGMALISDELYESLKRVCKGEYVDPRDTECLKLVEEFSKCTKGVCQEVVIKPLCVTETPNCYIYRYLLTTYWVNDVNVRKALQINKESIGEWVRCYFGIPYTHDIKSSVPYHMNNSINGYRSLIYSGDHDLNVPFLATQAWVRSLNYSIIDNWRPWMIKDQIGGYTKTYANKMTFATVRASGHTAEYKPYETYIMFHRWINGQPL

SEQ ID NO: 91511 - protein, 337 aa, Arabidopsis thaliana
  peptide (1)..(337): Ceres Seq. ID no. 12728025
MKLDVYNGTLPSLVPTTYSWTKTSSMIFLDQPVGTGFSYSRTQQYNKPSDSGEAKRIHEFLQKWLSKHQEFSSNPFYVAGDSYSGMVVPATVQEISKGNYQCCSPPINLQGYVLGNPITEHAIDYNYRIPFAHGMALISDELYESLKRVCKGEYVDPRDTECLKLVEEFSKCTKGVCQEVVIKPLCVTETPNCYIYRYLLTTYWVNDVNVRKALQINKESIGEWVRCYFGIPYTHDIKSSVPYHMNNSINGYRSLIYSGDHDLNVPFLATQAWVRSLNYSIIDNWRPWMIKDQIGGYTKTYANKMTFATVRASGHTAEYKPYETYIMFHRWINGQPL

SEQ ID NO: 91512 - protein, 312 aa, Arabidopsis thaliana
  peptide (1)..(312): Ceres Seq. ID no. 12728026
MIFLDQPVGTGFSYSRTQQYNKPSDSGEAKRIHEFLQKWLSKHQEFSSNPFYVAGDSYSGMVVPATVQEISKGNYQCCSPPINLQGYVLGNPITEHAIDYNYRIPFAHGMALISDELYESLKRVCKGEYVDPRDTECLKLVEEFSKCTKGVCQEVVIKPLCVTETPNCYIYRYLLTTYWVNDVNVRKALQINKESIGEWVRCYFGIPYTHDIKSSVPYHMNNSINGYRSLIYSGDHDLNVPFLATQAWVRSLNYSIIDNWRPWMIKDQIGGYTKTYANKMTFATVRASGHTAEYKPYETYIMFHRWINGQPL

SEQ ID NO: 91513 - DNA, 1029 bp, Arabidopsis thaliana
  misc_feature (1)..(1029): Ceres Seq. ID no. 12728041
  misc_feature (1)..(1029): Ortholog of  Ceres SEQ ID NO 13647762 as cited in SEQ ID NO 20426
gttcttgtattggtttggatcggtatacttagttaattacgtaattaaatagatcggcgtgaagaagaaaaatgatcatgtgcagccgaggccattggagaccagctgaagacgagaagctcaaggatcttgtcgaacaatacggtcctcacaattggaacgccattgctctcaagcttcctggtcgctctggtaagagttgtagattgagatggtttaatcaattggatccaaggatcaaccgaaaccctttcacggaagaagaagaagaaagacttttagcggctcatcggatccatgggaacagatggtccatcatcgcaaggcttttccctggaagaactgataacgccgtcaagaaccattggcacgtcatcatggctcgtcgcacacgccaaacctctaagcctcgtcttcttccctcgacgacttcgtcttcttctttaatggcgagtgaacaaatcatgatgagttctggtggttataatcataattatagttccgatgatcggaagaaaatatttccagcagactttataaatttcccttacaaattctctcatatcaatcatcttcacttcctaaaggagtttttcaccggaaagatcgctttaaatcacaaagcaaatcagagtaaaaagcctatggagttctacaattttctacaagtaaacacagattcaaacaagagcgagattatagatcaagattcaggtcaaagcaaacgcagtgactcggacaccaaacatgaaagtcatgttccattcttcgactttttatccgttggaaactctgcctcctaggattagtttttttgcagtaactcctaaatttctagattaactatttagtccgtatacgtacgagattatctaggtcgttagcatgtatgcttgatgtgtataatcactaactagtgagctattacctgcgaaaattgtaagaaaaatacataatgttgatgtatcacacattctcaatgtctgtaaaatttccatcgagttgttaactatcaaagttatccgtttg

SEQ ID NO: 91514 - protein, 243 aa, Arabidopsis thaliana
  peptide (1)..(243): Ceres Seq. ID no. 12728042
MIMCSRGHWRPAEDEKLKDLVEQYGPHNWNAIALKLPGRSGKSCRLRWFNQLDPRINRNPFTEEEEERLLAAHRIHGNRWSIIARLFPGRTDNAVKNHWHVIMARRTRQTSKPRLLPSTTSSSSLMASEQIMMSSGGYNHNYSSDDRKKIFPADFINFPYKFSHINHLHFLKEFFTGKIALNHKANQSKKPMEFYNFLQVNTDSNKSEIIDQDSGQSKRSDSDTKHESHVPFFDFLSVGNSAS

SEQ ID NO: 91515 - protein, 241 aa, Arabidopsis thaliana
  peptide (1)..(241): Ceres Seq. ID no. 12728043
MCSRGHWRPAEDEKLKDLVEQYGPHNWNAIALKLPGRSGKSCRLRWFNQLDPRINRNPFTEEEEERLLAAHRIHGNRWSIIARLFPGRTDNAVKNHWHVIMARRTRQTSKPRLLPSTTSSSSLMASEQIMMSSGGYNHNYSSDDRKKIFPADFINFPYKFSHINHLHFLKEFFTGKIALNHKANQSKKPMEFYNFLQVNTDSNKSEIIDQDSGQSKRSDSDTKHESHVPFFDFLSVGNSAS

SEQ ID NO: 91516 - protein, 141 aa, Arabidopsis thaliana
  peptide (1)..(141): Ceres Seq. ID no. 12728044
MARRTRQTSKPRLLPSTTSSSSLMASEQIMMSSGGYNHNYSSDDRKKIFPADFINFPYKFSHINHLHFLKEFFTGKIALNHKANQSKKPMEFYNFLQVNTDSNKSEIIDQDSGQSKRSDSDTKHESHVPFFDFLSVGNSAS

SEQ ID NO: 91517 - DNA, 546 bp, Arabidopsis thaliana
  misc_feature (1)..(546): Ceres Seq. ID no. 12728055
  misc_feature (1)..(546): Ortholog of  Ceres SEQ ID NO 13594385 as cited in SEQ ID NO 57993
atggcaattagcttaggtagagtcgtcgttccgtcgtgtaccatttctggagatcggctcttcatacctaacttctcggccatctgcagcgtctcttgtggacgaatcaatgtcggaaccggcgtaatttctgctcgtcgacgccgtgacattggcggggttttaatatctagctgtctctctacggattcatcttcttctccaccgtcttcttcttctgggccgaagacgaaactctatgtcagtgggctttctttccgcacaactgaagataccttacgggatacatttgaacagtttgggaaccttatacacatgaacatggtgatggataaagtagctaatagaccaaaaggttttgctttcctacggtatgaaacagaggaggaggctatgaaagctattcaagggatgcacggaaagtttttggatggaagggtaatattcgtggaggaagctaaaaccagatcagatatgtccagagcaaaacccagacgagacttccccaaacctcaatccaaacctcgcacctttcgtacctggtag

SEQ ID NO: 91518 - protein, 181 aa, Arabidopsis thaliana
  peptide (1)..(181): Ceres Seq. ID no. 12728056
MAISLGRVVVPSCTISGDRLFIPNFSAICSVSCGRINVGTGVISARRRRDIGGVLISSCLSTDSSSSPPSSSSGPKTKLYVSGLSFRTTEDTLRDTFEQFGNLIHMNMVMDKVANRPKGFAFLRYETEEEAMKAIQGMHGKFLDGRVIFVEEAKTRSDMSRAKPRRDFPKPQSKPRTFRTW

SEQ ID NO: 91519 - DNA, 936 bp, Arabidopsis thaliana
  misc_feature (1)..(936): Ceres Seq. ID no. 12728057
  misc_feature (1)..(936): Ortholog of  Ceres SEQ ID NO 13594966 as cited in SEQ ID NO 56152
  misc_feature (1)..(936): Ortholog of  Ceres SEQ ID NO 14312224 as cited in SEQ ID NO 57255
  misc_feature (1)..(936): Ortholog of  Ceres SEQ ID NO 12582457 as cited in SEQ ID NO 57530
  misc_feature (1)..(936): Ortholog of  Ceres SEQ ID NO 13655804 as cited in SEQ ID NO 64881
acaaatcacaaatcacatctcttcatcttcctcggtttatccaaatcctcattcagacttcatcaaatcgtttcttgcttccgatccgaaatttgcggcgggaaaagaagataacatcaacaaaaaaatgatttctctattcatctcaaacttttcaaacttatcaaacttatctccgacctttgataacatgaacatgaacatcccatcgaagaagatcgtaccggtaccgacaccgagtgagaaagttgtctctttggtatctcgaaccggacgagatctccaacgttacaacaccgcagggtatcgtcaagtcgtcggatgtgtaccatatagatacaagaaacacggaggaggagaaattgaagtgcttttgataagtgcacagaagaaagggaaaggaatgttattaccaaaaggaggttgggagattgatgaatcaatagaagaagctgctttaagagagacaattgaagaagctggtgttacgggtcagcttgaagaatcacttgggaaatggcaatacaaaagcaaaagacatactatgattcatgatggtcatatgtttcctttgcttgttagtcagcagtttgagatatggcctgaatctgaattcagacaacgcaaatgggtttctttgtctgaagcgattgagttgtgtcagaattcgtggatgagagaagctttggaagctttcattaaccggaaatgccagacccaataaggataatgtagcatctctgggaacaaagagctcttcatttggaagcagatgcatataattgaagagcaggtcctcaagtttagtgttctgatttgattcattcatttgttaatgatgttagtagactaattgataataactgattgttctgaatgattgtcttcacaacatgtaatgtgtacatatataaaatggatcaatctcatagatgt

SEQ ID NO: 91520 - protein, 240 aa, Arabidopsis thaliana
  peptide (1)..(240): Ceres Seq. ID no. 12728058
QITNHISSSSSVYPNPHSDFIKSFLASDPKFAAGKEDNINKKMISLFISNFSNLSNLSPTFDNMNMNIPSKKIVPVPTPSEKVVSLVSRTGRDLQRYNTAGYRQVVGCVPYRYKKHGGGEIEVLLISAQKKGKGMLLPKGGWEIDESIEEAALRETIEEAGVTGQLEESLGKWQYKSKRHTMIHDGHMFPLLVSQQFEIWPESEFRQRKWVSLSEAIELCQNSWMREALEAFINRKCQTQ

SEQ ID NO: 91521 - protein, 198 aa, Arabidopsis thaliana
  peptide (1)..(198): Ceres Seq. ID no. 12728059
MISLFISNFSNLSNLSPTFDNMNMNIPSKKIVPVPTPSEKVVSLVSRTGRDLQRYNTAGYRQVVGCVPYRYKKHGGGEIEVLLISAQKKGKGMLLPKGGWEIDESIEEAALRETIEEAGVTGQLEESLGKWQYKSKRHTMIHDGHMFPLLVSQQFEIWPESEFRQRKWVSLSEAIELCQNSWMREALEAFINRKCQTQ

SEQ ID NO: 91522 - protein, 177 aa, Arabidopsis thaliana
  peptide (1)..(177): Ceres Seq. ID no. 12728060
MNMNIPSKKIVPVPTPSEKVVSLVSRTGRDLQRYNTAGYRQVVGCVPYRYKKHGGGEIEVLLISAQKKGKGMLLPKGGWEIDESIEEAALRETIEEAGVTGQLEESLGKWQYKSKRHTMIHDGHMFPLLVSQQFEIWPESEFRQRKWVSLSEAIELCQNSWMREALEAFINRKCQTQ

SEQ ID NO: 91523 - DNA, 507 bp, Arabidopsis thaliana
  misc_feature (1)..(507): Ceres Seq. ID no. 12728061
  misc_feature (1)..(507): Ortholog of  Ceres SEQ ID NO 14305944 as cited in SEQ ID NO 52294
  misc_feature (1)..(507): Ortholog of  Ceres SEQ ID NO 14307370 as cited in SEQ ID NO 54127
  misc_feature (1)..(507): Ortholog of  Ceres SEQ ID NO 13596338 as cited in SEQ ID NO 68005
  misc_feature (1)..(507): Ortholog of  Ceres SEQ ID NO 14302128 as cited in SEQ ID NO 0
atgtcgcttatggataatctgttaggtatcctccgcgttcgtgtccaacgcggtgtcaacctcgccgtacgtgatgtttccagcagcgatccttacgtcgtcctcaagctaggtcgtcagaaactcaaaaccaaagtggtgaagcaaaacgtaaacccacaatggcaagaagatttgtcattcacagtaaccgaccctaatctcccgcttactctgattgtgtacgatcacgacttcttcagcaaagacgacaaaatgggagacgcagagatcgatttgaaaccgtacatcgaagccttacgaatggaactctccggtttaccagacggaaccatcatatcgaccatcggtccaagccgtggcaactgcttagccgaggaaagctacatccgttggatcaacgatcgaatcgttcagcacatttgtctccgactccgtaacgtcgagcgtggtgaagttgagattgaactccaatggattgatcttcccggttctaaaggcttgtaa

SEQ ID NO: 91524 - protein, 168 aa, Arabidopsis thaliana
  peptide (1)..(168): Ceres Seq. ID no. 12728062
MSLMDNLLGILRVRVQRGVNLAVRDVSSSDPYVVLKLGRQKLKTKVVKQNVNPQWQEDLSFTVTDPNLPLTLIVYDHDFFSKDDKMGDAEIDLKPYIEALRMELSGLPDGTIISTIGPSRGNCLAEESYIRWINDRIVQHICLRLRNVERGEVEIELQWIDLPGSKGL

SEQ ID NO: 91525 - protein, 165 aa, Arabidopsis thaliana
  peptide (1)..(165): Ceres Seq. ID no. 12728063
MDNLLGILRVRVQRGVNLAVRDVSSSDPYVVLKLGRQKLKTKVVKQNVNPQWQEDLSFTVTDPNLPLTLIVYDHDFFSKDDKMGDAEIDLKPYIEALRMELSGLPDGTIISTIGPSRGNCLAEESYIRWINDRIVQHICLRLRNVERGEVEIELQWIDLPGSKGL

SEQ ID NO: 91526 - DNA, 1668 bp, Arabidopsis thaliana
  misc_feature (1)..(1668): Ceres Seq. ID no. 12728064
  misc_feature (1)..(1668): Ortholog of  Ceres SEQ ID NO 15179554 as cited in SEQ ID NO 1174
  misc_feature (1)..(1668): Ortholog of  Ceres SEQ ID NO 15177814 as cited in SEQ ID NO 55489
atggtcggcgaagaagatagcgagagagctcagtccagtaagatggagatcgagcgagaatcgaatttgggatctgcgagtgtgctgatgcagtcgaaggtcatctccgtctcgaatttcttctctattcatagatttcattaccctcgtgaaaaaatcgtctcttttttgtttcctagtgtgttctcaaggataatggcttcgtatggcgaggagcgtgaaatccaaaagaattactggaaagagcattcagtgggattgagtgttgaagctatgatgcttgattccaaagcttctgacctcgacaaagaagaacgtcctgagatacttgcgtttcttccacctattgaagggacaacagtgctagagtttggtgctggaattggtcgttttactactgaattagctcagaaggccggccaggtcattgcggttgacttcattgaaagtgttatcaaaaagaatgagaacattaacggtcactacaagaacgtcaaatttctgtgcgctgatgtcacatcaccaaatatgaactttccaaatgagtctatggatctgatattctccaactggctgctaatgtatctctctgatcaagaggttgaagatttggcgaaaaagatgttacaatggacaaaggttggcgggtatattttctttcgggagtcttgtttccatcagtctggtgataacaagcggaagtacaacccaacacactaccgtgaacctaaattttacacaaagcttttcaaagaatgccatatgaatgacgaagatgggaattcgtatgaactctctttggttagctgtaaatgcattggagcttatgtgagaaacaaaaagaaccagaaccagatatgctggctttggcagaaagtcagttcggataatgataggggcttccaacgcttcttggacaatgtccagtataagtctagtggtatcttacgctatgagcgtgtctttggagaagggtttgttagcacagggggactcgagacaacaaaggaattcgtggatatgctggatctgaaacctggccaaaaagttctagacgttgggtgcggaataggaggaggggacttctacatggctgagaactttgacgtggatgttgtgggcattgatctatctgtaaacatgatctcttttgcgcttgaacacgcaataggactcaaatgctctgtagaattcgaagtagctgattgcaccaagaaggagtatcctgataacacctttgatgttatttatagcagagacaccattctacatatccaagacaagccagcattgttcagaagattctacaaatggttgaagccgggagggaaagttctcatcactgattactgcagaagccccaaaaccccatctccagactttgcaatctacatcaagaaacgaggttatgatcttcatgatgtacaagcatacggtcagatgctgagagatgctggtttcgaggaggtaatcgcggaggatagaaccgatcagttcatgaaagtcctgaaacgggaactggatgcagtggagaaggagaaggaagaattcatcagtgacttctcgaaagaggattacgaggatattataggcgggtggaagtcaaagctacttaggagctcaagtggtgagcagaagtggggtttgttcatcgccaagagaaactga

SEQ ID NO: 91527 - protein, 555 aa, Arabidopsis thaliana
  peptide (1)..(555): Ceres Seq. ID no. 12728065
MVGEEDSERAQSSKMEIERESNLGSASVLMQSKVISVSNFFSIHRFHYPREKIVSFLFPSVFSRIMASYGEEREIQKNYWKEHSVGLSVEAMMLDSKASDLDKEERPEILAFLPPIEGTTVLEFGAGIGRFTTELAQKAGQVIAVDFIESVIKKNENINGHYKNVKFLCADVTSPNMNFPNESMDLIFSNWLLMYLSDQEVEDLAKKMLQWTKVGGYIFFRESCFHQSGDNKRKYNPTHYREPKFYTKLFKECHMNDEDGNSYELSLVSCKCIGAYVRNKKNQNQICWLWQKVSSDNDRGFQRFLDNVQYKSSGILRYERVFGEGFVSTGGLETTKEFVDMLDLKPGQKVLDVGCGIGGGDFYMAENFDVDVVGIDLSVNMISFALEHAIGLKCSVEFEVADCTKKEYPDNTFDVIYSRDTILHIQDKPALFRRFYKWLKPGGKVLITDYCRSPKTPSPDFAIYIKKRGYDLHDVQAYGQMLRDAGFEEVIAEDRTDQFMKVLKRELDAVEKEKEEFISDFSKEDYEDIIGGWKSKLLRSSSGEQKWGLFIAKRN

SEQ ID NO: 91528 - protein, 541 aa, Arabidopsis thaliana
  peptide (1)..(541): Ceres Seq. ID no. 12728066
MEIERESNLGSASVLMQSKVISVSNFFSIHRFHYPREKIVSFLFPSVFSRIMASYGEEREIQKNYWKEHSVGLSVEAMMLDSKASDLDKEERPEILAFLPPIEGTTVLEFGAGIGRFTTELAQKAGQVIAVDFIESVIKKNENINGHYKNVKFLCADVTSPNMNFPNESMDLIFSNWLLMYLSDQEVEDLAKKMLQWTKVGGYIFFRESCFHQSGDNKRKYNPTHYREPKFYTKLFKECHMNDEDGNSYELSLVSCKCIGAYVRNKKNQNQICWLWQKVSSDNDRGFQRFLDNVQYKSSGILRYERVFGEGFVSTGGLETTKEFVDMLDLKPGQKVLDVGCGIGGGDFYMAENFDVDVVGIDLSVNMISFALEHAIGLKCSVEFEVADCTKKEYPDNTFDVIYSRDTILHIQDKPALFRRFYKWLKPGGKVLITDYCRSPKTPSPDFAIYIKKRGYDLHDVQAYGQMLRDAGFEEVIAEDRTDQFMKVLKRELDAVEKEKEEFISDFSKEDYEDIIGGWKSKLLRSSSGEQKWGLFIAKRN

SEQ ID NO: 91529 - protein, 526 aa, Arabidopsis thaliana
  peptide (1)..(526): Ceres Seq. ID no. 12728067
MQSKVISVSNFFSIHRFHYPREKIVSFLFPSVFSRIMASYGEEREIQKNYWKEHSVGLSVEAMMLDSKASDLDKEERPEILAFLPPIEGTTVLEFGAGIGRFTTELAQKAGQVIAVDFIESVIKKNENINGHYKNVKFLCADVTSPNMNFPNESMDLIFSNWLLMYLSDQEVEDLAKKMLQWTKVGGYIFFRESCFHQSGDNKRKYNPTHYREPKFYTKLFKECHMNDEDGNSYELSLVSCKCIGAYVRNKKNQNQICWLWQKVSSDNDRGFQRFLDNVQYKSSGILRYERVFGEGFVSTGGLETTKEFVDMLDLKPGQKVLDVGCGIGGGDFYMAENFDVDVVGIDLSVNMISFALEHAIGLKCSVEFEVADCTKKEYPDNTFDVIYSRDTILHIQDKPALFRRFYKWLKPGGKVLITDYCRSPKTPSPDFAIYIKKRGYDLHDVQAYGQMLRDAGFEEVIAEDRTDQFMKVLKRELDAVEKEKEEFISDFSKEDYEDIIGGWKSKLLRSSSGEQKWGLFIAKRN

SEQ ID NO: 91530 - DNA, 1842 bp, Arabidopsis thaliana
  misc_feature (1)..(1842): Ceres Seq. ID no. 12728096
  misc_feature (1)..(1842): Ortholog of  Ceres SEQ ID NO 12586556 as cited in SEQ ID NO 64667
  misc_feature (1)..(1842): Ortholog of  Ceres SEQ ID NO 13660894 as cited in SEQ ID NO 67475
atgataaacctaacgagacagagataccgagtctcgaatctcgtgaccggtggaacttcgctggatgtgattttgtctcactctcctaacaagttcacattcccgcctcttcttaaatcatgcgcgaagcttggagatgttgtacaaggtcggattctgcatgcccaagtcgtcaaaactgggtttttcgttgatgtgttcacggcaacggctttggtgagtatgtatatgaaggtgaagcaggtgacggatgctcttaaggtgctcgatgaaatgcctgagaggggtattgcgagtgttaatgcagcggtttctgggcttttggagaatgggttttgtagagatgcgtttaggatgtttggggatgctagggtttctgggtctgggatgaattcggttaccgttgctagtgttttgggtggttgtggggatattgaaggagggatgcaattgcattgtttggcgatgaaatcaggttttgagatggaagtttacgttggaacctctcttgtttcaatgtattcgagatgtggagagtgggttttggctgcgagaatgttcgaaaaggttcctcataagagtgttgttacctacaatgcttttatctctggattgatggagaatggagttatgaatttggttcctagtgttttcaatctcatgaggaagttttcaagtgaagaaccaaatgatgttacttttgttaatgcaataactgcttgcgctagtcttttgaatctccagtatggtaggcaacttcatggtcttgtcatgaaaaaagagtttcagtttgagacaatggttggtactgctctcattgatatgtattcgaaatgtcggtgttggaaatcagcttacattgttttcaccgagctgaaagataccaggaacttgatatcttggaactctgttatctctggaatgatgattaatggacagcatgagacagcagttgagttgtttgaaaagttggattccgagggacttaagcctgattcagcgacgtggaattcactgatcagtggcttttcacaattagggaaagtaattgaagctttcaagttctttgagagaatgctatcagtagttatggttcctagtttgaaatgtctcactagccttttatctgcttgttcagatatttggactttgaagaacggcaaagagatccatgggcatgtcattaaagctgcagcggaaagggatatatttgttttaacgtctctcattgacatgtacatgaaatgtgggctctcctcgtgggcacgccggatctttgatcgatttgaaccgaaacccaaggatcccgtgttctggaacgttatgatatctggatatggtaaacatggagagtgtgagtctgcaattgaaatattcgaactattacgagaggagaaagtagaaccgagtttagcaacctttactgctgttctatctgcgtgtagtcactgtggcaatgtcgagaagggttctcaaatatttaggttgatgcaggaagaatatggatataaacctagtacagagcacataggttgtatgattgatcttttgggtcggtctgggagattaagagaggccaaggaggtaatagatcaaatgtcagaaccatcgtcttcggtttactcttccttgctcggttcatgtaggcaacacctagatccagttcttggagaggaagcggcaatgaagctagcagagttagagccagagaatccagctccatttgtgatcttgtccagtatatatgctgcattagaaagatgggaagatgtggaaagtatcaggcaggtaatagatcagaagcaactggtgaaacttccaggtcttagtttgtctggttaa

SEQ ID NO: 91531 - protein, 613 aa, Arabidopsis thaliana
  peptide (1)..(613): Ceres Seq. ID no. 12728097
MINLTRQRYRVSNLVTGGTSLDVILSHSPNKFTFPPLLKSCAKLGDVVQGRILHAQVVKTGFFVDVFTATALVSMYMKVKQVTDALKVLDEMPERGIASVNAAVSGLLENGFCRDAFRMFGDARVSGSGMNSVTVASVLGGCGDIEGGMQLHCLAMKSGFEMEVYVGTSLVSMYSRCGEWVLAARMFEKVPHKSVVTYNAFISGLMENGVMNLVPSVFNLMRKFSSEEPNDVTFVNAITACASLLNLQYGRQLHGLVMKKEFQFETMVGTALIDMYSKCRCWKSAYIVFTELKDTRNLISWNSVISGMMINGQHETAVELFEKLDSEGLKPDSATWNSLISGFSQLGKVIEAFKFFERMLSVVMVPSLKCLTSLLSACSDIWTLKNGKEIHGHVIKAAAERDIFVLTSLIDMYMKCGLSSWARRIFDRFEPKPKDPVFWNVMISGYGKHGECESAIEIFELLREEKVEPSLATFTAVLSACSHCGNVEKGSQIFRLMQEEYGYKPSTEHIGCMIDLLGRSGRLREAKEVIDQMSEPSSSVYSSLLGSCRQHLDPVLGEEAAMKLAELEPENPAPFVILSSIYAALERWEDVESIRQVIDQKQLVKLPGLSLSG

SEQ ID NO: 91532 - protein, 539 aa, Arabidopsis thaliana
  peptide (1)..(539): Ceres Seq. ID no. 12728098
MYMKVKQVTDALKVLDEMPERGIASVNAAVSGLLENGFCRDAFRMFGDARVSGSGMNSVTVASVLGGCGDIEGGMQLHCLAMKSGFEMEVYVGTSLVSMYSRCGEWVLAARMFEKVPHKSVVTYNAFISGLMENGVMNLVPSVFNLMRKFSSEEPNDVTFVNAITACASLLNLQYGRQLHGLVMKKEFQFETMVGTALIDMYSKCRCWKSAYIVFTELKDTRNLISWNSVISGMMINGQHETAVELFEKLDSEGLKPDSATWNSLISGFSQLGKVIEAFKFFERMLSVVMVPSLKCLTSLLSACSDIWTLKNGKEIHGHVIKAAAERDIFVLTSLIDMYMKCGLSSWARRIFDRFEPKPKDPVFWNVMISGYGKHGECESAIEIFELLREEKVEPSLATFTAVLSACSHCGNVEKGSQIFRLMQEEYGYKPSTEHIGCMIDLLGRSGRLREAKEVIDQMSEPSSSVYSSLLGSCRQHLDPVLGEEAAMKLAELEPENPAPFVILSSIYAALERWEDVESIRQVIDQKQLVKLPGLSLSG

SEQ ID NO: 91533 - protein, 537 aa, Arabidopsis thaliana
  peptide (1)..(537): Ceres Seq. ID no. 12728099
MKVKQVTDALKVLDEMPERGIASVNAAVSGLLENGFCRDAFRMFGDARVSGSGMNSVTVASVLGGCGDIEGGMQLHCLAMKSGFEMEVYVGTSLVSMYSRCGEWVLAARMFEKVPHKSVVTYNAFISGLMENGVMNLVPSVFNLMRKFSSEEPNDVTFVNAITACASLLNLQYGRQLHGLVMKKEFQFETMVGTALIDMYSKCRCWKSAYIVFTELKDTRNLISWNSVISGMMINGQHETAVELFEKLDSEGLKPDSATWNSLISGFSQLGKVIEAFKFFERMLSVVMVPSLKCLTSLLSACSDIWTLKNGKEIHGHVIKAAAERDIFVLTSLIDMYMKCGLSSWARRIFDRFEPKPKDPVFWNVMISGYGKHGECESAIEIFELLREEKVEPSLATFTAVLSACSHCGNVEKGSQIFRLMQEEYGYKPSTEHIGCMIDLLGRSGRLREAKEVIDQMSEPSSSVYSSLLGSCRQHLDPVLGEEAAMKLAELEPENPAPFVILSSIYAALERWEDVESIRQVIDQKQLVKLPGLSLSG

SEQ ID NO: 91534 - DNA, 1062 bp, Arabidopsis thaliana
  misc_feature (1)..(1062): Ceres Seq. ID no. 12728163
  misc_feature (1)..(1062): Ortholog of  Ceres SEQ ID NO 15168502 as cited in SEQ ID NO 60095
  misc_feature (1)..(1062): Ortholog of  Ceres SEQ ID NO 15169466 as cited in SEQ ID NO 66135
atggagttgtctattggaaacccggcggttaaatactctgctattgttgataccggaagtgaccttatttggactcaatgcaagccttgcactgaatgttttgatcaaccaactccgatttttgacccggagaaatcttcctcttactcgaaagtaggatgctcttctggtctttgtaacgcattgcctcgatcaaactgtaacgaagataaagatgcttgtgagtatttgtatacttatggagattactcatctacaagagggctcttggccacggaaacgttcactttcgaggacgagaactcgatttctggtatcgggtttgggtgtggggttgagaacgaaggcgacgggttctctcaagggtcaggtcttgtaggtcttggtcgcggaccgctctcgcttatttctcagctcaaagagactaagttttcttattgcttgacctcgattgaggatagtgaagcatctagctcgttgtttattggatctttagcctcgggtatcgtcaacaaaacaggtgcaagtttagatggtgaagtcaccaaaacgatgtctttgctacgaaatccagatcagccttcgttctattaccttgagttacaaggcatcaccgttggagcaaaacgcctttctgttgaaaagtctacttttgaactagccgaagatggaaccggaggtatgatcatagactcaggcacgaccatcacgtatctcgaggagaccgcgtttaaagtgttgaaagaggagtttacttctcggatgagtttaccagtagatgactctggatccacgggacttgacttgtgcttcaagttacctgatgctgccaagaatattgctgttcctaagatgatttttcattttaaaggtgctgatttggagcttcccggagagaactacatggtggcggattcaagcaccggcgttttgtgtttggccatgggaagttctaatgggatgtctattttcggaaatgttcaacagcagaattttaatgtacttcatgatcttgagaaagaaacggtgtcgtttgttcccactgaatgtggaaaattgtag

SEQ ID NO: 91535 - protein, 353 aa, Arabidopsis thaliana
  peptide (1)..(353): Ceres Seq. ID no. 12728164
MELSIGNPAVKYSAIVDTGSDLIWTQCKPCTECFDQPTPIFDPEKSSSYSKVGCSSGLCNALPRSNCNEDKDACEYLYTYGDYSSTRGLLATETFTFEDENSISGIGFGCGVENEGDGFSQGSGLVGLGRGPLSLISQLKETKFSYCLTSIEDSEASSSLFIGSLASGIVNKTGASLDGEVTKTMSLLRNPDQPSFYYLELQGITVGAKRLSVEKSTFELAEDGTGGMIIDSGTTITYLEETAFKVLKEEFTSRMSLPVDDSGSTGLDLCFKLPDAAKNIAVPKMIFHFKGADLELPGENYMVADSSTGVLCLAMGSSNGMSIFGNVQQQNFNVLHDLEKETVSFVPTECGKL

SEQ ID NO: 91536 - DNA, 1870 bp, Arabidopsis thaliana
  misc_feature (1)..(1870): Ceres Seq. ID no. 12728176
  misc_feature (1)..(1870): Ortholog of  Ceres SEQ ID NO 14306569 as cited in SEQ ID NO 53008
  misc_feature (1)..(1870): Ortholog of  Ceres SEQ ID NO 14304855 as cited in SEQ ID NO 53974
atggcggagaaggaagaaaaagaaccatcgaagttaaaatcatccaccggagtttcacggccaacgatttcactacctcctcgaccgtttggtgaaatgttttttagcggtggcgttggatttagtcctggaccaatgactctcgtctcaaatttattctctgatcctgatgagttcaagtctttctctcagcttttagctggagctatggcttctccggcggcagctgctgttgccgccgctgctgtggttgctactgctcatcatcagacacctgtgagctctgtcggtgatggcggtggaagcggtggtgatgttgacccgaggtttaagcagagtagaccaacgggattgatgataactcaaccaccggggatgtttactgtaccgccggggttaagtccggctactcttttggattctccgagcttctttggtcttttttcacctcttcagggaacatttggtatgacacatcaacaagctttagcacaagtcactgcacaagcagttcaaggcaataatgttcatatgcagcaatcacaacaatctgaatatccttcttctacacaacaacaacaacaacaacaacaacaagcttcattgactgagattccatcattttcttctgcacctaggtctcagattcgagcctcggttcaagaaacatcgcagggtcagagagagacttcggaaatatctgtctttgagcatcggtcacagcctcaaaatgctgacaaaccagctgatgatggatacaactggcggaaatatgggcagaagcaagtgaaggggagcgattttcctcggagttattacaaatgtacgcatccagcttgtcctgtcaagaagaaagtggagaggtcactcgatggacaagtaacggaaatcatctacaagggtcaacacaatcatgagcttcctcaaaagcgcggtaacaataacgggagttgtaaaagttctgatattgcaaatcagtttcaaacaagtaatagcagtctcaacaagagtaagagggaccaggaaacaagccaagttacaacaacagagcagatgtctgaagcaagtgatagcgaggaggttgggaatgcagagactagtgtgggagaaagacatgaggatgagcctgatcccaagcgaagaaatacagaagttcgggtttcagaaccagttgcttcatcgcatagaactgtgacagagcctaggattattgtccaaacgacgagtgaagttgacctcttagatgatggatataggtggcgcaagtatggtcagaaagtagtcaaaggaaatccttatccgaggagctactataagtgtacaacaccagattgcggagtaaggaaacatgtagagagagcagcaactgacccaaaagctgttgtaacaacatatgaaggtaaacataaccatgatgttccagctgctagaaccagcagccatcagttaagaccaaacaatcaacacaacacctcaacggttaacttcaatcatcaacagcctgttgcacgtttaaggcttaaagaagagcaaatcacttgacagagaagaagaatacgacggcgcttgagcttttgtgagtttaatgaatcttctttttggttaatgaacctgtttttgttgcctcaaaacaccacaggtttctctggacagaatctctgatattacagtttcaaaaggtatgttcttttatttcatgttggaatcttctgtgtaatcttaagaagctttaggaggtaatgtaaaaaaccagattcaaagttatgcccttatgtgaattcttttgtacatgggataaacaaaatttacaggtatcctttttgttcttgttgtaataggttacatttgtggatgtatgtttcttttagtc

SEQ ID NO: 91537 - protein, 513 aa, Arabidopsis thaliana
  peptide (1)..(513): Ceres Seq. ID no. 12728177
MAEKEEKEPSKLKSSTGVSRPTISLPPRPFGEMFFSGGVGFSPGPMTLVSNLFSDPDEFKSFSQLLAGAMASPAAAAVAAAAVVATAHHQTPVSSVGDGGGSGGDVDPRFKQSRPTGLMITQPPGMFTVPPGLSPATLLDSPSFFGLFSPLQGTFGMTHQQALAQVTAQAVQGNNVHMQQSQQSEYPSSTQQQQQQQQQASLTEIPSFSSAPRSQIRASVQETSQGQRETSEISVFEHRSQPQNADKPADDGYNWRKYGQKQVKGSDFPRSYYKCTHPACPVKKKVERSLDGQVTEIIYKGQHNHELPQKRGNNNGSCKSSDIANQFQTSNSSLNKSKRDQETSQVTTTEQMSEASDSEEVGNAETSVGERHEDEPDPKRRNTEVRVSEPVASSHRTVTEPRIIVQTTSEVDLLDDGYRWRKYGQKVVKGNPYPRSYYKCTTPDCGVRKHVERAATDPKAVVTTYEGKHNHDVPAARTSSHQLRPNNQHNTSTVNFNHQQPVARLRLKEEQIT

SEQ ID NO: 91538 - protein, 481 aa, Arabidopsis thaliana
  peptide (1)..(481): Ceres Seq. ID no. 12728178
MFFSGGVGFSPGPMTLVSNLFSDPDEFKSFSQLLAGAMASPAAAAVAAAAVVATAHHQTPVSSVGDGGGSGGDVDPRFKQSRPTGLMITQPPGMFTVPPGLSPATLLDSPSFFGLFSPLQGTFGMTHQQALAQVTAQAVQGNNVHMQQSQQSEYPSSTQQQQQQQQQASLTEIPSFSSAPRSQIRASVQETSQGQRETSEISVFEHRSQPQNADKPADDGYNWRKYGQKQVKGSDFPRSYYKCTHPACPVKKKVERSLDGQVTEIIYKGQHNHELPQKRGNNNGSCKSSDIANQFQTSNSSLNKSKRDQETSQVTTTEQMSEASDSEEVGNAETSVGERHEDEPDPKRRNTEVRVSEPVASSHRTVTEPRIIVQTTSEVDLLDDGYRWRKYGQKVVKGNPYPRSYYKCTTPDCGVRKHVERAATDPKAVVTTYEGKHNHDVPAARTSSHQLRPNNQHNTSTVNFNHQQPVARLRLKEEQIT

SEQ ID NO: 91539 - protein, 468 aa, Arabidopsis thaliana
  peptide (1)..(468): Ceres Seq. ID no. 12728179
MTLVSNLFSDPDEFKSFSQLLAGAMASPAAAAVAAAAVVATAHHQTPVSSVGDGGGSGGDVDPRFKQSRPTGLMITQPPGMFTVPPGLSPATLLDSPSFFGLFSPLQGTFGMTHQQALAQVTAQAVQGNNVHMQQSQQSEYPSSTQQQQQQQQQASLTEIPSFSSAPRSQIRASVQETSQGQRETSEISVFEHRSQPQNADKPADDGYNWRKYGQKQVKGSDFPRSYYKCTHPACPVKKKVERSLDGQVTEIIYKGQHNHELPQKRGNNNGSCKSSDIANQFQTSNSSLNKSKRDQETSQVTTTEQMSEASDSEEVGNAETSVGERHEDEPDPKRRNTEVRVSEPVASSHRTVTEPRIIVQTTSEVDLLDDGYRWRKYGQKVVKGNPYPRSYYKCTTPDCGVRKHVERAATDPKAVVTTYEGKHNHDVPAARTSSHQLRPNNQHNTSTVNFNHQQPVARLRLKEEQIT

SEQ ID NO: 91540 - DNA, 2070 bp, Arabidopsis thaliana
  misc_feature (1)..(2070): Ceres Seq. ID no. 12728188
  misc_feature (1)..(2070): Ortholog of  Ceres SEQ ID NO 12586556 as cited in SEQ ID NO 64667
  misc_feature (1)..(2070): Ortholog of  Ceres SEQ ID NO 13660894 as cited in SEQ ID NO 67475
atgctacgctctatcactctttctccgactagaagattcgggtttccaccgagatgcgtctcttttacgactatcaaagaattgattttgactgaagagaatgatgggtcttctctgcattacgccgcttcgagcccgtgctttctccttctaagtaagtgcacgaacattgattctctaaggcaatctcacggagttttaacgggaaatggactcatgggtgatatctcgattgccaccaagctcgttagtctatatggtttctttgggtatactaaagatgcacgcttggtgttcgatcaaattcctgaaccagatttttatttatggaaagtcatgctcagatgttattgcttgaataaagagagtgtagaagtcgtaaagttgtatgatttattgatgaagcatggattcagatatgatgatattgttttctcgaaagctttgaaagcgtgtactgagcttcaggatttagacaatgggaagaagatacattgccagctcgttaaggtgccgagtttcgataatgttgtgttgacaggtcttctagatatgtatgctaagtgtggagaaatcaagagtgctcataaggtgtttaacgatattactttgaggaatgtggtttgttggacttcgatgattgctgggtatgttaagaacgacttgtgcgaagaagggttggttctgtttaatcggatgagggaaaacaatgttttgggtaatgaatatacttacggtactctaataatggcttgtacaaagcttagtgctttacatcaaggaaagtggtttcatggttgtttggttaagagtggtatagagctcagctcatgtttggtgacatctcttctcgatatgtatgttaagtgtggtgacataagcaatgcacgtcgggtgtttaatgagcattctcatgtggatcttgtcatgtggacagctatgattgtggggtatacccataacggaagtgtgaatgaggcgctgagcttgtttcagaaaatgaagggggttgaaatcaagcctaattgtgttaccattgcaagtgtcttatcgggttgcggtctgattgagaatcttgaactgggaagatcagttcatggcctctccatcaaagttggtatttgggatacaaatgttgcaaatgctctggttcacatgtacgccaagtgttaccagaatagagatgctaaatatgtgtttgaaatggagtcagagaaagatatagttgcttggaattctataatttccgggttttcacaaaacggctctatccatgaagctttgtttcttttccatcgcatgaattcagaatctgtgacgcctaatggtgtaacagttgcgagtcttttttcagcctgtgcttcccttgggtctctagctgtaggttcatcacttcatgcctattccgtgaaattgggtttcctggcatcatccagtgttcatgttggtactgcactcctggacttctatgccaaatgtggggatccccaatctgcccgtctcatcttcgatactatagaggagaaaaacacaatcacatggagtgctatgatcggaggctatggaaagcaaggggatacaatagggtcccttgagctatttgaggagatgctgaaaaagcaacaaaaacccaacgaatcaaccttcacatctattttatcagcttgtggccacacagggatggttaatgaagggaagaagtacttcagctcaatgtacaaagattataacttcacgccttcaacaaaacactacacatgtatggttgatatgttagctcgagcaggtgagcttgagcaagccttagatatcatcgaaaagatgccaatccaaccagacgtgagatgtttcggggcatttctacacggatgtggaatgcattcaagatttgatcttggggagattgtgattaagaagatgcttgatttacatcctgatgatgcctcttattatgttctcgtctctaatttgtatgcatcggatggacggtggaatcaggctaaagaagtgagaaatctgatgaagcaaagaggtctgagcaagattgcaggccatagcacaatggaatag

SEQ ID NO: 91541 - protein, 689 aa, Arabidopsis thaliana
  peptide (1)..(689): Ceres Seq. ID no. 12728189
MLRSITLSPTRRFGFPPRCVSFTTIKELILTEENDGSSLHYAASSPCFLLLSKCTNIDSLRQSHGVLTGNGLMGDISIATKLVSLYGFFGYTKDARLVFDQIPEPDFYLWKVMLRCYCLNKESVEVVKLYDLLMKHGFRYDDIVFSKALKACTELQDLDNGKKIHCQLVKVPSFDNVVLTGLLDMYAKCGEIKSAHKVFNDITLRNVVCWTSMIAGYVKNDLCEEGLVLFNRMRENNVLGNEYTYGTLIMACTKLSALHQGKWFHGCLVKSGIELSSCLVTSLLDMYVKCGDISNARRVFNEHSHVDLVMWTAMIVGYTHNGSVNEALSLFQKMKGVEIKPNCVTIASVLSGCGLIENLELGRSVHGLSIKVGIWDTNVANALVHMYAKCYQNRDAKYVFEMESEKDIVAWNSIISGFSQNGSIHEALFLFHRMNSESVTPNGVTVASLFSACASLGSLAVGSSLHAYSVKLGFLASSSVHVGTALLDFYAKCGDPQSARLIFDTIEEKNTITWSAMIGGYGKQGDTIGSLELFEEMLKKQQKPNESTFTSILSACGHTGMVNEGKKYFSSMYKDYNFTPSTKHYTCMVDMLARAGELEQALDIIEKMPIQPDVRCFGAFLHGCGMHSRFDLGEIVIKKMLDLHPDDASYYVLVSNLYASDGRWNQAKEVRNLMKQRGLSKIAGHSTME

SEQ ID NO: 91542 - protein, 617 aa, Arabidopsis thaliana
  peptide (1)..(617): Ceres Seq. ID no. 12728190
MGDISIATKLVSLYGFFGYTKDARLVFDQIPEPDFYLWKVMLRCYCLNKESVEVVKLYDLLMKHGFRYDDIVFSKALKACTELQDLDNGKKIHCQLVKVPSFDNVVLTGLLDMYAKCGEIKSAHKVFNDITLRNVVCWTSMIAGYVKNDLCEEGLVLFNRMRENNVLGNEYTYGTLIMACTKLSALHQGKWFHGCLVKSGIELSSCLVTSLLDMYVKCGDISNARRVFNEHSHVDLVMWTAMIVGYTHNGSVNEALSLFQKMKGVEIKPNCVTIASVLSGCGLIENLELGRSVHGLSIKVGIWDTNVANALVHMYAKCYQNRDAKYVFEMESEKDIVAWNSIISGFSQNGSIHEALFLFHRMNSESVTPNGVTVASLFSACASLGSLAVGSSLHAYSVKLGFLASSSVHVGTALLDFYAKCGDPQSARLIFDTIEEKNTITWSAMIGGYGKQGDTIGSLELFEEMLKKQQKPNESTFTSILSACGHTGMVNEGKKYFSSMYKDYNFTPSTKHYTCMVDMLARAGELEQALDIIEKMPIQPDVRCFGAFLHGCGMHSRFDLGEIVIKKMLDLHPDDASYYVLVSNLYASDGRWNQAKEVRNLMKQRGLSKIAGHSTME

SEQ ID NO: 91543 - protein, 577 aa, Arabidopsis thaliana
  peptide (1)..(577): Ceres Seq. ID no. 12728191
MLRCYCLNKESVEVVKLYDLLMKHGFRYDDIVFSKALKACTELQDLDNGKKIHCQLVKVPSFDNVVLTGLLDMYAKCGEIKSAHKVFNDITLRNVVCWTSMIAGYVKNDLCEEGLVLFNRMRENNVLGNEYTYGTLIMACTKLSALHQGKWFHGCLVKSGIELSSCLVTSLLDMYVKCGDISNARRVFNEHSHVDLVMWTAMIVGYTHNGSVNEALSLFQKMKGVEIKPNCVTIASVLSGCGLIENLELGRSVHGLSIKVGIWDTNVANALVHMYAKCYQNRDAKYVFEMESEKDIVAWNSIISGFSQNGSIHEALFLFHRMNSESVTPNGVTVASLFSACASLGSLAVGSSLHAYSVKLGFLASSSVHVGTALLDFYAKCGDPQSARLIFDTIEEKNTITWSAMIGGYGKQGDTIGSLELFEEMLKKQQKPNESTFTSILSACGHTGMVNEGKKYFSSMYKDYNFTPSTKHYTCMVDMLARAGELEQALDIIEKMPIQPDVRCFGAFLHGCGMHSRFDLGEIVIKKMLDLHPDDASYYVLVSNLYASDGRWNQAKEVRNLMKQRGLSKIAGHSTME

SEQ ID NO: 91544 - DNA, 507 bp, Arabidopsis thaliana
  misc_feature (1)..(507): Ceres Seq. ID no. 12728204
  misc_feature (1)..(507): Ortholog of  Ceres SEQ ID NO 12635162 as cited in SEQ ID NO 0
atgagattgcttcttagtctcttgtttctcttggctttaaccacctactcaagtgcaacttattgtctatgtagagatggtgttggagagaaagatcttcaaacatcgatagattatgcatgtggagttttaaaagattgtaatcctattcatgagaaaggtccttgttatcaaccaaacaccatcaagagtcattgtgattgggcggttaatacttatttccaaagatttggtcaaatctctggaagctgtaatttctcaggaactgctactaccagccaaaatcttccttcaactgtggttactggttgcttatatccttcaagtccaggaagtgcagggacaactcccacgacaggtactccttcaggaacacagacgtttccgggacctcctgcgtttggtccggccggagattttgatccttcaggcaataatggtgctccgagtttgttcatttcaatcgctctctcacttggtttctccgtcgtcattgcgtttctataa

SEQ ID NO: 91545 - protein, 168 aa, Arabidopsis thaliana
  peptide (1)..(168): Ceres Seq. ID no. 12728205
MRLLLSLLFLLALTTYSSATYCLCRDGVGEKDLQTSIDYACGVLKDCNPIHEKGPCYQPNTIKSHCDWAVNTYFQRFGQISGSCNFSGTATTSQNLPSTVVTGCLYPSSPGSAGTTPTTGTPSGTQTFPGPPAFGPAGDFDPSGNNGAPSLFISIALSLGFSVVIAFL

SEQ ID NO: 91546 - protein, 118 aa, Arabidopsis thaliana
  peptide (1)..(118): Ceres Seq. ID no. 12728206
MRKVLVINQTPSRVIVIGRLILISKDLVKSLEAVISQELLLPAKIFLQLWLLVAYILQVQEVQGQLPRQVLLQEHRRFRDLLRLVRPEILILQAIMVLRVCSFQSLSHLVSPSSLRFY

SEQ ID NO: 91547 - DNA, 1336 bp, Arabidopsis thaliana
  misc_feature (1)..(1336): Ceres Seq. ID no. 12728215
  misc_feature (1)..(1336): Ortholog of  Ceres SEQ ID NO 13581804 as cited in SEQ ID NO 51424
  misc_feature (1)..(1336): Ortholog of  Ceres SEQ ID NO 14306627 as cited in SEQ ID NO 53023
  misc_feature (1)..(1336): Ortholog of  Ceres SEQ ID NO 15174917 as cited in SEQ ID NO 53650
  misc_feature (1)..(1336): Ortholog of  Ceres SEQ ID NO 14304034 as cited in SEQ ID NO 53878
  misc_feature (1)..(1336): Ortholog of  Ceres SEQ ID NO 14307559 as cited in SEQ ID NO 54006
  misc_feature (1)..(1336): Ortholog of  Ceres SEQ ID NO 13663874 as cited in SEQ ID NO 67003
agaatggcttagcatctctgcaaaaccaacacaaagctatattctcttaaaaatcagttcaacaaaagaagaacctgaacacagttggcccaccaccaccactaccacaatctcctcctccaccaccaccacctagtcaccggaaaccaattcatgccctagattaagaaccagaatccttttgagacaagatctatatatacactctacacatttacttatacactttatctagatatagatgtgtgtgtgtataaaggttctttttcattacttgttggtttagtgataaaaaggaggagagttttcagttgggttttggtttcttggtgagagaagagagaaaaagagaggatgggaagagggaaagttgagctgaagaggatagagaacaagatcaatagacaagttacttttgcaaagagaagaaatggtttgctcaagaaggcttatgagctttctgtcctttgtgatgctgagattgctcttctcattttctctaaccgtggcaagctctacgaattctgcagcagccctagtggtatggcgaggacggttgataagtatagaaaacatagttatgcaacaatggatccaaatcaatcagctaaagacttgcaggataagtatcaagactacttgaagcttaaatcaagagttgagatccttcaacattcacaaaggcatttgctaggtgaagagctatccgagatggatgtgaatgagcttgagcatctcgaacgccaagtagatgcatcactaagacaaataagatctaccaaggctcggtctatgcttgatcaactatctgacctcaaaactaaggaggaaatgttattggaaaccaatagagatcttaggagaaagttggaggacagtgatgcagcacttactcaatcgttttggggaagttctgctgcagaacaacaacaacaacatcaacaacagcaacaaggcatgagctcttatcaatcaaaccctccaattcaggaagcaggtttcttcaagcctctacaaggcaatgtagcattgcaaatgagcagtcattacaatcacaatcctgcaaatgcaaccaactctgcaacaacatcacagaatgttaatggattcttccctggatggatggtctgaaaacaatacatatctatatatgtacacatatgtgtgttttatagatcaaagatcattgcttgtgtcatttgatttttgccagagaaacatagttcattattacaaaactttgttatataatcaaggctctaatgtcaaacaccagattattacttttttgttctttgttttttggctctcttgaaatataaaatattgttttggg

SEQ ID NO: 91548 - protein, 258 aa, Arabidopsis thaliana
  peptide (1)..(258): Ceres Seq. ID no. 12728216
MGRGKVELKRIENKINRQVTFAKRRNGLLKKAYELSVLCDAEIALLIFSNRGKLYEFCSSPSGMARTVDKYRKHSYATMDPNQSAKDLQDKYQDYLKLKSRVEILQHSQRHLLGEELSEMDVNELEHLERQVDASLRQIRSTKARSMLDQLSDLKTKEEMLLETNRDLRRKLEDSDAALTQSFWGSSAAEQQQQHQQQQQGMSSYQSNPPIQEAGFFKPLQGNVALQMSSHYNHNPANATNSATTSQNVNGFFPGWMV

SEQ ID NO: 91549 - protein, 195 aa, Arabidopsis thaliana
  peptide (1)..(195): Ceres Seq. ID no. 12728217
MARTVDKYRKHSYATMDPNQSAKDLQDKYQDYLKLKSRVEILQHSQRHLLGEELSEMDVNELEHLERQVDASLRQIRSTKARSMLDQLSDLKTKEEMLLETNRDLRRKLEDSDAALTQSFWGSSAAEQQQQHQQQQQGMSSYQSNPPIQEAGFFKPLQGNVALQMSSHYNHNPANATNSATTSQNVNGFFPGWMV

SEQ ID NO: 91550 - protein, 180 aa, Arabidopsis thaliana
  peptide (1)..(180): Ceres Seq. ID no. 12728218
MDPNQSAKDLQDKYQDYLKLKSRVEILQHSQRHLLGEELSEMDVNELEHLERQVDASLRQIRSTKARSMLDQLSDLKTKEEMLLETNRDLRRKLEDSDAALTQSFWGSSAAEQQQQHQQQQQGMSSYQSNPPIQEAGFFKPLQGNVALQMSSHYNHNPANATNSATTSQNVNGFFPGWMV

SEQ ID NO: 91551 - DNA, 975 bp, Arabidopsis thaliana
  misc_feature (1)..(975): Ceres Seq. ID no. 12728219
  misc_feature (1)..(975): Ortholog of  Ceres SEQ ID NO 12614972 as cited in SEQ ID NO 61986
  misc_feature (1)..(975): Ortholog of  Ceres SEQ ID NO 12625706 as cited in SEQ ID NO 64144
  misc_feature (1)..(975): Ortholog of  Ceres SEQ ID NO 13584933 as cited in SEQ ID NO 65009
  misc_feature (1)..(975): Ortholog of  Ceres SEQ ID NO 12634984 as cited in SEQ ID NO 0
  misc_feature (1)..(975): Ortholog of  Ceres SEQ ID NO 13599377 as cited in SEQ ID NO 0
atgacaaaatccgaaaccactctttcgaagttattggtagaatctgagttagtccaagaatgcgaggagttgctgtcttctcttccgagagacagaagcgtttttgcagagtatctctatcaataccagggattttggtatccaccaaatcttttagaaggtgttctatatagccagaagcattttcaggccagagattcagacatcgtccttgcaagcattcctaagtcaggtacaacttggttgaaatcacttgtctttgctttgattcataggcaagaattccaaacccctctagtatcccatcctctgctcgataacaacccgcataccctcgtgacctttatcgaaggtttccaccttcacactcaagatacttctcctaggatcttctctacacacattcctgtagggtcactccctgagtcagttaaggactcgtcctgtaaagttgtgtattgctgcaggaacccgaaggacgcgtttgtctcactttggcatttcatgaaaaatttgattgttaaggagatggttggatgcacaatggaggaaatggtgaggtttttttgccgagggtctagtatatacggacccttttgggatcatgtattacagtattggaaagaaagccgagaaaacccgaaaaaggttatgtttgtaatgtatgaagagatgagagagcagcctcaggagtgggtgatgcggatcgccgagttcttgggatattcttttacagaagaagagatagagaatggagtattggaagatatcataaagctgtgtagtcttgagaatctgagtaaattggaggttaatgagaagggtaagttactgaatggaatggagactaaggcattttttaggaaaggagagattggtggatggagagatactttaactcctttgttagcagaggaaattgataaaaccactaaggagaaactaattggttctgattttagattcttttgctaa

SEQ ID NO: 91552 - protein, 324 aa, Arabidopsis thaliana
  peptide (1)..(324): Ceres Seq. ID no. 12728220
MTKSETTLSKLLVESELVQECEELLSSLPRDRSVFAEYLYQYQGFWYPPNLLEGVLYSQKHFQARDSDIVLASIPKSGTTWLKSLVFALIHRQEFQTPLVSHPLLDNNPHTLVTFIEGFHLHTQDTSPRIFSTHIPVGSLPESVKDSSCKVVYCCRNPKDAFVSLWHFMKNLIVKEMVGCTMEEMVRFFCRGSSIYGPFWDHVLQYWKESRENPKKVMFVMYEEMREQPQEWVMRIAEFLGYSFTEEEIENGVLEDIIKLCSLENLSKLEVNEKGKLLNGMETKAFFRKGEIGGWRDTLTPLLAEEIDKTTKEKLIGSDFRFFC

SEQ ID NO: 91553 - DNA, 1098 bp, Arabidopsis thaliana
  misc_feature (1)..(1098): Ceres Seq. ID no. 12728241
  misc_feature (1)..(1098): Ortholog of  Ceres SEQ ID NO 13579918 as cited in SEQ ID NO 64644
  misc_feature (1)..(1098): Ortholog of  Ceres SEQ ID NO 13654122 as cited in SEQ ID NO 68192
atggcttattctaaagcatgttataaactcaccaccattacaattcttcttctatccttcacattaccctctcttgccggtaacgctgaaaacgcagatgtaagtgaatgcaaagctgaatctggagatctatcatgtcacaacaacaaagaagcacaaaagcttaaaatcattgcaatcccatctatcttagtggcgagcatgatcggtgtttctttaccgttgttttctcgttccattcctgctttaggacccgatcgagaaatgtctgtgatcgttaagactttagcttcgggtgtaattctggcaaccggttttatgcatgtgttaccggactctttcgatgatctcacatccaaatgtttgcctgaagacccgtggcagaagtttcctttcgccactttcatcacgatgatctcggctttgctcgttttaatgattgaatcgtttgcgatgtgtgcgtatgcgaggagaactagtaagcgtgaaggagaagtcgtaccgttagaaaatggatctaattctgtggatacacaaaacgacatccaaaccctagaaaatggatctagttatgtggagaaacaagaaaaggtcaacgaagataagacaagtgaacttcttaggaataaagtcattgctcagatattggaactaggtatcgtagttcactcggttgtgatcggtcttgctatgggggcttctgataacaaatgtaccgtacaatcactcatcgcagcgctttgtttccatcaactctttgaaggaatgggactcggtggttccatcttacaagcgcaatttaaaagcaaaacaaattggacaatggtgtttttcttttcggtcacaacaccatttgggattgttttagggatggccatacaaaagatatatgatgagacaagtccaactgcgttgatcgttgtgggggtcttgaatgcgtgctctgcaggattgttgatttatatggcccttgttaatctcttggctcatgaattcttcggaccaaagatacaagggaatattaaacttcatgtcctcggttatgttgctaccttcacaggtgccgcaggaatgtctttgatggctaagtgggcatag

SEQ ID NO: 91554 - protein, 365 aa, Arabidopsis thaliana
  peptide (1)..(365): Ceres Seq. ID no. 12728242
MAYSKACYKLTTITILLLSFTLPSLAGNAENADVSECKAESGDLSCHNNKEAQKLKIIAIPSILVASMIGVSLPLFSRSIPALGPDREMSVIVKTLASGVILATGFMHVLPDSFDDLTSKCLPEDPWQKFPFATFITMISALLVLMIESFAMCAYARRTSKREGEVVPLENGSNSVDTQNDIQTLENGSSYVEKQEKVNEDKTSELLRNKVIAQILELGIVVHSVVIGLAMGASDNKCTVQSLIAALCFHQLFEGMGLGGSILQAQFKSKTNWTMVFFFSVTTPFGIVLGMAIQKIYDETSPTALIVVGVLNACSAGLLIYMALVNLLAHEFFGPKIQGNIKLHVLGYVATFTGAAGMSLMAKWA

SEQ ID NO: 91555 - protein, 298 aa, Arabidopsis thaliana
  peptide (1)..(298): Ceres Seq. ID no. 12728243
MIGVSLPLFSRSIPALGPDREMSVIVKTLASGVILATGFMHVLPDSFDDLTSKCLPEDPWQKFPFATFITMISALLVLMIESFAMCAYARRTSKREGEVVPLENGSNSVDTQNDIQTLENGSSYVEKQEKVNEDKTSELLRNKVIAQILELGIVVHSVVIGLAMGASDNKCTVQSLIAALCFHQLFEGMGLGGSILQAQFKSKTNWTMVFFFSVTTPFGIVLGMAIQKIYDETSPTALIVVGVLNACSAGLLIYMALVNLLAHEFFGPKIQGNIKLHVLGYVATFTGAAGMSLMAKWA

SEQ ID NO: 91556 - protein, 277 aa, Arabidopsis thaliana
  peptide (1)..(277): Ceres Seq. ID no. 12728244
MSVIVKTLASGVILATGFMHVLPDSFDDLTSKCLPEDPWQKFPFATFITMISALLVLMIESFAMCAYARRTSKREGEVVPLENGSNSVDTQNDIQTLENGSSYVEKQEKVNEDKTSELLRNKVIAQILELGIVVHSVVIGLAMGASDNKCTVQSLIAALCFHQLFEGMGLGGSILQAQFKSKTNWTMVFFFSVTTPFGIVLGMAIQKIYDETSPTALIVVGVLNACSAGLLIYMALVNLLAHEFFGPKIQGNIKLHVLGYVATFTGAAGMSLMAKWA

SEQ ID NO: 91557 - DNA, 1431 bp, Arabidopsis thaliana
  misc_feature (1)..(1431): Ceres Seq. ID no. 12728249
  misc_feature (1)..(1431): Ortholog of  Ceres SEQ ID NO 13660287 as cited in SEQ ID NO 67316
atggaggagccatttcttctgagagacgagcttctagtcccttctcaagtcacatggcatacaaatccattaaccgtcgagctaaagagagtgagccgcttggccgctcctatggccactgtgaccattgctcagtacttattgcctgtcatctcggtcatggtcgctggccacaacggcgagctccagctctccggtgtcgctcttgcaaactccttcacaaacgtcaccggttttagcattatgtgtggattagtgggtgcacttgaaactctttgtggccaagcttatggagccaaacaatatgaaaaaatcggaacttacgcatactctgctattgcttccaacataccaatttgtttcctcatatcaattctctggctttacatcgaaaagatcttgatttctctcggacaagaccctgaaatttcaagaatcgctggctcctacgccttttggcttataccggctttatttggccaagcgattgtcataccactgtcccggtttctgctaacacaagggttggttattcctctgctcttcactgccgtgaccacccttttgttccacgttttggtttgttggactttggttttcttgtttggtctgggatgtaatggacctgccatggctacaagtgtgtctttctggttttacgctgtgatactctcatgttatgtgagattctccagctcttgcgagaagactcgcggatttgtatcccgagattttgtgtcttctatcaagcagttcttccaatacggaatcccatcagctgcaatgatttgtctagaatggtggctatttgagatactcatactctgctcaggtcttctccctaacccgaaactcgagacctctgttctttcaatttgtcttacaatagaaactttgcactatgtgatttcagctggagtcgccgcggctgtgagcacacgtgtatcaaacaatttgggagctgggaatcctcaagttgctagggtttcagtattagcagggctttgtctctggatagtagagtcagctttctttagcatacttctattcacctgcaggaacatcataggatacgcattcagcaacagcaaagaagttttggactatgtagctgacctaactcctttgctctgcctctcctttatcctcgacggcttcacagcagttctaaatggagttgctaggggaagtggttggcaacacattggagcttggaacaatactgtttcttattatcttgtaggagctcctgttggaatttacttagctttcagtcgtgagttgaacggaaaaggactgtggtgcggtgttgtggttggatctactgtgcaagccactatactggctattgtcacagcttccataaattggaaggaacaggctgagaaggcaaggaagagaattgtctcaactgaaaacagattggcttaa

SEQ ID NO: 91558 - protein, 476 aa, Arabidopsis thaliana
  peptide (1)..(476): Ceres Seq. ID no. 12728250
MEEPFLLRDELLVPSQVTWHTNPLTVELKRVSRLAAPMATVTIAQYLLPVISVMVAGHNGELQLSGVALANSFTNVTGFSIMCGLVGALETLCGQAYGAKQYEKIGTYAYSAIASNIPICFLISILWLYIEKILISLGQDPEISRIAGSYAFWLIPALFGQAIVIPLSRFLLTQGLVIPLLFTAVTTLLFHVLVCWTLVFLFGLGCNGPAMATSVSFWFYAVILSCYVRFSSSCEKTRGFVSRDFVSSIKQFFQYGIPSAAMICLEWWLFEILILCSGLLPNPKLETSVLSICLTIETLHYVISAGVAAAVSTRVSNNLGAGNPQVARVSVLAGLCLWIVESAFFSILLFTCRNIIGYAFSNSKEVLDYVADLTPLLCLSFILDGFTAVLNGVARGSGWQHIGAWNNTVSYYLVGAPVGIYLAFSRELNGKGLWCGVVVGSTVQATILAIVTASINWKEQAEKARKRIVSTENRLA

SEQ ID NO: 91559 - protein, 439 aa, Arabidopsis thaliana
  peptide (1)..(439): Ceres Seq. ID no. 12728251
MATVTIAQYLLPVISVMVAGHNGELQLSGVALANSFTNVTGFSIMCGLVGALETLCGQAYGAKQYEKIGTYAYSAIASNIPICFLISILWLYIEKILISLGQDPEISRIAGSYAFWLIPALFGQAIVIPLSRFLLTQGLVIPLLFTAVTTLLFHVLVCWTLVFLFGLGCNGPAMATSVSFWFYAVILSCYVRFSSSCEKTRGFVSRDFVSSIKQFFQYGIPSAAMICLEWWLFEILILCSGLLPNPKLETSVLSICLTIETLHYVISAGVAAAVSTRVSNNLGAGNPQVARVSVLAGLCLWIVESAFFSILLFTCRNIIGYAFSNSKEVLDYVADLTPLLCLSFILDGFTAVLNGVARGSGWQHIGAWNNTVSYYLVGAPVGIYLAFSRELNGKGLWCGVVVGSTVQATILAIVTASINWKEQAEKARKRIVSTENRLA

SEQ ID NO: 91560 - protein, 423 aa, Arabidopsis thaliana
  peptide (1)..(423): Ceres Seq. ID no. 12728252
MVAGHNGELQLSGVALANSFTNVTGFSIMCGLVGALETLCGQAYGAKQYEKIGTYAYSAIASNIPICFLISILWLYIEKILISLGQDPEISRIAGSYAFWLIPALFGQAIVIPLSRFLLTQGLVIPLLFTAVTTLLFHVLVCWTLVFLFGLGCNGPAMATSVSFWFYAVILSCYVRFSSSCEKTRGFVSRDFVSSIKQFFQYGIPSAAMICLEWWLFEILILCSGLLPNPKLETSVLSICLTIETLHYVISAGVAAAVSTRVSNNLGAGNPQVARVSVLAGLCLWIVESAFFSILLFTCRNIIGYAFSNSKEVLDYVADLTPLLCLSFILDGFTAVLNGVARGSGWQHIGAWNNTVSYYLVGAPVGIYLAFSRELNGKGLWCGVVVGSTVQATILAIVTASINWKEQAEKARKRIVSTENRLA

SEQ ID NO: 91561 - DNA, 1431 bp, Arabidopsis thaliana
  misc_feature (1)..(1431): Ceres Seq. ID no. 12728253
  misc_feature (1)..(1431): Ortholog of  Ceres SEQ ID NO 13660287 as cited in SEQ ID NO 67316
atggaagagccctttcttctgcaagatgagcaccttgtcccctgtaaagacacatggaaaagtggtcaggttaccgtcgagctgaagaaagtgagcagcttggccgctcctatggccgccgtgaccattgctcagtacttattgcctgtcatttcagtcatggtcgctggccacaatggtgagctccagctctccggcgtcgctcttgcaacctccttcacaaacgtttccgggttcagtattttgtttgggttagcgggtgcactagaaactctttgtggccaagcttatggagccaaacaatacgaaaaaatcggaacctacacatactctgcaactgcctctaacatccctatatgtgtcctcatatcagttctctggatttacatcgaaaagctcttaatctctctcggtcaagaccctgacatctctagagtcgctggctcctatgccttgtggctcataccggctttgttcgcccatgcgtttttcatcccactgactcggtttctgctagcacaagggttggttcttccactgctctactgtaccctgaccactcttttgttccacatccctgtttgctgggcttttgtttacgcgtttggtctgggaagcaatggagctgccatggctattagtgtgtctttctggttctatgttgtgattctctcatgttatgtgaggtactccagctcctgcgacaagactcgcgtatttgtatccagtgatttcgtgtcttgtatcaagcagttcttccacttcggagtcccatcagcggcaatggtttgcctagaatggtggctatttgagctactcatactctgttcaggtcttctcccaaacccgaaactcgagacctctgttctttcaatttgtcttacaacagcaagtttgcactatgtgattccaggtggagtcgcggcggctgtgagcacacgcgtgtcaaacaaattgggagctgggattcctcaagttgctagggtttcagtattggcagggctttgtctctggcttgtagagtcagctttctttagcacacttctcttcacatgccgaaacattataggctacgcattcagcaacagcaaagaagttgtggactatgtggctaacctaactcctttgctctgcctctcctttatcctcgacggtttcacagcagttctgaatggggttgcaaggggaagtggttggcaacacattggagctttgaacaacgtggtagcttattatcttgtaggagctcctgttggagtatacttagctttcaatcgtgagttgaacggaaaaggactttggtgtggtgttgtggtcggatccgctgtgcaagccataatattggcttttgtcacagcttccataaattggaaggaacaggctgagaaggctaggaagagaatggtctctagtgaaaatagattggcttaa

SEQ ID NO: 91562 - protein, 476 aa, Arabidopsis thaliana
  peptide (1)..(476): Ceres Seq. ID no. 12728254
MEEPFLLQDEHLVPCKDTWKSGQVTVELKKVSSLAAPMAAVTIAQYLLPVISVMVAGHNGELQLSGVALATSFTNVSGFSILFGLAGALETLCGQAYGAKQYEKIGTYTYSATASNIPICVLISVLWIYIEKLLISLGQDPDISRVAGSYALWLIPALFAHAFFIPLTRFLLAQGLVLPLLYCTLTTLLFHIPVCWAFVYAFGLGSNGAAMAISVSFWFYVVILSCYVRYSSSCDKTRVFVSSDFVSCIKQFFHFGVPSAAMVCLEWWLFELLILCSGLLPNPKLETSVLSICLTTASLHYVIPGGVAAAVSTRVSNKLGAGIPQVARVSVLAGLCLWLVESAFFSTLLFTCRNIIGYAFSNSKEVVDYVANLTPLLCLSFILDGFTAVLNGVARGSGWQHIGALNNVVAYYLVGAPVGVYLAFNRELNGKGLWCGVVVGSAVQAIILAFVTASINWKEQAEKARKRMVSSENRLA

SEQ ID NO: 91563 - protein, 439 aa, Arabidopsis thaliana
  peptide (1)..(439): Ceres Seq. ID no. 12728255
MAAVTIAQYLLPVISVMVAGHNGELQLSGVALATSFTNVSGFSILFGLAGALETLCGQAYGAKQYEKIGTYTYSATASNIPICVLISVLWIYIEKLLISLGQDPDISRVAGSYALWLIPALFAHAFFIPLTRFLLAQGLVLPLLYCTLTTLLFHIPVCWAFVYAFGLGSNGAAMAISVSFWFYVVILSCYVRYSSSCDKTRVFVSSDFVSCIKQFFHFGVPSAAMVCLEWWLFELLILCSGLLPNPKLETSVLSICLTTASLHYVIPGGVAAAVSTRVSNKLGAGIPQVARVSVLAGLCLWLVESAFFSTLLFTCRNIIGYAFSNSKEVVDYVANLTPLLCLSFILDGFTAVLNGVARGSGWQHIGALNNVVAYYLVGAPVGVYLAFNRELNGKGLWCGVVVGSAVQAIILAFVTASINWKEQAEKARKRMVSSENRLA

SEQ ID NO: 91564 - protein, 423 aa, Arabidopsis thaliana
  peptide (1)..(423): Ceres Seq. ID no. 12728256
MVAGHNGELQLSGVALATSFTNVSGFSILFGLAGALETLCGQAYGAKQYEKIGTYTYSATASNIPICVLISVLWIYIEKLLISLGQDPDISRVAGSYALWLIPALFAHAFFIPLTRFLLAQGLVLPLLYCTLTTLLFHIPVCWAFVYAFGLGSNGAAMAISVSFWFYVVILSCYVRYSSSCDKTRVFVSSDFVSCIKQFFHFGVPSAAMVCLEWWLFELLILCSGLLPNPKLETSVLSICLTTASLHYVIPGGVAAAVSTRVSNKLGAGIPQVARVSVLAGLCLWLVESAFFSTLLFTCRNIIGYAFSNSKEVVDYVANLTPLLCLSFILDGFTAVLNGVARGSGWQHIGALNNVVAYYLVGAPVGVYLAFNRELNGKGLWCGVVVGSAVQAIILAFVTASINWKEQAEKARKRMVSSENRLA

SEQ ID NO: 91565 - DNA, 2397 bp, Arabidopsis thaliana
  misc_feature (1)..(2397): Ceres Seq. ID no. 12728299
  misc_feature (1)..(2397): Ortholog of  Ceres SEQ ID NO 13655988 as cited in SEQ ID NO 65557
atggtggatcatcatcatcatcatcatcatcaacatcgacctaatcgtctttcagtaccacaaccaacaatcggaagaacatacccatcattcccttacactccaactccaaccccttccaaaacccgtctctcttcttcttcttcctacagatcgatccatggaagcaaatcatcactttcatttctctttctcattctcttctctcttagatctctttactctctcttacctttccttcgttcttcaccttctttctctcttttccctttctccttcctcgtctctcttctctctttcctcttctcactttctttcactatcatctcttccttttcaccttcaaagaaagacccttttcttctccgtcttcaaaatcgttccttttcctcaatttcatctctttcttcctctcaaatcaaactcttactcgctaaatcattccttcttgctttcgtctttcttctccgttttcaagctcttcgttactgtggtgctgctgctatgatcttagctgaactctctggcacagtttcagccagagtcttgtttagtgatactggtggaattggagttagatcatctaaggttcgtgggttttgcgttttgtttgctgggttgttgttgttatcaatcagctgggatcgtgttgattgtttcccgttttcatcatctgttgaaagttggggtttttggatttaccctaaagagaattgcttgaggatttggcctctgttgcttccgtttctatctggtttcttaggttgttatgagaaagtttctgtgaattggaatgagatcaaacagttagatcagaaacgagttcgattactgtctttgtttctaaccactgtgttgttgttcccacttgctatttggagtttcttcttctctggtagtggtgatgatagtgtctcttttgggaatttaggttggcctttagctaacactgttgtatttggagtgttgttgagtgagaattataatgatgataagttttcaagctcgaagaagaaggactcagagagggagtttcttgtaacgtttctatgtactatagtattggaactcttctattttcctgagctatctctttggggattgttgctttgtggtttgttgctttacattgctgttagagagttggagtctgtgtattcagattatcaagagattggtatggaatcgcctgagtcgttttccactatgtttatgaagcctatccgtcacattttgagcgagaagaaatcgaggaagattgcgttgtttcttttgattaatacggcgtatatggtggttgagtttgtggctggttttatgagtaacagtcttggattgatctcagacgcttgtcatatgttgtttgattgtgctgctttggcaattgggctgtatgcgtcttatatctctcgtcttcctgcaaaccatcagtataactatggccgaggtagatttgaagtgctttctggttatgttaacgcggtgttccttgttcttgttggggctctgattgtgcttgagtcgattgagagaatcttggatcctcaggagatttctacaaatagtcttttggttgtttcggttggtgggcttctcgtgaatatcgtcgggttaatctttttccacgaggaacatcatcatgctcatggtggatctggttgcacacattctcactcacaccaatcccatagccataaaaatgaggagcatcatcagcattcagatagccataaacatgaggaacatcatcagcattcagatagccataaacatgaggaacatcatgagcatgaccatcatcatcattcccatagccataaacacgaggagtgcaaccacaaccacgaccatgagcatcaatcccatagccataatcacgaggagtgcaaccacaaccacgaccatcattctgatcaccaacctgaaaaaagcgaaaagaaggagcatcgccacattgatcacaatatggaaggaatctttcttcatgttttagcagacacaatggggagtgttggagttgtgatatcgacactcttgattaaatacaagggctggttagttgcagatccagccagctcaatctttatctccatcctcatcatcgcttcagtcattccgttgctacgaaactctgcggagattctactgcaaagagtccctagggctcacaggcaagacctgaaagaagctatgaggaacatacttaagactaaaggtgtttgcagtatccagaggctgcatgtatggagtttcaccaactcagacgtcgtggctactctccatctccttgtatctgcagattcagacaagacggatactaagttacaagtgtcacgtttgttagaagatgcaggagtaaaggattggacattgcaggtggaatctgttaactcatag

SEQ ID NO: 91566 - protein, 798 aa, Arabidopsis thaliana
  peptide (1)..(798): Ceres Seq. ID no. 12728300
MVDHHHHHHHQHRPNRLSVPQPTIGRTYPSFPYTPTPTPSKTRLSSSSSYRSIHGSKSSLSFLFLILFSLRSLYSLLPFLRSSPSFSLFPFSFLVSLLSFLFSLSFTIISSFSPSKKDPFLLRLQNRSFSSISSLSSSQIKLLLAKSFLLAFVFLLRFQALRYCGAAAMILAELSGTVSARVLFSDTGGIGVRSSKVRGFCVLFAGLLLLSISWDRVDCFPFSSSVESWGFWIYPKENCLRIWPLLLPFLSGFLGCYEKVSVNWNEIKQLDQKRVRLLSLFLTTVLLFPLAIWSFFFSGSGDDSVSFGNLGWPLANTVVFGVLLSENYNDDKFSSSKKKDSEREFLVTFLCTIVLELFYFPELSLWGLLLCGLLLYIAVRELESVYSDYQEIGMESPESFSTMFMKPIRHILSEKKSRKIALFLLINTAYMVVEFVAGFMSNSLGLISDACHMLFDCAALAIGLYASYISRLPANHQYNYGRGRFEVLSGYVNAVFLVLVGALIVLESIERILDPQEISTNSLLVVSVGGLLVNIVGLIFFHEEHHHAHGGSGCTHSHSHQSHSHKNEEHHQHSDSHKHEEHHQHSDSHKHEEHHEHDHHHHSHSHKHEECNHNHDHEHQSHSHNHEECNHNHDHHSDHQPEKSEKKEHRHIDHNMEGIFLHVLADTMGSVGVVISTLLIKYKGWLVADPASSIFISILIIASVIPLLRNSAEILLQRVPRAHRQDLKEAMRNILKTKGVCSIQRLHVWSFTNSDVVATLHLLVSADSDKTDTKLQVSRLLEDAGVKDWTLQVESVNS

SEQ ID NO: 91567 - protein, 630 aa, Arabidopsis thaliana
  peptide (1)..(630): Ceres Seq. ID no. 12728301
MILAELSGTVSARVLFSDTGGIGVRSSKVRGFCVLFAGLLLLSISWDRVDCFPFSSSVESWGFWIYPKENCLRIWPLLLPFLSGFLGCYEKVSVNWNEIKQLDQKRVRLLSLFLTTVLLFPLAIWSFFFSGSGDDSVSFGNLGWPLANTVVFGVLLSENYNDDKFSSSKKKDSEREFLVTFLCTIVLELFYFPELSLWGLLLCGLLLYIAVRELESVYSDYQEIGMESPESFSTMFMKPIRHILSEKKSRKIALFLLINTAYMVVEFVAGFMSNSLGLISDACHMLFDCAALAIGLYASYISRLPANHQYNYGRGRFEVLSGYVNAVFLVLVGALIVLESIERILDPQEISTNSLLVVSVGGLLVNIVGLIFFHEEHHHAHGGSGCTHSHSHQSHSHKNEEHHQHSDSHKHEEHHQHSDSHKHEEHHEHDHHHHSHSHKHEECNHNHDHEHQSHSHNHEECNHNHDHHSDHQPEKSEKKEHRHIDHNMEGIFLHVLADTMGSVGVVISTLLIKYKGWLVADPASSIFISILIIASVIPLLRNSAEILLQRVPRAHRQDLKEAMRNILKTKGVCSIQRLHVWSFTNSDVVATLHLLVSADSDKTDTKLQVSRLLEDAGVKDWTLQVESVNS

SEQ ID NO: 91568 - protein, 405 aa, Arabidopsis thaliana
  peptide (1)..(405): Ceres Seq. ID no. 12728302
MESPESFSTMFMKPIRHILSEKKSRKIALFLLINTAYMVVEFVAGFMSNSLGLISDACHMLFDCAALAIGLYASYISRLPANHQYNYGRGRFEVLSGYVNAVFLVLVGALIVLESIERILDPQEISTNSLLVVSVGGLLVNIVGLIFFHEEHHHAHGGSGCTHSHSHQSHSHKNEEHHQHSDSHKHEEHHQHSDSHKHEEHHEHDHHHHSHSHKHEECNHNHDHEHQSHSHNHEECNHNHDHHSDHQPEKSEKKEHRHIDHNMEGIFLHVLADTMGSVGVVISTLLIKYKGWLVADPASSIFISILIIASVIPLLRNSAEILLQRVPRAHRQDLKEAMRNILKTKGVCSIQRLHVWSFTNSDVVATLHLLVSADSDKTDTKLQVSRLLEDAGVKDWTLQVESVNS

SEQ ID NO: 91569 - DNA, 2322 bp, Arabidopsis thaliana
  misc_feature (1)..(2322): Ceres Seq. ID no. 12728312
  misc_feature (1)..(2322): Ortholog of  Ceres SEQ ID NO 12465083 as cited in SEQ ID NO 68239
atgagtgtagtgggatttgatgttgggaatgagaactgtgttatcgcagttgcaaagcaacgagggatcgacgttttgttgaacgatgaatcgaaccgagaaaatcctgctatggtttcctttggtgagaagcagagattcatgggtgctgctgctgctgcctctgctactatgcatcccaagtcaaccatttctcagttaaagagattgatcggtaggaaattcagggagcctgatgttcagaatgatctgaggttgtttccttttgaaacttctgaagactctgatggtggaattcaaattcggcttcggtatatgggtgagatacagagcttcagtccggtgcagatattaggcatgttgctttcacatttgaagcagattgcagagaagagtctcaaaacgcctgtttcagactgtgtcattgggattccatcctactttacaaactcacaaagacttgcctatttggatgctgcagccattgctggcctgaggccattgagattgatgcatgattctaccgccactgcacttggatatggtatatacaagacagatttggtagctaactcgagccctacttacattgtgtttatcgatatcggtcactgtgatacacaagtgtgtgtggcatcgtttgagtctggaagcatgagagtccgttctcatgcttttgatagaaacttgggcgggagagattttgatgaggttctcttcaaccactttgcccttgaatttaaggagaaatacaacatagatgtatatacaaataccaaggcgtgtgttaggttaagggcatcgtgtgagaaagttaaaaaggtcttgagtgcaaatgctgaggcacagctgaatattgaatgtctgatggaggagaaggacgtgaggagcttcatcaagagagaagagtttgagcagttgtcagcaggcttgttggagagattaattgtaccgtgtcaaaaggctttggctgactctggtctaagtttggatcaaatccactctgtggagctagttggttcagggtcccgcattccagctatatctaagatgctaagctcgttgtttaagagggagctaggcaggactgtgaatgcaagtgagtgcgtagctcgaggatgtgcgcttcaatgtgcaatgctcagtccagtttttcgagttagagattatgaggttcaagattcttaccctttcgcaatcggcttttcatctgataaaggtcccataaacacaccatcgaatgaattgctctttccgaaaggccagatcttcccaagtgtaaaggttcttactctacatagggaaaacactttccagttggaagccttttatgcaaaccataatgaactatcaccagatataccaacacagataagcagttttatgattgggccttttcatatatcgcacggagaagcggcacgtgtcaaagtaagagttcagctaaatctccacgggattgtcacgattgattcagctacgcttgagtctaaactttccgtttctgaacagctaatagaatatcataaggagaatataacttctgaagagatgatatctgaagagaatcatcaatcttctgctatgaaggatggctctttggacccttcgtcaggttctattggtaatgagcctaaggctatcaaaagaatggaaattccagttgttgcgaacgtgtctggtgcattgacgaaggatgagttatcggaggccaaacagagagagaactctttagtggagcaagatctgaagatggaatcgacaaaggataagaaaaatgctcttgaatcttttgtctatgagatgcgtgataagatgttaaatacatatcggaacactgcaaccgagtcagaacgggaatgcatagctagaaatcttcaggaaacagaggaatggctatatgaagatggtgatgatgaatctgaaaatgcgtacatcgagaagttgaatgatgtcaaaaagctcatcgatcctattgaaaaccggttcaaagatggagaagagcgagttcaagcatcaaaagatcttctgaaaactattgcagataaccgaatggctgcagagtctcttcctcctccaagaaagaatgcggttctcgatgaatgccataaagctgagaggtggctccacgagaaaaccacagaacaggaatctttacccaaagacgctaatccagagctgcaatctgctgaaatcaggagaaaagctgatgctctaaacgcgacatgcaagtacattgggaaatcaaactctccccccgcgaaaccggaacataacggatcatacggaagtagaaaatcagatgatatggagcttgattga

SEQ ID NO: 91570 - protein, 773 aa, Arabidopsis thaliana
  peptide (1)..(773): Ceres Seq. ID no. 12728313
MSVVGFDVGNENCVIAVAKQRGIDVLLNDESNRENPAMVSFGEKQRFMGAAAAASATMHPKSTISQLKRLIGRKFREPDVQNDLRLFPFETSEDSDGGIQIRLRYMGEIQSFSPVQILGMLLSHLKQIAEKSLKTPVSDCVIGIPSYFTNSQRLAYLDAAAIAGLRPLRLMHDSTATALGYGIYKTDLVANSSPTYIVFIDIGHCDTQVCVASFESGSMRVRSHAFDRNLGGRDFDEVLFNHFALEFKEKYNIDVYTNTKACVRLRASCEKVKKVLSANAEAQLNIECLMEEKDVRSFIKREEFEQLSAGLLERLIVPCQKALADSGLSLDQIHSVELVGSGSRIPAISKMLSSLFKRELGRTVNASECVARGCALQCAMLSPVFRVRDYEVQDSYPFAIGFSSDKGPINTPSNELLFPKGQIFPSVKVLTLHRENTFQLEAFYANHNELSPDIPTQISSFMIGPFHISHGEAARVKVRVQLNLHGIVTIDSATLESKLSVSEQLIEYHKENITSEEMISEENHQSSAMKDGSLDPSSGSIGNEPKAIKRMEIPVVANVSGALTKDELSEAKQRENSLVEQDLKMESTKDKKNALESFVYEMRDKMLNTYRNTATESERECIARNLQETEEWLYEDGDDESENAYIEKLNDVKKLIDPIENRFKDGEERVQASKDLLKTIADNRMAAESLPPPRKNAVLDECHKAERWLHEKTTEQESLPKDANPELQSAEIRRKADALNATCKYIGKSNSPPAKPEHNGSYGSRKSDDMELD

SEQ ID NO: 91571 - protein, 736 aa, Arabidopsis thaliana
  peptide (1)..(736): Ceres Seq. ID no. 12728314
MVSFGEKQRFMGAAAAASATMHPKSTISQLKRLIGRKFREPDVQNDLRLFPFETSEDSDGGIQIRLRYMGEIQSFSPVQILGMLLSHLKQIAEKSLKTPVSDCVIGIPSYFTNSQRLAYLDAAAIAGLRPLRLMHDSTATALGYGIYKTDLVANSSPTYIVFIDIGHCDTQVCVASFESGSMRVRSHAFDRNLGGRDFDEVLFNHFALEFKEKYNIDVYTNTKACVRLRASCEKVKKVLSANAEAQLNIECLMEEKDVRSFIKREEFEQLSAGLLERLIVPCQKALADSGLSLDQIHSVELVGSGSRIPAISKMLSSLFKRELGRTVNASECVARGCALQCAMLSPVFRVRDYEVQDSYPFAIGFSSDKGPINTPSNELLFPKGQIFPSVKVLTLHRENTFQLEAFYANHNELSPDIPTQISSFMIGPFHISHGEAARVKVRVQLNLHGIVTIDSATLESKLSVSEQLIEYHKENITSEEMISEENHQSSAMKDGSLDPSSGSIGNEPKAIKRMEIPVVANVSGALTKDELSEAKQRENSLVEQDLKMESTKDKKNALESFVYEMRDKMLNTYRNTATESERECIARNLQETEEWLYEDGDDESENAYIEKLNDVKKLIDPIENRFKDGEERVQASKDLLKTIADNRMAAESLPPPRKNAVLDECHKAERWLHEKTTEQESLPKDANPELQSAEIRRKADALNATCKYIGKSNSPPAKPEHNGSYGSRKSDDMELD

SEQ ID NO: 91572 - protein, 726 aa, Arabidopsis thaliana
  peptide (1)..(726): Ceres Seq. ID no. 12728315
MGAAAAASATMHPKSTISQLKRLIGRKFREPDVQNDLRLFPFETSEDSDGGIQIRLRYMGEIQSFSPVQILGMLLSHLKQIAEKSLKTPVSDCVIGIPSYFTNSQRLAYLDAAAIAGLRPLRLMHDSTATALGYGIYKTDLVANSSPTYIVFIDIGHCDTQVCVASFESGSMRVRSHAFDRNLGGRDFDEVLFNHFALEFKEKYNIDVYTNTKACVRLRASCEKVKKVLSANAEAQLNIECLMEEKDVRSFIKREEFEQLSAGLLERLIVPCQKALADSGLSLDQIHSVELVGSGSRIPAISKMLSSLFKRELGRTVNASECVARGCALQCAMLSPVFRVRDYEVQDSYPFAIGFSSDKGPINTPSNELLFPKGQIFPSVKVLTLHRENTFQLEAFYANHNELSPDIPTQISSFMIGPFHISHGEAARVKVRVQLNLHGIVTIDSATLESKLSVSEQLIEYHKENITSEEMISEENHQSSAMKDGSLDPSSGSIGNEPKAIKRMEIPVVANVSGALTKDELSEAKQRENSLVEQDLKMESTKDKKNALESFVYEMRDKMLNTYRNTATESERECIARNLQETEEWLYEDGDDESENAYIEKLNDVKKLIDPIENRFKDGEERVQASKDLLKTIADNRMAAESLPPPRKNAVLDECHKAERWLHEKTTEQESLPKDANPELQSAEIRRKADALNATCKYIGKSNSPPAKPEHNGSYGSRKSDDMELD

SEQ ID NO: 91573 - DNA, 1943 bp, Arabidopsis thaliana
  misc_feature (1)..(1943): Ceres Seq. ID no. 12728316
  misc_feature (1)..(1943): Ortholog of  Ceres SEQ ID NO 15176081 as cited in SEQ ID NO 65838
  misc_feature (1)..(1943): Ortholog of  Ceres SEQ ID NO 13660287 as cited in SEQ ID NO 67316
agacttaaacgaagatagagatagagagagagacgaagttttgtttttattttttcataaatatttgttttctttttggatatttaaaaaaaaaatgggttcggaagcgaccaccgccgtgaacaaccttcagcaaccgttactggagtcaacaaaatcagaagctgacttcaggatggagagtgtattaacggacacacacttgtcatattttcggcggatctaccttgcgtcgttgatcgagatgaagtaccttttccacttggcggctccggcgatctttgtctacgtcatcaacaatggcatgtctatgctcactcgtatcttcgctggtcgtttgggaagtatgcaactcgctgccgcttctctaggaaacagcggtttcaatatgttcactcttggtctcatgcttggaatgggaagtgcagtggagacattatgtgggcaagcgcatggagctcatagatacgacatgcttggagtctacttacaaagatccacgattgttcttgtcataaccggacttccaatgactttactcttcatcttctcaaaacctctcctcatttccttaggcgagccagctgacgtagcatcagtggcatcagtattcgtctacggtatgatcccaatgatcttcgcttacgccgtcaacttccccatccaaaagtttctccagtcgcaaagcatcgtcacgccgagtgcttatatctcagccgcaacactagtcatccacttaatcctctcttggctctctgtctttaagtttggttggggcttacttggtctctccgttgttcatagtctctcgtggtggatcattgtcctcgctcagattatttacattaagataagtccaagatgtcgccggacttgggatggttttagttggaaagcttttgatggtctttgggactttttccagttatccgcagcttccgccgtcatgctctgccttgaatcttggtactctcagattcttgttctcctcgccggacttcttaaagaccctgaacttgctttggattctctagcaatctgcatgtcaatctctgcaatgtcgttcatggtgtcagttggattcaacgcagctgccagtgtgagagttagtaacgaattaggtgctggaaatccaagatcagcagcattttcaaccgcggtaactacaggagtgtcatttttactgtcattgtttgaagccatcgtgatcctctcgtggcgacatgtcatcagttacatttttacggatagtccagcggttgcggaagccgtcgccgagctctctcctttcttagccattaccatagttctcaatggagttcaacctgttttatctggtgtggccgttggatgtggatggcaagcatatgtagcttacgttaacattggatgttattacattgtggggattccgattggttatgttcttggtttcacctatgatatgggagctaggggaatatggacagggatgattggtggcacactcatgcaaactattatcttggtcattgtcacattccgaaccgattgggataaagaggtggagaaggcttcgagacgattggaccagtgggaggacacatctccgcttcttaagcaataaaataaataaattgatttttttttcaaaaaaaagaaaaaattagcttggggagattcaaagatcaattatataaataatttttggttttccccaaaatgatttttaaatggataaaaccctagttagttattcaagagatatgcgaatctcttgattaatgaattggaaaatcgattgttttctgagggggttagagtgaagagaaggatgccaatgtacatctatttttgtaagagaaaatattgagaagtgagaatgatatattgaaaaaaatgttgtattgtatggaagagtgaatttgttgtaatcgtttcttgtatgaaataaatcagataat

SEQ ID NO: 91574 - protein, 534 aa, Arabidopsis thaliana
  peptide (1)..(534): Ceres Seq. ID no. 12728317
DLNEDRDRERDEVLFLFFHKYLFSFWIFKKKMGSEATTAVNNLQQPLLESTKSEADFRMESVLTDTHLSYFRRIYLASLIEMKYLFHLAAPAIFVYVINNGMSMLTRIFAGRLGSMQLAAASLGNSGFNMFTLGLMLGMGSAVETLCGQAHGAHRYDMLGVYLQRSTIVLVITGLPMTLLFIFSKPLLISLGEPADVASVASVFVYGMIPMIFAYAVNFPIQKFLQSQSIVTPSAYISAATLVIHLILSWLSVFKFGWGLLGLSVVHSLSWWIIVLAQIIYIKISPRCRRTWDGFSWKAFDGLWDFFQLSAASAVMLCLESWYSQILVLLAGLLKDPELALDSLAICMSISAMSFMVSVGFNAAASVRVSNELGAGNPRSAAFSTAVTTGVSFLLSLFEAIVILSWRHVISYIFTDSPAVAEAVAELSPFLAITIVLNGVQPVLSGVAVGCGWQAYVAYVNIGCYYIVGIPIGYVLGFTYDMGARGIWTGMIGGTLMQTIILVIVTFRTDWDKEVEKASRRLDQWEDTSPLLKQ

SEQ ID NO: 91575 - protein, 503 aa, Arabidopsis thaliana
  peptide (1)..(503): Ceres Seq. ID no. 12728318
MGSEATTAVNNLQQPLLESTKSEADFRMESVLTDTHLSYFRRIYLASLIEMKYLFHLAAPAIFVYVINNGMSMLTRIFAGRLGSMQLAAASLGNSGFNMFTLGLMLGMGSAVETLCGQAHGAHRYDMLGVYLQRSTIVLVITGLPMTLLFIFSKPLLISLGEPADVASVASVFVYGMIPMIFAYAVNFPIQKFLQSQSIVTPSAYISAATLVIHLILSWLSVFKFGWGLLGLSVVHSLSWWIIVLAQIIYIKISPRCRRTWDGFSWKAFDGLWDFFQLSAASAVMLCLESWYSQILVLLAGLLKDPELALDSLAICMSISAMSFMVSVGFNAAASVRVSNELGAGNPRSAAFSTAVTTGVSFLLSLFEAIVILSWRHVISYIFTDSPAVAEAVAELSPFLAITIVLNGVQPVLSGVAVGCGWQAYVAYVNIGCYYIVGIPIGYVLGFTYDMGARGIWTGMIGGTLMQTIILVIVTFRTDWDKEVEKASRRLDQWEDTSPLLKQ

SEQ ID NO: 91576 - protein, 476 aa, Arabidopsis thaliana
  peptide (1)..(476): Ceres Seq. ID no. 12728319
MESVLTDTHLSYFRRIYLASLIEMKYLFHLAAPAIFVYVINNGMSMLTRIFAGRLGSMQLAAASLGNSGFNMFTLGLMLGMGSAVETLCGQAHGAHRYDMLGVYLQRSTIVLVITGLPMTLLFIFSKPLLISLGEPADVASVASVFVYGMIPMIFAYAVNFPIQKFLQSQSIVTPSAYISAATLVIHLILSWLSVFKFGWGLLGLSVVHSLSWWIIVLAQIIYIKISPRCRRTWDGFSWKAFDGLWDFFQLSAASAVMLCLESWYSQILVLLAGLLKDPELALDSLAICMSISAMSFMVSVGFNAAASVRVSNELGAGNPRSAAFSTAVTTGVSFLLSLFEAIVILSWRHVISYIFTDSPAVAEAVAELSPFLAITIVLNGVQPVLSGVAVGCGWQAYVAYVNIGCYYIVGIPIGYVLGFTYDMGARGIWTGMIGGTLMQTIILVIVTFRTDWDKEVEKASRRLDQWEDTSPLLKQ

SEQ ID NO: 91577 - DNA, 1155 bp, Arabidopsis thaliana
  misc_feature (1)..(1155): Ceres Seq. ID no. 12728327
  misc_feature (1)..(1155): Ortholog of  Ceres SEQ ID NO 15170209 as cited in SEQ ID NO 58562
  misc_feature (1)..(1155): Ortholog of  Ceres SEQ ID NO 12616332 as cited in SEQ ID NO 63449
  misc_feature (1)..(1155): Ortholog of  Ceres SEQ ID NO 13597498 as cited in SEQ ID NO 64648
atgtcattcaagaacagaggagattacaattttactccaagaaatgtagtttctagaaactctgtatttttcatgtgcctcgcaagtttctgccttggaatgttcttcactaacaggatgtggaatatagtacctgaagctagaggcatatcaagactctccaaactaagcttaagttccagtgattgcgataaaaagaatgttttggactatggtaacaacactatcgggatcttagataaatccatttcaaatttagagatgaaactagtagctgctagagctgaacgtgagtcattgtccgggaaatttaacatatccaatgaagctaagaaaagaaaatacttcatggttatcggtattaacacggcctttagtagtcgtaagagacgtgactctgtccggtcaacatggatgccacaaggagagaatcttaagaaacttgaagaagagaaaggcatcattgttcgctttgttataggacatagtgtgttgtcccacgggattcttgataaagctattgaagcagaagagaaaacacatggtgatttcttgagactggaacatacggagggatacatgaagttatctgccaagacaaagacgtttttcgctaccgctgtttccttgtgggatgcagaattctacatcaaagttgacgatgacgttcatgtgaatcttgcctccctcaagaaggctttatccgcacaccaaaacaagcctcgggtttatgttggttgcatgaagtctggtcccgtcctagccagaaagagtgtgaagtaccatgagccagagtattggaagtttggagaagtcgggaacaagtatttccgccacgccactggacagttttatgctatatctaaagatctagctacttacatactgataaaccaggatttactgcataagtatgcgaatgaagatgtttcgttgggatcttggttcatcggattgaatgtagaacatgttgatgaaaaaagactttgttgcagtacttctcaagattgtgaactaaaagcaatgatgggacatgtttgcgcggcgtcgttcgactggaaatgcagcggaatctgtcggtcggctgagaggatggccgacgttcacgaacgttgtggtgaacctcaaaatgcattatggacgtcaaattcctga

SEQ ID NO: 91578 - protein, 384 aa, Arabidopsis thaliana
  peptide (1)..(384): Ceres Seq. ID no. 12728328
MSFKNRGDYNFTPRNVVSRNSVFFMCLASFCLGMFFTNRMWNIVPEARGISRLSKLSLSSSDCDKKNVLDYGNNTIGILDKSISNLEMKLVAARAERESLSGKFNISNEAKKRKYFMVIGINTAFSSRKRRDSVRSTWMPQGENLKKLEEEKGIIVRFVIGHSVLSHGILDKAIEAEEKTHGDFLRLEHTEGYMKLSAKTKTFFATAVSLWDAEFYIKVDDDVHVNLASLKKALSAHQNKPRVYVGCMKSGPVLARKSVKYHEPEYWKFGEVGNKYFRHATGQFYAISKDLATYILINQDLLHKYANEDVSLGSWFIGLNVEHVDEKRLCCSTSQDCELKAMMGHVCAASFDWKCSGICRSAERMADVHERCGEPQNALWTSNS

SEQ ID NO: 91579 - protein, 360 aa, Arabidopsis thaliana
  peptide (1)..(360): Ceres Seq. ID no. 12728329
MCLASFCLGMFFTNRMWNIVPEARGISRLSKLSLSSSDCDKKNVLDYGNNTIGILDKSISNLEMKLVAARAERESLSGKFNISNEAKKRKYFMVIGINTAFSSRKRRDSVRSTWMPQGENLKKLEEEKGIIVRFVIGHSVLSHGILDKAIEAEEKTHGDFLRLEHTEGYMKLSAKTKTFFATAVSLWDAEFYIKVDDDVHVNLASLKKALSAHQNKPRVYVGCMKSGPVLARKSVKYHEPEYWKFGEVGNKYFRHATGQFYAISKDLATYILINQDLLHKYANEDVSLGSWFIGLNVEHVDEKRLCCSTSQDCELKAMMGHVCAASFDWKCSGICRSAERMADVHERCGEPQNALWTSNS

SEQ ID NO: 91580 - protein, 351 aa, Arabidopsis thaliana
  peptide (1)..(351): Ceres Seq. ID no. 12728330
MFFTNRMWNIVPEARGISRLSKLSLSSSDCDKKNVLDYGNNTIGILDKSISNLEMKLVAARAERESLSGKFNISNEAKKRKYFMVIGINTAFSSRKRRDSVRSTWMPQGENLKKLEEEKGIIVRFVIGHSVLSHGILDKAIEAEEKTHGDFLRLEHTEGYMKLSAKTKTFFATAVSLWDAEFYIKVDDDVHVNLASLKKALSAHQNKPRVYVGCMKSGPVLARKSVKYHEPEYWKFGEVGNKYFRHATGQFYAISKDLATYILINQDLLHKYANEDVSLGSWFIGLNVEHVDEKRLCCSTSQDCELKAMMGHVCAASFDWKCSGICRSAERMADVHERCGEPQNALWTSNS

SEQ ID NO: 91581 - DNA, 2568 bp, Arabidopsis thaliana
  misc_feature (1)..(2568): Ceres Seq. ID no. 12728364
  misc_feature (1)..(2568): Ortholog of  Ceres SEQ ID NO 15169142 as cited in SEQ ID NO 58748
cctgggtgtatgtatgtacagagaataagaccgatctctccaagatctctgttttctgaagagttggtgaatactgtttaagcttctctataagagtgtcattccaaggtgaagaagaagcgtttgattcccaaaggagattcatttatttgataaatagatttaagctaagagttaaaaaaagatggcaacactaggagatattggagtagcagcagcaatcaacatactcactgcaatcatcttccttttggcatttgcaatcttgaggattcaaccattcaacgatagggtttatttccctaaatggtatctcaaaggtataagaagcagccctttgcattcaggtgctcttgtcagcaagtttgtcaatgttaacttaggctcatacctccggttcttgaactggatgcccgcggctctaaagatgcctgagcctgagcttattgatcatgctggattggattctgctgtctacttgaggatttacttgatagggcttaagatctttgtaccgatagcgttacttgcttggtcgattcttgtacctgtcaattggactagtcatggtctgcaactagctaagcttcgtaatgtgacatctagtgatattgataagttatccatctcgaatatcgaaaatggatcagacaggttttggactcaccttgtgatggcttacgcattcacattctggacttgctatgttcttatgaaagagtatgagaaagtagctgctatgcgtttggcatttctccagaacgagcaacggcgccctgatcagttcacggttttggttaggaacgtaccagcggacccagatgagtccattagtgacagtgtggaacatttctttctagttaaccatccggaccattatcttacgcatcaggttgtgtacaatgcaaacgatttggcagcattagtagagcagaagaagagcacacagaactggcttgactattaccaattgaagtatacaaggaaccaggaacataagccgaggataaagacgggttttctcgggctatggggaaagaaagttgacgcaatcgatcattatatagctgaaatcgagaaattaaacgagcaaataatggaggagaggaaaaaagtgaagaaagatgatacaagtgtaatgccagccgcttttgtctcgtttaaaacacggtggggtgctgcggttagtgcacagactcaacagtcgagtgatccgactgaatggttaactgaatgggctcccgaggcacgagaagtgttttggtcgaaccttgcaataccttatgtctctttaacacatcgaaggcattgagaaaaatgctcctttcctgaaatccatcatcgagaacgatcttttcaaatcggttatccaaggttttcttccgggtatcgtgttaaagctctttctaatatttctgccaagcattttgatggtaatgtcgaagttcgaagggtttgtatcgttatcatcgttagagagaagagcggcttttcgatattatatctttaatctcatcaatgtcttcctcggaagcgtaatcaccggctctgcatttgaacagcttgattctttcctaaaacaatccgcaaaggagattcctaagacggttggggtagcgataccgataaaagcaacgttttttatcacatatataatggtggacggttgggctggtattgcaggggagattctgaggctgaaacctcttatctttttccatataaagaactccttattggtgaaaaccgaaaaggatagagaagaagcaatgaacccgggacagatcaattatcatgcgacagagcctcggattcaactctacttcctcctcggtcttgtctacgctcctgtgactccagttctactccctttcattatcatcttcttcgcattggcttaccttgtctttcgtcatcagatcataaatgtgtataatcaggaatatgaaagcgcggctaggttctggccagatgttcatggtcgtataatatcagcattgatcatcgcacaaatccttttgatgggactattaagcactaagggagctgctcagtccacgcctttcctactcttcttaccgatcataacctttttcttccaccggtactgcaaaggccggtatgaaccagcattcctccgtcaccccttgaaggaagctatggtcaaagatacattggaacgagcaagagaacccaattttaatctgaaaccgtatcttcaaaaagcatacattcatccggttttcaaagacaacgactatgaagatagccggtttgatgaaatatccggttattgcatcgaagattcggatgaagagtgtgttactgtaccgaccaaacgtcagtcccggataaatacgcctgctgttagccatgcaagccgcggttcttcgcgttcaccaccctcaaagtaagacacattgattcacttaaaccgggtgtggatatatacggtatagaaagaaacgatatcaattgggaattttagttatttagtcagattttgtatattatgagaatatttttggttctgacttttgagttgttttcagtatattaaaaaattct

SEQ ID NO: 91582 - protein, 375 aa, Arabidopsis thaliana
  peptide (1)..(375): Ceres Seq. ID no. 12728365
MATLGDIGVAAAINILTAIIFLLAFAILRIQPFNDRVYFPKWYLKGIRSSPLHSGALVSKFVNVNLGSYLRFLNWMPAALKMPEPELIDHAGLDSAVYLRIYLIGLKIFVPIALLAWSILVPVNWTSHGLQLAKLRNVTSSDIDKLSISNIENGSDRFWTHLVMAYAFTFWTCYVLMKEYEKVAAMRLAFLQNEQRRPDQFTVLVRNVPADPDESISDSVEHFFLVNHPDHYLTHQVVYNANDLAALVEQKKSTQNWLDYYQLKYTRNQEHKPRIKTGFLGLWGKKVDAIDHYIAEIEKLNEQIMEERKKVKKDDTSVMPAAFVSFKTRWGAAVSAQTQQSSDPTEWLTEWAPEAREVFWSNLAIPYVSLTHRRH

SEQ ID NO: 91583 - protein, 327 aa, Arabidopsis thaliana
  peptide (1)..(327): Ceres Seq. ID no. 12728366
MVMSKFEGFVSLSSLERRAAFRYYIFNLINVFLGSVITGSAFEQLDSFLKQSAKEIPKTVGVAIPIKATFFITYIMVDGWAGIAGEILRLKPLIFFHIKNSLLVKTEKDREEAMNPGQINYHATEPRIQLYFLLGLVYAPVTPVLLPFIIIFFALAYLVFRHQIINVYNQEYESAARFWPDVHGRIISALIIAQILLMGLLSTKGAAQSTPFLLFLPIITFFFHRYCKGRYEPAFLRHPLKEAMVKDTLERAREPNFNLKPYLQKAYIHPVFKDNDYEDSRFDEISGYCIEDSDEECVTVPTKRQSRINTPAVSHASRGSSRSPPSK

SEQ ID NO: 91584 - protein, 325 aa, Arabidopsis thaliana
  peptide (1)..(325): Ceres Seq. ID no. 12728367
MSKFEGFVSLSSLERRAAFRYYIFNLINVFLGSVITGSAFEQLDSFLKQSAKEIPKTVGVAIPIKATFFITYIMVDGWAGIAGEILRLKPLIFFHIKNSLLVKTEKDREEAMNPGQINYHATEPRIQLYFLLGLVYAPVTPVLLPFIIIFFALAYLVFRHQIINVYNQEYESAARFWPDVHGRIISALIIAQILLMGLLSTKGAAQSTPFLLFLPIITFFFHRYCKGRYEPAFLRHPLKEAMVKDTLERAREPNFNLKPYLQKAYIHPVFKDNDYEDSRFDEISGYCIEDSDEECVTVPTKRQSRINTPAVSHASRGSSRSPPSK

SEQ ID NO: 91585 - DNA, 888 bp, Arabidopsis thaliana
  misc_feature (1)..(888): Ceres Seq. ID no. 12728373
  misc_feature (1)..(888): Ortholog of  Ceres SEQ ID NO 14311878 as cited in SEQ ID NO 51611
atggtagagataggaggacgatttatcagaacagcggcggcttttgatgtggcggcggcgcgtgcacgccctccgtgcgctagcagcagcggaagcgatcactctccggatgacacagaagatctttgggatctggtcgaatcttttatcgacagagaagtggaaactttacctgaggatgcttttcaggaagaagaagatgataaatcggatgaggattacgaagatgtgaaggagaggttacgggagattcttgaaaaccacggaggcgaagagcggcagagaataatggatgaggcggtaaatgctagtcgggtcttcgccggggagaaacgtcactttatggcttatctacgtaacaaaggttttgatgcaggtctctgcaagtctcgatgggagaaatttggtaagaacacggctgggaagtacgagtatgtagacgttaaggcaggagataagaaccgttacatcgtcgagacaaatcttgccggagagttcgagattgcacggccaacgacaagatacctctccgtcttagctcaagtgccacgtgtctttgtgggaacacctgaggagctgaaacagcttgtgaggatcatgtgctttgagatcaggcggtcgatgaagcgagcggatattttcgtgccgccgtggagaaggaatggttatatgcaagccaagtggttcggtcactataaacgaacctcaaacgaagtggtgagtagggttaagagctgcggctgtggaccgcgtgtagggtttgaagaatcggttaaaatgacgacctttaatggttttaaagatggggagatgaggaggagtggtctaaaggttggccagctaacggtggctttcaacggcagtgaagtggggttgcaaatattttag

SEQ ID NO: 91586 - protein, 295 aa, Arabidopsis thaliana
  peptide (1)..(295): Ceres Seq. ID no. 12728374
MVEIGGRFIRTAAAFDVAAARARPPCASSSGSDHSPDDTEDLWDLVESFIDREVETLPEDAFQEEEDDKSDEDYEDVKERLREILENHGGEERQRIMDEAVNASRVFAGEKRHFMAYLRNKGFDAGLCKSRWEKFGKNTAGKYEYVDVKAGDKNRYIVETNLAGEFEIARPTTRYLSVLAQVPRVFVGTPEELKQLVRIMCFEIRRSMKRADIFVPPWRRNGYMQAKWFGHYKRTSNEVVSRVKSCGCGPRVGFEESVKMTTFNGFKDGEMRRSGLKVGQLTVAFNGSEVGLQIF

SEQ ID NO: 91587 - protein, 199 aa, Arabidopsis thaliana
  peptide (1)..(199): Ceres Seq. ID no. 12728375
MDEAVNASRVFAGEKRHFMAYLRNKGFDAGLCKSRWEKFGKNTAGKYEYVDVKAGDKNRYIVETNLAGEFEIARPTTRYLSVLAQVPRVFVGTPEELKQLVRIMCFEIRRSMKRADIFVPPWRRNGYMQAKWFGHYKRTSNEVVSRVKSCGCGPRVGFEESVKMTTFNGFKDGEMRRSGLKVGQLTVAFNGSEVGLQIF

SEQ ID NO: 91588 - protein, 181 aa, Arabidopsis thaliana
  peptide (1)..(181): Ceres Seq. ID no. 12728376
MAYLRNKGFDAGLCKSRWEKFGKNTAGKYEYVDVKAGDKNRYIVETNLAGEFEIARPTTRYLSVLAQVPRVFVGTPEELKQLVRIMCFEIRRSMKRADIFVPPWRRNGYMQAKWFGHYKRTSNEVVSRVKSCGCGPRVGFEESVKMTTFNGFKDGEMRRSGLKVGQLTVAFNGSEVGLQIF

SEQ ID NO: 91589 - DNA, 2444 bp, Arabidopsis thaliana
  misc_feature (1)..(2444): Ceres Seq. ID no. 12728377
  misc_feature (1)..(2444): Ortholog of  Ceres SEQ ID NO 14302746 as cited in SEQ ID NO 66646
ataattagtaaaattgggtttcttgacccataagcaatgttgttccctcctcttcgttccctctttctcttcaccctcttgctctcctccgtttgtttcttacaaatcaaagcagaccacgacgatgaaagcgacttgggcagtgatatcaaagtagacaaacgtctcaagttcgagaacccgaagctacgtcaagcctacattgctcttcaatcatggaaaaaagcaatcttttctgatcctttcaacttcacagctaattggaatggttcagatgtttgctcctacaatggaatctattgtgctccttctccttcatacccgaaaacccgagtcgttgctggcattgacctcaaccacgctgacatggccggttacttggcttccgagctaggtctcctctctgatctcgctctgttccacattaactcaaaccgtttctgcggtgaagtccctctcacgtttaaccgcatgaagcttctctacgagcttgatcttagcaacaaccgattcgtcggtaagttccctaaggttgtcctctctttgccttcccttaaattcttggatctccgctacaacgagtttgaaggcaagatcccatcaaagctcttcgatagagagcttgacgctatattcttgaaccataaccggttccggttcgggattcccaaaaacatgggaaattcccctgtttctgctctggttcttgcggacaacaatctcggaggatgcataccgggaagtatcggtcaaatggggaaaacactcaacgagcttatcctctccaacgacaacttaaccggttgtttacctcctcagatcggaaacctcaagaaagtgacggttttcgacatcacttcaaaccgtctacaaggtccgttaccatctagcgttggtaacatgaagagcctagaagagcttcacgtggctaacaatgccttcacaggagttattcctccaagtatctgccagctttctaaccttgagaactttacttactcttccaactacttctccggtcgtcctcctatatgcgcagctagtttgttagccgacattgtggtgaacggtaccatgaactgcatcaccggtttggctcgtcaaagatcggataaacagtgctcatctttgcttgctcgccctgtggattgcagtaagtttggatgttacaacatcttctctccaccaccaccgacgtttaagatgtcacctgaagtccggacacttcctccaccgatttacgtgtactcatcgcctcctccaccaccgtcgtcaaagatgtcccctaccgtcagagcatactctcccccaccaccaccttcgtccaagatgtcaccctctgtcagagcatattcaccaccaccgcctccttattccaagatgtcacctagcgttcgagcttaccctcctccaccaccaccatcaccatctcccccaccgccttacgtatactcatctcctccaccgccctatgtgtactcatctcctcctccaccgccgtatgtgtattcatcccctcctccaccgccttacgtatactcatctcctccaccgccttacgtgtactcatctccacccccgccttacgtatactcatctccacctccgcctcctccaagtccaccaccaccgtgtcctgaatcatctccaccaccgcctgttgtatactacgcacccgtgacacaaagccctccaccaccatcaccggtatactatccaccagtaacacaaagccctccaccaccatcgccagtatactacccaccggtgacaaacagtccaccaccaccatcaccggtatactatcccccagtaacatacagtccaccaccaccatcaccagtttactatccccaagtaacaccaagtcctccaccaccatcgccgctatactatcccccagtaacaccaagtccaccaccaccatcaccagtttactatcccccagtaacaccaagtcctccaccaccatcaccagtttactatcccccagtaacaccaagtcctccaccaccatcaccagtttactatccatcggaaacacaaagtcctccaccacctactgagtactactattcaccaagccagtctccgccaccaacaaaagcatgtaaagaaggccatccaccacaagcaacaccaagttacgaaccacctccagaatattcatactcatcatcaccaccaccaccatctcctacgtcctactttccaccgatgccaagcgtctcatatgatgcatctcctcctcctcctccgtcttactactagtttcaaccattgagtaaaaaaatgcattgccttatgattaacgagactactcacaattatattcttttggctgcgagactttaatttgtgtgttttgttgatttaaagaaaaaaagacattccagttactttttcttgtaatatttttttttcttttggatattatgttcttt

SEQ ID NO: 91590 - protein, 744 aa, Arabidopsis thaliana
  peptide (1)..(744): Ceres Seq. ID no. 12728378
MLFPPLRSLFLFTLLLSSVCFLQIKADHDDESDLGSDIKVDKRLKFENPKLRQAYIALQSWKKAIFSDPFNFTANWNGSDVCSYNGIYCAPSPSYPKTRVVAGIDLNHADMAGYLASELGLLSDLALFHINSNRFCGEVPLTFNRMKLLYELDLSNNRFVGKFPKVVLSLPSLKFLDLRYNEFEGKIPSKLFDRELDAIFLNHNRFRFGIPKNMGNSPVSALVLADNNLGGCIPGSIGQMGKTLNELILSNDNLTGCLPPQIGNLKKVTVFDITSNRLQGPLPSSVGNMKSLEELHVANNAFTGVIPPSICQLSNLENFTYSSNYFSGRPPICAASLLADIVVNGTMNCITGLARQRSDKQCSSLLARPVDCSKFGCYNIFSPPPPTFKMSPEVRTLPPPIYVYSSPPPPPSSKMSPTVRAYSPPPPPSSKMSPSVRAYSPPPPPYSKMSPSVRAYPPPPPPSPSPPPPYVYSSPPPPYVYSSPPPPPYVYSSPPPPPYVYSSPPPPYVYSSPPPPYVYSSPPPPPPSPPPPCPESSPPPPVVYYAPVTQSPPPPSPVYYPPVTQSPPPPSPVYYPPVTNSPPPPSPVYYPPVTYSPPPPSPVYYPQVTPSPPPPSPLYYPPVTPSPPPPSPVYYPPVTPSPPPPSPVYYPPVTPSPPPPSPVYYPSETQSPPPPTEYYYSPSQSPPPTKACKEGHPPQATPSYEPPPEYSYSSSPPPPSPTSYFPPMPSVSYDASPPPPPSYY

SEQ ID NO: 91591 - protein, 634 aa, Arabidopsis thaliana
  peptide (1)..(634): Ceres Seq. ID no. 12728379
MAGYLASELGLLSDLALFHINSNRFCGEVPLTFNRMKLLYELDLSNNRFVGKFPKVVLSLPSLKFLDLRYNEFEGKIPSKLFDRELDAIFLNHNRFRFGIPKNMGNSPVSALVLADNNLGGCIPGSIGQMGKTLNELILSNDNLTGCLPPQIGNLKKVTVFDITSNRLQGPLPSSVGNMKSLEELHVANNAFTGVIPPSICQLSNLENFTYSSNYFSGRPPICAASLLADIVVNGTMNCITGLARQRSDKQCSSLLARPVDCSKFGCYNIFSPPPPTFKMSPEVRTLPPPIYVYSSPPPPPSSKMSPTVRAYSPPPPPSSKMSPSVRAYSPPPPPYSKMSPSVRAYPPPPPPSPSPPPPYVYSSPPPPYVYSSPPPPPYVYSSPPPPPYVYSSPPPPYVYSSPPPPYVYSSPPPPPPSPPPPCPESSPPPPVVYYAPVTQSPPPPSPVYYPPVTQSPPPPSPVYYPPVTNSPPPPSPVYYPPVTYSPPPPSPVYYPQVTPSPPPPSPLYYPPVTPSPPPPSPVYYPPVTPSPPPPSPVYYPPVTPSPPPPSPVYYPSETQSPPPPTEYYYSPSQSPPPTKACKEGHPPQATPSYEPPPEYSYSSSPPPPSPTSYFPPMPSVSYDASPPPPPSYY

SEQ ID NO: 91592 - protein, 599 aa, Arabidopsis thaliana
  peptide (1)..(599): Ceres Seq. ID no. 12728380
MKLLYELDLSNNRFVGKFPKVVLSLPSLKFLDLRYNEFEGKIPSKLFDRELDAIFLNHNRFRFGIPKNMGNSPVSALVLADNNLGGCIPGSIGQMGKTLNELILSNDNLTGCLPPQIGNLKKVTVFDITSNRLQGPLPSSVGNMKSLEELHVANNAFTGVIPPSICQLSNLENFTYSSNYFSGRPPICAASLLADIVVNGTMNCITGLARQRSDKQCSSLLARPVDCSKFGCYNIFSPPPPTFKMSPEVRTLPPPIYVYSSPPPPPSSKMSPTVRAYSPPPPPSSKMSPSVRAYSPPPPPYSKMSPSVRAYPPPPPPSPSPPPPYVYSSPPPPYVYSSPPPPPYVYSSPPPPPYVYSSPPPPYVYSSPPPPYVYSSPPPPPPSPPPPCPESSPPPPVVYYAPVTQSPPPPSPVYYPPVTQSPPPPSPVYYPPVTNSPPPPSPVYYPPVTYSPPPPSPVYYPQVTPSPPPPSPLYYPPVTPSPPPPSPVYYPPVTPSPPPPSPVYYPPVTPSPPPPSPVYYPSETQSPPPPTEYYYSPSQSPPPTKACKEGHPPQATPSYEPPPEYSYSSSPPPPSPTSYFPPMPSVSYDASPPPPPSYY

SEQ ID NO: 91593 - DNA, 1188 bp, Arabidopsis thaliana
  misc_feature (1)..(1188): Ceres Seq. ID no. 12728424
  misc_feature (1)..(1188): Ortholog of  Ceres SEQ ID NO 13582619 as cited in SEQ ID NO 56520
  misc_feature (1)..(1188): Ortholog of  Ceres SEQ ID NO 13660872 as cited in SEQ ID NO 60830
  misc_feature (1)..(1188): Ortholog of  Ceres SEQ ID NO 15226831 as cited in SEQ ID NO 62916
  misc_feature (1)..(1188): Ortholog of  Ceres SEQ ID NO 12616221 as cited in SEQ ID NO 63291
atgaattcattttcccacgtccctccgggttttagatttcacccgacagatgaagaacttgtagactactacctgaggaaaaaagtcgcatcgaagagaatagaaattgatttcataaaggacattgatctttacaagattgagccatgggaccttcaagagttgtgcaaaattgggcatgaagagcagagtgattggtacttctttagccataaagacaagaagtatcccacagggactcgaaccaatagagcaacaaaagcagggttttggaaagccaccggaagagataaggctatctatttgaggcatagtctaattggcatgaggaaaacacttgtgttttacaagggaagagccccaaatggacaaaagtctgattggatcatgcacgaataccgcttagaaaccgatgaaaacggaactcctcaggaagaaggatgggttgtgtgtagggttttcaagaagagattggctgcagttagacgaatgggagattacgactcatccccttcacattggtacgatgatcaactttcttttatggcctccgagctcgagacaaacggtcaacgacggattctccccaatcatcatcagcagcagcagcacgagcaccaacaacatatgccatatggcctcaatgcatctgcttacgctctcaacaaccctaacttgcaatgcaagcaagagctagaactacactacaaccacctggtacaacgaaatcatcttcttgatgaatctcatttatcgttcctccaacttcctcaactagaaagccctaagattcaacaagataacagtaattgcaactctcttccttatggaacaagcaacatcgataataactcgagccataatgctaacttgcagcaatcaaatatcgcgcatgaggaacaattgaatcaaggaaatcagaacttcagctctctatacatgaacagcggcaacgagcaagtgatggaccaagtcacagactggagagttctcgataaatttgttgcttctcagctaagcaacgaggaggctgccacagcttctgcatctatacagaataatgccaaggacacaagcaatgctgagtaccaagttgatgaagaaaaagatccgaaaagggcttcagacatgggagaagaatatactgcttctacttcttcgagttgtcagattgatctatggaagtga

SEQ ID NO: 91594 - protein, 395 aa, Arabidopsis thaliana
  peptide (1)..(395): Ceres Seq. ID no. 12728425
MNSFSHVPPGFRFHPTDEELVDYYLRKKVASKRIEIDFIKDIDLYKIEPWDLQELCKIGHEEQSDWYFFSHKDKKYPTGTRTNRATKAGFWKATGRDKAIYLRHSLIGMRKTLVFYKGRAPNGQKSDWIMHEYRLETDENGTPQEEGWVVCRVFKKRLAAVRRMGDYDSSPSHWYDDQLSFMASELETNGQRRILPNHHQQQQHEHQQHMPYGLNASAYALNNPNLQCKQELELHYNHLVQRNHLLDESHLSFLQLPQLESPKIQQDNSNCNSLPYGTSNIDNNSSHNANLQQSNIAHEEQLNQGNQNFSSLYMNSGNEQVMDQVTDWRVLDKFVASQLSNEEAATASASIQNNAKDTSNAEYQVDEEKDPKRASDMGEEYTASTSSSCQIDLWK

SEQ ID NO: 91595 - protein, 287 aa, Arabidopsis thaliana
  peptide (1)..(287): Ceres Seq. ID no. 12728426
MRKTLVFYKGRAPNGQKSDWIMHEYRLETDENGTPQEEGWVVCRVFKKRLAAVRRMGDYDSSPSHWYDDQLSFMASELETNGQRRILPNHHQQQQHEHQQHMPYGLNASAYALNNPNLQCKQELELHYNHLVQRNHLLDESHLSFLQLPQLESPKIQQDNSNCNSLPYGTSNIDNNSSHNANLQQSNIAHEEQLNQGNQNFSSLYMNSGNEQVMDQVTDWRVLDKFVASQLSNEEAATASASIQNNAKDTSNAEYQVDEEKDPKRASDMGEEYTASTSSSCQIDLWK

SEQ ID NO: 91596 - protein, 266 aa, Arabidopsis thaliana
  peptide (1)..(266): Ceres Seq. ID no. 12728427
MHEYRLETDENGTPQEEGWVVCRVFKKRLAAVRRMGDYDSSPSHWYDDQLSFMASELETNGQRRILPNHHQQQQHEHQQHMPYGLNASAYALNNPNLQCKQELELHYNHLVQRNHLLDESHLSFLQLPQLESPKIQQDNSNCNSLPYGTSNIDNNSSHNANLQQSNIAHEEQLNQGNQNFSSLYMNSGNEQVMDQVTDWRVLDKFVASQLSNEEAATASASIQNNAKDTSNAEYQVDEEKDPKRASDMGEEYTASTSSSCQIDLWK

SEQ ID NO: 91597 - DNA, 1518 bp, Arabidopsis thaliana
  misc_feature (1)..(1518): Ceres Seq. ID no. 12728436
  misc_feature (1)..(1518): Ortholog of  Ceres SEQ ID NO 15171181 as cited in SEQ ID NO 56848
atggctccttcgtcttcatcttctccttccaaatctcctgttccatctcttcaccaatcccttcacttcactcctattctagaatgtgaagaagacgacctccaagaagaaagatacaaaaacagagcaacaccaagcagcgacggtggttcttccgccacaccaaaccaccagcaccaccgccgtaccaacagcaacaacaaccaccagcacactctaacacctctccaccacaacggcaaaccccaaaccagaaaacgacatgacgacaacgacgaagacgatggtggtgccgtatcctgcaacaagtgtcgacctcaccactctcaccgtgacaaattctccgtcgtacctctcgaaagccacaacaacccttctttcatctctagccccaatctcataatcaaatccatcttccaatctctcacacggagaagccccaaaccttcctctgcaacggcggcgcttccaccgcgctcttcctcatcctccgccgcagatgcttctagagaagaacagtggcggttagctgtggcggagctttctcataaactgattcaagccacgaagaagaaagaagacgcggttatagaagcttctaggttgaaatcatccatggcagagctagagaagaaactcaataaactcgagatttactgtcacaatctcaaatcaggtctcgacgaatgcagcaacaaaaaacagagtgttccgattcgaaaagacggattcaacgacaggatcattcagcagtttctcgtctctgtgtcggaatctcgttcttcgatcagagctttaagtagatctctcgcctcgcagctacgaaccgtcggtggcaaagtttacgagagactctctcttcttcttcaacctttcgatgtaaagatcaactcttttgccaaaaaccctaaaagtctgatcttttacctcgaagcgattctgagcagagccttcttcgaggatttcgaagctcctgggtttcagaaaaacgggtcgacccggattttgaatccaattgatcgttgtgaatccaattacgcttcgtttaacgtcttgatggagctgacgtgggatgaggtgttgagcagaggaacgaagcatttctcggaggagtttagccgtttctgtgaccggaagatgagtgacgtcgtttcgatgcttagctggaaccgtgcctggcctgaaccgcttttacaggctttctttggtgcgtcaaagagtgtttggttggttcatcttttggctaattcagtgaacccggggttgcaaatctttcgtgtggagaaagatgaccggtttgatccgatttacatggaggaaaccggtggggaacggtttaagagtctggttagagctatggttcagcccgggttttatgtctatgggagtgtggttaagtgcaaggtggtttgcaagcaatgcggcagcgatgaggaagaactagaagaccatacggtcaaagaatgtaataaaaacgacaagagtttaataagcatttgtagcccattaggaggttaa

SEQ ID NO: 91598 - protein, 505 aa, Arabidopsis thaliana
  peptide (1)..(505): Ceres Seq. ID no. 12728437
MAPSSSSSPSKSPVPSLHQSLHFTPILECEEDDLQEERYKNRATPSSDGGSSATPNHQHHRRTNSNNNHQHTLTPLHHNGKPQTRKRHDDNDEDDGGAVSCNKCRPHHSHRDKFSVVPLESHNNPSFISSPNLIIKSIFQSLTRRSPKPSSATAALPPRSSSSSAADASREEQWRLAVAELSHKLIQATKKKEDAVIEASRLKSSMAELEKKLNKLEIYCHNLKSGLDECSNKKQSVPIRKDGFNDRIIQQFLVSVSESRSSIRALSRSLASQLRTVGGKVYERLSLLLQPFDVKINSFAKNPKSLIFYLEAILSRAFFEDFEAPGFQKNGSTRILNPIDRCESNYASFNVLMELTWDEVLSRGTKHFSEEFSRFCDRKMSDVVSMLSWNRAWPEPLLQAFFGASKSVWLVHLLANSVNPGLQIFRVEKDDRFDPIYMEETGGERFKSLVRAMVQPGFYVYGSVVKCKVVCKQCGSDEEELEDHTVKECNKNDKSLISICSPLGG

SEQ ID NO: 91599 - protein, 300 aa, Arabidopsis thaliana
  peptide (1)..(300): Ceres Seq. ID no. 12728438
MAELEKKLNKLEIYCHNLKSGLDECSNKKQSVPIRKDGFNDRIIQQFLVSVSESRSSIRALSRSLASQLRTVGGKVYERLSLLLQPFDVKINSFAKNPKSLIFYLEAILSRAFFEDFEAPGFQKNGSTRILNPIDRCESNYASFNVLMELTWDEVLSRGTKHFSEEFSRFCDRKMSDVVSMLSWNRAWPEPLLQAFFGASKSVWLVHLLANSVNPGLQIFRVEKDDRFDPIYMEETGGERFKSLVRAMVQPGFYVYGSVVKCKVVCKQCGSDEEELEDHTVKECNKNDKSLISICSPLGG

SEQ ID NO: 91600 - DNA, 789 bp, Arabidopsis thaliana
  misc_feature (1)..(789): Ceres Seq. ID no. 12728462
  misc_feature (1)..(789): Ortholog of  Ceres SEQ ID NO 13596519 as cited in SEQ ID NO 62572
  misc_feature (1)..(789): Ortholog of  Ceres SEQ ID NO 12625108 as cited in SEQ ID NO 68102
atgggtccaatctcaagttcttggagctttaacaaattcttctcaatagttttcgttgttttcgccatctccggcgagttcgtcgctggatactatcgaccaggcccatggagatatgctcacgccactttctacggtgacgagaccggtggtgaaaccatgggtggtgcatgtgggtacggaaacctttttaacagcggctacggactgtccacggcggcgctaagcacgacattgttcaatgatggttacggatgcggccaatgttttcagataacatgttcgaaatcaccgcattgttactctggaaaatcaacagtggtcacagccaccaatctttgccctcctaattggtaccaagactccaacgctggtggttggtgcaatcctcctagaacccatttcgatatggctaaaccagctttcatgaaactcgcttactggagggccggtatcatcccagttgcataccgaagagtgccatgccaaaggagtggaggtatgaggtttcaattccaaggtaattcttattggcttcttatcttcgtcatgaacgttggtggcgccggagacatcaagagcatggccgttaaaggtagccggacgaattggataagcatgagccacaattggggagcctcttaccaagctttttcctctctctatggtcaatctctctctttccgggtcacttcttacaccaccggtgaaaccatctatgcttggaacgttgctccggctaactggagcggcggtaagacttacaagagcaccgctaatttccgttaa

SEQ ID NO: 91601 - protein, 262 aa, Arabidopsis thaliana
  peptide (1)..(262): Ceres Seq. ID no. 12728463
MGPISSSWSFNKFFSIVFVVFAISGEFVAGYYRPGPWRYAHATFYGDETGGETMGGACGYGNLFNSGYGLSTAALSTTLFNDGYGCGQCFQITCSKSPHCYSGKSTVVTATNLCPPNWYQDSNAGGWCNPPRTHFDMAKPAFMKLAYWRAGIIPVAYRRVPCQRSGGMRFQFQGNSYWLLIFVMNVGGAGDIKSMAVKGSRTNWISMSHNWGASYQAFSSLYGQSLSFRVTSYTTGETIYAWNVAPANWSGGKTYKSTANFR

SEQ ID NO: 91602 - protein, 209 aa, Arabidopsis thaliana
  peptide (1)..(209): Ceres Seq. ID no. 12728464
MGGACGYGNLFNSGYGLSTAALSTTLFNDGYGCGQCFQITCSKSPHCYSGKSTVVTATNLCPPNWYQDSNAGGWCNPPRTHFDMAKPAFMKLAYWRAGIIPVAYRRVPCQRSGGMRFQFQGNSYWLLIFVMNVGGAGDIKSMAVKGSRTNWISMSHNWGASYQAFSSLYGQSLSFRVTSYTTGETIYAWNVAPANWSGGKTYKSTANFR

SEQ ID NO: 91603 - DNA, 1970 bp, Arabidopsis thaliana
  misc_feature (1)..(1970): Ceres Seq. ID no. 12728465
  misc_feature (1)..(1970): Ortholog of  Ceres SEQ ID NO 13596509 as cited in SEQ ID NO 62004
  misc_feature (1)..(1970): Ortholog of  Ceres SEQ ID NO 14307904 as cited in SEQ ID NO 66440
  misc_feature (1)..(1970): Ortholog of  Ceres SEQ ID NO 13659971 as cited in SEQ ID NO 67565
  misc_feature (1)..(1970): Ortholog of  Ceres SEQ ID NO 13500385 as cited in SEQ ID NO 67583
gagagaggactgggtctggtctcttcgctgcaacctatagctgttgtttgctcttcgacgggattctcactactcttttgccaaaaaaaagagatcggaggttccgaaggtgaatgcagcttgcgatttcatagaaaagaagattcgtttgctggattaggcttatttgtgtatcatagctttgaggttttaactgagatttattgatagtggaacttaggttttcgagaggtgtgaacagttgggtatatgggtatggacatagctgataaggagaatacgagcccgcttttatttgaattctgcaattgctataaagttgcaagccttactgaaaccattctaaaccctgtaaatgtttccaacttaaaagatagatatgtacttggagaacagttaggctggggtcagtttggtgtgataagagtatgttctgataagttaactggagagaggcttgcttgtaagtctatatctaaagacagactggtaacacaagatgacatgaagagtatcaaactcgagattgcgataatggccaagttagctgggcacccaaatgtggtgaatctcaaagcagtttacgaggagaaagattctgtgcatcttgtgatggaactatgcgcaggcggtgagctttttcacaagctcgagaaatatggaaggtattctgaggttcgtgctagggtgctcttcaagcacttgatgcaagtggtcaagttttgtcatgatagcggtattgttcacagagatttgaaaccggaaaacattcttatggccacaatgtcttcttcgtctcctatcaaattggctgattttggactggcaacctatataaagcctggcgaaaagctgagcggaacagttggtagtccgttttatatagccccggaagtgttagcagggggatataaccaagctgctgatgtatggagtgcaggggttattttgtatattcttctcagtggagcgccgcccttttggggaaagactaagtcaaagatttttgatgctgtcagggctgccgatttgagattttctgcagagccatgggacaatataacttcatacgccaaggatttgattcgcgggatgctttgtgtggatccttcccaaaggttatcagctgacgaagttctagctcactcttggatggagcagttatctgaatcaggtcaagaacaatatgatcaggatgggtttggttgtgaaggattggagaatgggggatgttctttctccacacaatgcgtttctcgggaacaagactatagctttagcgttggccagttagagcaatcaacagataacgattttaaatcatcgttctcgacattcctacctgcggataacacactgccaaattccggttttgatgggttttcttttgatgggaaacaaccggaatcaaccacagctggcttctcatcaactggaattccctctatgccaagctttacctttttttgtacaagcccagcaaggacacagaacaacgacataactgaaatagatggaaaagttcgagactcaagcccaaagaggttactgccttcaccagattcttcttcacaacttgagaggcgtgatgaagcaggggagaatcagacagaagcaggaggaaagtcagagacaagaagggaaagaggaaactggtcaagaatgtcaggtctacacagcaaaaggaacagaacaataggactaggcgagctagaccagttggtggtggatgttgcagtcacagagtcgataatcagatgggcatcttgcacgcatattcccaccgctccatctctcagattgtcgctcgtctgctagaagaagaaaacgaagaagacaactgttatcagtaaaatattgtatgtacacatctgattttgtccctgcaatgtctttgtttttgtagtaaaacttttccatggaaactgacctcaactgtataaaccaacggaaatagagtgtgattttga

SEQ ID NO: 91604 - protein, 522 aa, Arabidopsis thaliana
  peptide (1)..(522): Ceres Seq. ID no. 12728466
MGMDIADKENTSPLLFEFCNCYKVASLTETILNPVNVSNLKDRYVLGEQLGWGQFGVIRVCSDKLTGERLACKSISKDRLVTQDDMKSIKLEIAIMAKLAGHPNVVNLKAVYEEKDSVHLVMELCAGGELFHKLEKYGRYSEVRARVLFKHLMQVVKFCHDSGIVHRDLKPENILMATMSSSSPIKLADFGLATYIKPGEKLSGTVGSPFYIAPEVLAGGYNQAADVWSAGVILYILLSGAPPFWGKTKSKIFDAVRAADLRFSAEPWDNITSYAKDLIRGMLCVDPSQRLSADEVLAHSWMEQLSESGQEQYDQDGFGCEGLENGGCSFSTQCVSREQDYSFSVGQLEQSTDNDFKSSFSTFLPADNTLPNSGFDGFSFDGKQPESTTAGFSSTGIPSMPSFTFFCTSPARTQNNDITEIDGKVRDSSPKRLLPSPDSSSQLERRDEAGENQTEAGGKSETRRERGNWSRMSGLHSKRNRTIGLGELDQLVVDVAVTESIIRWASCTHIPTAPSLRLSLVC

SEQ ID NO: 91605 - protein, 520 aa, Arabidopsis thaliana
  peptide (1)..(520): Ceres Seq. ID no. 12728467
MDIADKENTSPLLFEFCNCYKVASLTETILNPVNVSNLKDRYVLGEQLGWGQFGVIRVCSDKLTGERLACKSISKDRLVTQDDMKSIKLEIAIMAKLAGHPNVVNLKAVYEEKDSVHLVMELCAGGELFHKLEKYGRYSEVRARVLFKHLMQVVKFCHDSGIVHRDLKPENILMATMSSSSPIKLADFGLATYIKPGEKLSGTVGSPFYIAPEVLAGGYNQAADVWSAGVILYILLSGAPPFWGKTKSKIFDAVRAADLRFSAEPWDNITSYAKDLIRGMLCVDPSQRLSADEVLAHSWMEQLSESGQEQYDQDGFGCEGLENGGCSFSTQCVSREQDYSFSVGQLEQSTDNDFKSSFSTFLPADNTLPNSGFDGFSFDGKQPESTTAGFSSTGIPSMPSFTFFCTSPARTQNNDITEIDGKVRDSSPKRLLPSPDSSSQLERRDEAGENQTEAGGKSETRRERGNWSRMSGLHSKRNRTIGLGELDQLVVDVAVTESIIRWASCTHIPTAPSLRLSLVC

SEQ ID NO: 91606 - protein, 437 aa, Arabidopsis thaliana
  peptide (1)..(437): Ceres Seq. ID no. 12728468
MKSIKLEIAIMAKLAGHPNVVNLKAVYEEKDSVHLVMELCAGGELFHKLEKYGRYSEVRARVLFKHLMQVVKFCHDSGIVHRDLKPENILMATMSSSSPIKLADFGLATYIKPGEKLSGTVGSPFYIAPEVLAGGYNQAADVWSAGVILYILLSGAPPFWGKTKSKIFDAVRAADLRFSAEPWDNITSYAKDLIRGMLCVDPSQRLSADEVLAHSWMEQLSESGQEQYDQDGFGCEGLENGGCSFSTQCVSREQDYSFSVGQLEQSTDNDFKSSFSTFLPADNTLPNSGFDGFSFDGKQPESTTAGFSSTGIPSMPSFTFFCTSPARTQNNDITEIDGKVRDSSPKRLLPSPDSSSQLERRDEAGENQTEAGGKSETRRERGNWSRMSGLHSKRNRTIGLGELDQLVVDVAVTESIIRWASCTHIPTAPSLRLSLVC

SEQ ID NO: 91607 - DNA, 630 bp, Arabidopsis thaliana
  misc_feature (1)..(630): Ceres Seq. ID no. 12728473
  misc_feature (1)..(630): Ortholog of  Ceres SEQ ID NO 13661642 as cited in SEQ ID NO 61598
atgaataatgatgatattattctggcggagatgaggcctaagaagcgtgcgggaaggagagtgtttaaggagacacgtcacccagtttacagaggcataaggcggaggaacggtgacaaatgggtctgcgaagtcagagaaccgacgcaccaacgccgcatttggctcgggacttatcccacagcagatatggcagcgcgtgcacacgacgtggcggttttagctctgcgtgggagatccgcatgtttgaatttcgccgactccgcttggcggcttccggtgccggaatccaatgatccggatgtgataagaagagttgcggcggaagctgcggagatgtttaggccggtggatttagaaagtggaattacggttttgccttgtgcgggagatgatgtggatttgggttttggttcgggttccggctctggttcgggatcggaggagaggaattcttcttcgtatggatttggagactacgaagaagtctcaacgacgatgatgagactcgcggaggggccactaatgtcgccgccgcgatcgtatatggaagacatgactcctactaatgtttacacggaagaagagatgtgttatgaagatatgtcattgtggagttacagatattaa

SEQ ID NO: 91608 - protein, 209 aa, Arabidopsis thaliana
  peptide (1)..(209): Ceres Seq. ID no. 12728474
MNNDDIILAEMRPKKRAGRRVFKETRHPVYRGIRRRNGDKWVCEVREPTHQRRIWLGTYPTADMAARAHDVAVLALRGRSACLNFADSAWRLPVPESNDPDVIRRVAAEAAEMFRPVDLESGITVLPCAGDDVDLGFGSGSGSGSGSEERNSSSYGFGDYEEVSTTMMRLAEGPLMSPPRSYMEDMTPTNVYTEEEMCYEDMSLWSYRY

SEQ ID NO: 91609 - protein, 199 aa, Arabidopsis thaliana
  peptide (1)..(199): Ceres Seq. ID no. 12728475
MRPKKRAGRRVFKETRHPVYRGIRRRNGDKWVCEVREPTHQRRIWLGTYPTADMAARAHDVAVLALRGRSACLNFADSAWRLPVPESNDPDVIRRVAAEAAEMFRPVDLESGITVLPCAGDDVDLGFGSGSGSGSGSEERNSSSYGFGDYEEVSTTMMRLAEGPLMSPPRSYMEDMTPTNVYTEEEMCYEDMSLWSYRY

SEQ ID NO: 91610 - protein, 146 aa, Arabidopsis thaliana
  peptide (1)..(146): Ceres Seq. ID no. 12728476
MAARAHDVAVLALRGRSACLNFADSAWRLPVPESNDPDVIRRVAAEAAEMFRPVDLESGITVLPCAGDDVDLGFGSGSGSGSGSEERNSSSYGFGDYEEVSTTMMRLAEGPLMSPPRSYMEDMTPTNVYTEEEMCYEDMSLWSYRY

SEQ ID NO: 91611 - DNA, 567 bp, Arabidopsis thaliana
  misc_feature (1)..(567): Ceres Seq. ID no. 12728481
  misc_feature (1)..(567): Ortholog of  Ceres SEQ ID NO 14306809 as cited in SEQ ID NO 57963
atggcttctgccggcttaggtagccggagaaaggatccggtgtacagaggaatccggtgccgaagtgggaaatgggtctccgagattcgtgagccgaggaaaaccacgagaatctggcttggaacttaccccatggcagagatggcagcagccgcctatgatgtggctgctatggctcttaaaggaagagaagctgtcttgaacttccctggatccgtcgggtcatacccggttcctgaatcaacatccgcagcagatatacgagccgctgcggcagccgcagcagcaatgaagggatgtgaggaaggggaggaggagaaaaaggcaaaggagaagaagagtagtagttcgaagtcgagagcgcgtgagtgccacgtagataatgatgttggatcttcgtcgtggtgtgggacagagttcatggacgaagaagaagtcttgaatatgcctaatctgctggctaatatggcagaagggatgatggttgcgccgccgtcgtggatgggttctcggccgtcggatgactctccggagaattcaaatgatgaggacttgtggggctattga

SEQ ID NO: 91612 - protein, 188 aa, Arabidopsis thaliana
  peptide (1)..(188): Ceres Seq. ID no. 12728482
MASAGLGSRRKDPVYRGIRCRSGKWVSEIREPRKTTRIWLGTYPMAEMAAAAYDVAAMALKGREAVLNFPGSVGSYPVPESTSAADIRAAAAAAAAMKGCEEGEEEKKAKEKKSSSSKSRARECHVDNDVGSSSWCGTEFMDEEEVLNMPNLLANMAEGMMVAPPSWMGSRPSDDSPENSNDEDLWGY

SEQ ID NO: 91613 - protein, 144 aa, Arabidopsis thaliana
  peptide (1)..(144): Ceres Seq. ID no. 12728483
MAEMAAAAYDVAAMALKGREAVLNFPGSVGSYPVPESTSAADIRAAAAAAAAMKGCEEGEEEKKAKEKKSSSSKSRARECHVDNDVGSSSWCGTEFMDEEEVLNMPNLLANMAEGMMVAPPSWMGSRPSDDSPENSNDEDLWGY

SEQ ID NO: 91614 - protein, 141 aa, Arabidopsis thaliana
  peptide (1)..(141): Ceres Seq. ID no. 12728484
MAAAAYDVAAMALKGREAVLNFPGSVGSYPVPESTSAADIRAAAAAAAAMKGCEEGEEEKKAKEKKSSSSKSRARECHVDNDVGSSSWCGTEFMDEEEVLNMPNLLANMAEGMMVAPPSWMGSRPSDDSPENSNDEDLWGY

SEQ ID NO: 91615 - DNA, 1437 bp, Arabidopsis thaliana
  misc_feature (1)..(1437): Ceres Seq. ID no. 12728504
  misc_feature (1)..(1437): Ortholog of  Ceres SEQ ID NO 15176532 as cited in SEQ ID NO 58184
  misc_feature (1)..(1437): Ortholog of  Ceres SEQ ID NO 13597546 as cited in SEQ ID NO 65017
  misc_feature (1)..(1437): Ortholog of  Ceres SEQ ID NO 14307912 as cited in SEQ ID NO 66380
  misc_feature (1)..(1437): Ortholog of  Ceres SEQ ID NO 14308045 as cited in SEQ ID NO 67444
  misc_feature (1)..(1437): Ortholog of  Ceres SEQ ID NO 13654353 as cited in SEQ ID NO 68318
atgtgggcattgctcatttgggtttctttgcttctcataagtatcacacattgggtttatagttggagaaatcctaaatgcagagggaaacttccacctggttccatgggtttccctttactcggcgagagtatccaattcttcaagccaaacaaaacttcagacatccctccttttatcaaagagagagttaagaagtatggcccaattttcaagaccaatctggtggggagaccagttattgtatcaacagatgctgatttgagttattttgtgtttaaccaagagggacgttgtttccagagttggtatccagacacttttacacacatctttgggaagaagaatgtgggttcattacatggtttcatgtacaagtaccttaaaaacatggttttgactctctttggccatgatggtctcaagaagatgcttcctcaagtagaaatgactgccaataagaggttggagctttggtcaaatcaagattcagtagaactcaaagatgcaaccgcaagcatgatatttgatctcaccgcgaagaagttgatcagccatgatccagacaagtcatcagagaatctaagggcaaactttgttgctttcatacagggattgatctctttcccttttgatatcccaggcacagcttatcacaaatgtctacagggtagggcaaaggcaatgaaaatgttgaggaatatgcttcaagagaggcgtgagaaccctcggaagaatccaagtgatttctttgattatgttattgaagagattcagaaagaagggacaattctgacagaagagattgcactggatttgatgtttgtcttgctatttgccagctttgaaacaacttctttggctctaactttagctatcaagtttctctcagatgaccctgaagtcctaaagcgtttaacggaagaacatgagacaattctgagaaaccgggaagatgcagactctggacttacatgggaagaatacaagtcaatgacttacacatttcagttcataaacgaaaccgcgagactagcaaatatagttcctgcaatcttcagaaaggcgttgagagatataaaattcaaagagtttgtcaatgatacagattatacgattccagccggctgggcggtgatggtctgtccaccagctgtacatttgaatcccgaaatgtataaagatcctttagtctttaatccatcaagatgggagggatcaaaagttacaaacgcatcaaagcacttcatggcgtttggtggaggtatgaggttctgcgttggaaccgacttcacaaaattgcagatggctgcgtttcttcacagcttggtaacaaaatacaggtgggaggagataaaaggagggaatataactcgaacgcctggattacagtttccaaatggttaccatgtcaaactccataagaagagagactag

SEQ ID NO: 91616 - protein, 478 aa, Arabidopsis thaliana
  peptide (1)..(478): Ceres Seq. ID no. 12728505
MWALLIWVSLLLISITHWVYSWRNPKCRGKLPPGSMGFPLLGESIQFFKPNKTSDIPPFIKERVKKYGPIFKTNLVGRPVIVSTDADLSYFVFNQEGRCFQSWYPDTFTHIFGKKNVGSLHGFMYKYLKNMVLTLFGHDGLKKMLPQVEMTANKRLELWSNQDSVELKDATASMIFDLTAKKLISHDPDKSSENLRANFVAFIQGLISFPFDIPGTAYHKCLQGRAKAMKMLRNMLQERRENPRKNPSDFFDYVIEEIQKEGTILTEEIALDLMFVLLFASFETTSLALTLAIKFLSDDPEVLKRLTEEHETILRNREDADSGLTWEEYKSMTYTFQFINETARLANIVPAIFRKALRDIKFKEFVNDTDYTIPAGWAVMVCPPAVHLNPEMYKDPLVFNPSRWEGSKVTNASKHFMAFGGGMRFCVGTDFTKLQMAAFLHSLVTKYRWEEIKGGNITRTPGLQFPNGYHVKLHKKRD

SEQ ID NO: 91617 - protein, 443 aa, Arabidopsis thaliana
  peptide (1)..(443): Ceres Seq. ID no. 12728506
MGFPLLGESIQFFKPNKTSDIPPFIKERVKKYGPIFKTNLVGRPVIVSTDADLSYFVFNQEGRCFQSWYPDTFTHIFGKKNVGSLHGFMYKYLKNMVLTLFGHDGLKKMLPQVEMTANKRLELWSNQDSVELKDATASMIFDLTAKKLISHDPDKSSENLRANFVAFIQGLISFPFDIPGTAYHKCLQGRAKAMKMLRNMLQERRENPRKNPSDFFDYVIEEIQKEGTILTEEIALDLMFVLLFASFETTSLALTLAIKFLSDDPEVLKRLTEEHETILRNREDADSGLTWEEYKSMTYTFQFINETARLANIVPAIFRKALRDIKFKEFVNDTDYTIPAGWAVMVCPPAVHLNPEMYKDPLVFNPSRWEGSKVTNASKHFMAFGGGMRFCVGTDFTKLQMAAFLHSLVTKYRWEEIKGGNITRTPGLQFPNGYHVKLHKKRD

SEQ ID NO: 91618 - protein, 355 aa, Arabidopsis thaliana
  peptide (1)..(355): Ceres Seq. ID no. 12728507
MYKYLKNMVLTLFGHDGLKKMLPQVEMTANKRLELWSNQDSVELKDATASMIFDLTAKKLISHDPDKSSENLRANFVAFIQGLISFPFDIPGTAYHKCLQGRAKAMKMLRNMLQERRENPRKNPSDFFDYVIEEIQKEGTILTEEIALDLMFVLLFASFETTSLALTLAIKFLSDDPEVLKRLTEEHETILRNREDADSGLTWEEYKSMTYTFQFINETARLANIVPAIFRKALRDIKFKEFVNDTDYTIPAGWAVMVCPPAVHLNPEMYKDPLVFNPSRWEGSKVTNASKHFMAFGGGMRFCVGTDFTKLQMAAFLHSLVTKYRWEEIKGGNITRTPGLQFPNGYHVKLHKKRD

SEQ ID NO: 91619 - DNA, 1107 bp, Arabidopsis thaliana
  misc_feature (1)..(1107): Ceres Seq. ID no. 12728512
  misc_feature (1)..(1107): Ortholog of  Ceres SEQ ID NO 15169350 as cited in SEQ ID NO 53271
atgtcaacggagactaccacgggaaattcctcgttaattccagcatcatcatcatcgtcatcctccgacgcaatcgatccagctccgttgctttttaacggcgacgataatgaaggaaacaacggaggaggaggtggggaacggagatctgtcaggagacaagggttgagagaagctgcgaggtttcttagtcgtgctagtagcggacgcgtgatgcgtgagccatctatgcttgtgagagaagccgcggcggagcagctcgaggagaggcagagcgattgggcttattcgaagcctgtggtggtgcttgatatcgtttggaatctggcttttgtttctgttgctacggctattttggtgatgagcaggaaagaacatccgattatgccgcttagagtttggcttttggggtatgctttgcaatgcgtgttgcatatggtttgtgtctgtgttgagtatcggaggaggaacaggaggagaaccaataggacgacgacgacgactcctccacggtcacgttcttcttcttcctcttcatcttcttcttccttggaggaagaagctttgggttccaggaggaattcaggtgtgcaggacttgtcgcttggccacttggataccgaaagcagcaggctgtctattgtctttcttggtttcgatgtgttctttgttgtcttctgtgttgcgttggcctgcgttattggaattgcggtttgctgttgcctgccatgcatcattgcagttttgtacgctgttgctgatcaggaaggggcttcaaaagaagacattgagcagctcaccaaattcaagtttcgcaaactaggtgatgccaacaaacacactaatgatgaagcccaaggaactaccgagggaataatgactgagtgtggtacagattcacccattgaacatactcttttgcaagaagatgcagaatgttgcatctgtctctctgcatatgaagacggaacagagctaagggaactaccttgtggacaccatttccactgttcatgcgtagacaaatggctatacatcaacgcgacttgcccactctgcaaatacaacatcctcaagagtagcaacttggatcgagaggaagtctag

SEQ ID NO: 91620 - protein, 368 aa, Arabidopsis thaliana
  peptide (1)..(368): Ceres Seq. ID no. 12728513
MSTETTTGNSSLIPASSSSSSSDAIDPAPLLFNGDDNEGNNGGGGGERRSVRRQGLREAARFLSRASSGRVMREPSMLVREAAAEQLEERQSDWAYSKPVVVLDIVWNLAFVSVATAILVMSRKEHPIMPLRVWLLGYALQCVLHMVCVCVEYRRRNRRRTNRTTTTTPPRSRSSSSSSSSSSLEEEALGSRRNSGVQDLSLGHLDTESSRLSIVFLGFDVFFVVFCVALACVIGIAVCCCLPCIIAVLYAVADQEGASKEDIEQLTKFKFRKLGDANKHTNDEAQGTTEGIMTECGTDSPIEHTLLQEDAECCICLSAYEDGTELRELPCGHHFHCSCVDKWLYINATCPLCKYNILKSSNLDREEV

SEQ ID NO: 91621 - protein, 297 aa, Arabidopsis thaliana
  peptide (1)..(297): Ceres Seq. ID no. 12728514
MREPSMLVREAAAEQLEERQSDWAYSKPVVVLDIVWNLAFVSVATAILVMSRKEHPIMPLRVWLLGYALQCVLHMVCVCVEYRRRNRRRTNRTTTTTPPRSRSSSSSSSSSSLEEEALGSRRNSGVQDLSLGHLDTESSRLSIVFLGFDVFFVVFCVALACVIGIAVCCCLPCIIAVLYAVADQEGASKEDIEQLTKFKFRKLGDANKHTNDEAQGTTEGIMTECGTDSPIEHTLLQEDAECCICLSAYEDGTELRELPCGHHFHCSCVDKWLYINATCPLCKYNILKSSNLDREEV

SEQ ID NO: 91622 - protein, 292 aa, Arabidopsis thaliana
  peptide (1)..(292): Ceres Seq. ID no. 12728515
MLVREAAAEQLEERQSDWAYSKPVVVLDIVWNLAFVSVATAILVMSRKEHPIMPLRVWLLGYALQCVLHMVCVCVEYRRRNRRRTNRTTTTTPPRSRSSSSSSSSSSLEEEALGSRRNSGVQDLSLGHLDTESSRLSIVFLGFDVFFVVFCVALACVIGIAVCCCLPCIIAVLYAVADQEGASKEDIEQLTKFKFRKLGDANKHTNDEAQGTTEGIMTECGTDSPIEHTLLQEDAECCICLSAYEDGTELRELPCGHHFHCSCVDKWLYINATCPLCKYNILKSSNLDREEV

SEQ ID NO: 91623 - DNA, 1002 bp, Arabidopsis thaliana
  misc_feature (1)..(1002): Ceres Seq. ID no. 12728522
  misc_feature (1)..(1002): Ortholog of  Ceres SEQ ID NO 12609041 as cited in SEQ ID NO 51310
  misc_feature (1)..(1002): Ortholog of  Ceres SEQ ID NO 13594966 as cited in SEQ ID NO 56152
  misc_feature (1)..(1002): Ortholog of  Ceres SEQ ID NO 14312140 as cited in SEQ ID NO 57002
  misc_feature (1)..(1002): Ortholog of  Ceres SEQ ID NO 14312224 as cited in SEQ ID NO 57255
  misc_feature (1)..(1002): Ortholog of  Ceres SEQ ID NO 12582457 as cited in SEQ ID NO 57530
tgaatgctcgttggtacaactcctcattcttctccgcaaaaatagcaagttatttaacaaacaaaaaaattcatataaacgattttatttttttgtgacttttgagattcgttaattctggaaaatttgtttattttcaaaacaagaatatggattcgtcataaaagctaggctatgatcaacatgtttcatacaaacaagaacagggcttttcaagaaagtagcattctctgtttctgttgtctcaatcccttttgattttttttgtgttggcagattcatcaaatgtcggttctttcttctcggacaggacgagatcgtcaacgttacgacaacaacttccgtctcgtttctggatgcattccttataggctgatgaaagctgacgaaactgaagaagactcaggtgttgactttgtaaacaaacttgaagttcttatggtttcatctcctaatcgtcatgatcttgtcttcccaaagggaggatgggaagatgatgagactgttcttgaagctgcttctcgtgaagccattgaagaagcaggagttaaaggaatacttagagaacttcctttaggagtttgggaatttagaagcaaaagtagcacagtggaggatgaatgtttaggtggatgtaaaggatatatgtttgcattaaaagttaccgaagaactcgaggattggccagagcgaaagaatcgtgaacgaagatggttgactgttaaagaagcgttggagctttgtcggtatgagtggatgcagagagcacttgaagagtttttgagagtaatggaagatgaaagaagattgagaacagaggaagagacagtgcatgattcttcaaagctagaggaggagagtcaaatagatccttggtactgttttgtagttaactagtttttcatattctttagctaacgtaaacaaattgaaaaaatgagaagtaaagtgactgcaacacatgtgacatgatataatctcaaatcatctgtcttgaatctt

SEQ ID NO: 91624 - protein, 203 aa, Arabidopsis thaliana
  peptide (1)..(203): Ceres Seq. ID no. 12728523
MSVLSSRTGRDRQRYDNNFRLVSGCIPYRLMKADETEEDSGVDFVNKLEVLMVSSPNRHDLVFPKGGWEDDETVLEAASREAIEEAGVKGILRELPLGVWEFRSKSSTVEDECLGGCKGYMFALKVTEELEDWPERKNRERRWLTVKEALELCRYEWMQRALEEFLRVMEDERRLRTEEETVHDSSKLEEESQIDPWYCFVVN

SEQ ID NO: 91625 - protein, 173 aa, Arabidopsis thaliana
  peptide (1)..(173): Ceres Seq. ID no. 12728524
MKADETEEDSGVDFVNKLEVLMVSSPNRHDLVFPKGGWEDDETVLEAASREAIEEAGVKGILRELPLGVWEFRSKSSTVEDECLGGCKGYMFALKVTEELEDWPERKNRERRWLTVKEALELCRYEWMQRALEEFLRVMEDERRLRTEEETVHDSSKLEEESQIDPWYCFVVN

SEQ ID NO: 91626 - protein, 152 aa, Arabidopsis thaliana
  peptide (1)..(152): Ceres Seq. ID no. 12728525
MVSSPNRHDLVFPKGGWEDDETVLEAASREAIEEAGVKGILRELPLGVWEFRSKSSTVEDECLGGCKGYMFALKVTEELEDWPERKNRERRWLTVKEALELCRYEWMQRALEEFLRVMEDERRLRTEEETVHDSSKLEEESQIDPWYCFVVN

SEQ ID NO: 91627 - DNA, 1569 bp, Arabidopsis thaliana
  misc_feature (1)..(1569): Ceres Seq. ID no. 12728530
  misc_feature (1)..(1569): Ortholog of  Ceres SEQ ID NO 13660287 as cited in SEQ ID NO 67316
atggagaaagataatgacttcaaggatccgtttctggcgtcaactgaggaggaggagctcgacccggcgacccaaaaagcattgatggagtatcttggagtcggaagcagagcatcttctcttgtctccttctcctctaccgccgtcgatatccctccaatctccggtgtcggagactttgtcagagagtttagaatcgagtctagaaagctatggaaactagctggccctgccatttttacaacgatgagccaatactctctcggagccgtcactcaagttttcgccggacatattagcactcttgctcttgccgccgtctccattgagaactccgtcatcgccggcttttcatttggtatcatgcttggaatgggaagtgcgttggaaacgctatgcggacaagcgtttggagcagggaaagtatcaatgcttggcgtttacttacaacgctcgtgggttattctaagcgtaaccgctctcttcctttctctaatctatatcttcgcggctccaatcctgacctttataggccaaaccgctgcaatctcggccatggcagggattttctccatttacatgatcccacaaatctttgcctacgctatcaacttcccaacggcgaagtttttgcaatcacaaagcaagatcatggtcatggctggaatatccggtgtggttcttgtgatccatagtttcttcacgtggctagtcatgtctaggttacactggggacttcctggtttagctttagtgcttaacacgtcgtggtgggtcatcgttgttgcacaacttgtgtatatctttaattgtacgtgtggagaggcttggtctggatttacgtgggaggcttttcacaatttgtgggggtttgttaaattgtctttggcttctgctgccatgctctgtttggagatttggtattttatggcactcgtattatttgctggatatttgaagaatgctgaagtctccgtagctgcactctccatatgcatgaacattttgggatgggcagctatggttgcgtttgggacaaacgcagcagtaagtgtgagagtgtcaaatgagctaggagctagccacccaagaacggccaagttttctctagttgtggctgtgatattgtcgacagcaattgggatgtttatagcagccggcctactcttcttccgcaatgagtacccggttttgtttgtggaagatgaagaagttagaaatgtggttagagaactcacgccaatgcttgccttttgcattgtcatcaacaatgttcaacctgtattgtctggagtggctgtgggagcgggatggcaagcagttgtagcgtatgtgaacatagcatgctactacttgttcggagtcccatttggtctattattgggatttaagcttgaatatggagtaatgggaatttggtgggggatggtgacgggaacttttgttcaatcgatagtcctgacttggatgatctgcaaaaccaattgggagaaagaggcttcaatggcagaggaaaggataaaagaatggggaggagtacctgcagagaaagagactcttttgaactag

SEQ ID NO: 91628 - protein, 522 aa, Arabidopsis thaliana
  peptide (1)..(522): Ceres Seq. ID no. 12728531
MEKDNDFKDPFLASTEEEELDPATQKALMEYLGVGSRASSLVSFSSTAVDIPPISGVGDFVREFRIESRKLWKLAGPAIFTTMSQYSLGAVTQVFAGHISTLALAAVSIENSVIAGFSFGIMLGMGSALETLCGQAFGAGKVSMLGVYLQRSWVILSVTALFLSLIYIFAAPILTFIGQTAAISAMAGIFSIYMIPQIFAYAINFPTAKFLQSQSKIMVMAGISGVVLVIHSFFTWLVMSRLHWGLPGLALVLNTSWWVIVVAQLVYIFNCTCGEAWSGFTWEAFHNLWGFVKLSLASAAMLCLEIWYFMALVLFAGYLKNAEVSVAALSICMNILGWAAMVAFGTNAAVSVRVSNELGASHPRTAKFSLVVAVILSTAIGMFIAAGLLFFRNEYPVLFVEDEEVRNVVRELTPMLAFCIVINNVQPVLSGVAVGAGWQAVVAYVNIACYYLFGVPFGLLLGFKLEYGVMGIWWGMVTGTFVQSIVLTWMICKTNWEKEASMAEERIKEWGGVPAEKETLLN

SEQ ID NO: 91629 - protein, 494 aa, Arabidopsis thaliana
  peptide (1)..(494): Ceres Seq. ID no. 12728532
MEYLGVGSRASSLVSFSSTAVDIPPISGVGDFVREFRIESRKLWKLAGPAIFTTMSQYSLGAVTQVFAGHISTLALAAVSIENSVIAGFSFGIMLGMGSALETLCGQAFGAGKVSMLGVYLQRSWVILSVTALFLSLIYIFAAPILTFIGQTAAISAMAGIFSIYMIPQIFAYAINFPTAKFLQSQSKIMVMAGISGVVLVIHSFFTWLVMSRLHWGLPGLALVLNTSWWVIVVAQLVYIFNCTCGEAWSGFTWEAFHNLWGFVKLSLASAAMLCLEIWYFMALVLFAGYLKNAEVSVAALSICMNILGWAAMVAFGTNAAVSVRVSNELGASHPRTAKFSLVVAVILSTAIGMFIAAGLLFFRNEYPVLFVEDEEVRNVVRELTPMLAFCIVINNVQPVLSGVAVGAGWQAVVAYVNIACYYLFGVPFGLLLGFKLEYGVMGIWWGMVTGTFVQSIVLTWMICKTNWEKEASMAEERIKEWGGVPAEKETLLN

SEQ ID NO: 91630 - protein, 440 aa, Arabidopsis thaliana
  peptide (1)..(440): Ceres Seq. ID no. 12728533
MSQYSLGAVTQVFAGHISTLALAAVSIENSVIAGFSFGIMLGMGSALETLCGQAFGAGKVSMLGVYLQRSWVILSVTALFLSLIYIFAAPILTFIGQTAAISAMAGIFSIYMIPQIFAYAINFPTAKFLQSQSKIMVMAGISGVVLVIHSFFTWLVMSRLHWGLPGLALVLNTSWWVIVVAQLVYIFNCTCGEAWSGFTWEAFHNLWGFVKLSLASAAMLCLEIWYFMALVLFAGYLKNAEVSVAALSICMNILGWAAMVAFGTNAAVSVRVSNELGASHPRTAKFSLVVAVILSTAIGMFIAAGLLFFRNEYPVLFVEDEEVRNVVRELTPMLAFCIVINNVQPVLSGVAVGAGWQAVVAYVNIACYYLFGVPFGLLLGFKLEYGVMGIWWGMVTGTFVQSIVLTWMICKTNWEKEASMAEERIKEWGGVPAEKETLLN

SEQ ID NO: 91631 - DNA, 1637 bp, Arabidopsis thaliana
  misc_feature (1)..(1637): Ceres Seq. ID no. 12728534
  misc_feature (1)..(1637): Ortholog of  Ceres SEQ ID NO 14315279 as cited in SEQ ID NO 52534
  misc_feature (1)..(1637): Ortholog of  Ceres SEQ ID NO 12583190 as cited in SEQ ID NO 56386
aatttcgtttctttccttcttcactcgttaaattttcgtttaatcagacatcgatctcaaaagctctcatcttcaatctcattgagaatggatcatgatctcgagatcttccctttactctcctacgtcctccaccattccgatcccgcttctcacgcgccaccgtctctagcgattcagcaatctcttgcgaatcgttatccccttctcaccaatccttatgtaatctcctcgttgattgaatcaattcccagtacaatcacgcagacccttttcgtatttggctctcttgggccacgacctgatcctttagctgtctcttctgctcggtctaagatccgagagatcaaagagaatgattctttatcgccggaagatgcggctaaggaagagcaggtttacgctgcggttgtgagtttagaggaagttcatgaaggatatgagaagcagttaagagatttggaggaggagattggtagggtttatgcttcggcggttgaatcattgagcggtggtgatgaagtgaatgaggaggttttagcggtgattaaagacgctgaagatggtggagtcgttgaaaggattgatctttctgatcatgagcttaagcttcttcctgatgctttagggaaaatcgtcggtttggtttcactgaatgtctctcgtaacaatctcaggtttctacctgatacaatctcaggacttgagaaactggaggagctagatttatcttcaaaccgtctcgtgtttcttcccgactctattggactgttacttaatttgaggatcttaaatgtgacggggaacaagctaactttactcccagaaagcattgcgcaatgcaggtcactggtagagttagatgccagcttcaacaacttgacttctttgcctgcaaacttcggatacggattactcaatctcgaaaggctatcgatccagctgaacaaaatccgtttcttccccaattccatatgtgagatgcgttctctaaggtatctcgacgcacacatgaacgaaatccacggccttccaatcgctatagggagactcacaaaccttgaagtcatgaacttgagcagcaacttcagcgacttgattgaacttcctgacacaatctctgatttagctaacttgagggagctagatctcagcaacaaccagatcagagtcttgcctgactcgtttttcaggctggagaagctggagaaactgaacttggaccagaaccctttggagtatcccccacaagagatggttaaccaaagcgctgaagcagttcgagagttcatgaggaagaggtgggaagagatggtggaggaagagcaattgaggagtgtgattgaagctgagaagcaacaaggaggagcaacaggttggctctcatgggggagctccattgttactagccttttctctggaggtactcatggtggtgcagctaagaagcctaaaaactcatttttggatgaacagctctgatttttttttttttggctttactatatctagctagctttgacgttttttagaaaaagaaaaaaatccggagtttggacgtttgacttgactgtatttcaatgggcctttaataacccttctgaggcccatcttggggttatgtttgggtaacatta

SEQ ID NO: 91632 - protein, 493 aa, Arabidopsis thaliana
  peptide (1)..(493): Ceres Seq. ID no. 12728535
NFVSFLLHSLNFRLIRHRSQKLSSSISLRMDHDLEIFPLLSYVLHHSDPASHAPPSLAIQQSLANRYPLLTNPYVISSLIESIPSTITQTLFVFGSLGPRPDPLAVSSARSKIREIKENDSLSPEDAAKEEQVYAAVVSLEEVHEGYEKQLRDLEEEIGRVYASAVESLSGGDEVNEEVLAVIKDAEDGGVVERIDLSDHELKLLPDALGKIVGLVSLNVSRNNLRFLPDTISGLEKLEELDLSSNRLVFLPDSIGLLLNLRILNVTGNKLTLLPESIAQCRSLVELDASFNNLTSLPANFGYGLLNLERLSIQLNKIRFFPNSICEMRSLRYLDAHMNEIHGLPIAIGRLTNLEVMNLSSNFSDLIELPDTISDLANLRELDLSNNQIRVLPDSFFRLEKLEKLNLDQNPLEYPPQEMVNQSAEAVREFMRKRWEEMVEEEQLRSVIEAEKQQGGATGWLSWGSSIVTSLFSGGTHGGAAKKPKNSFLDEQL

SEQ ID NO: 91633 - protein, 464 aa, Arabidopsis thaliana
  peptide (1)..(464): Ceres Seq. ID no. 12728536
MDHDLEIFPLLSYVLHHSDPASHAPPSLAIQQSLANRYPLLTNPYVISSLIESIPSTITQTLFVFGSLGPRPDPLAVSSARSKIREIKENDSLSPEDAAKEEQVYAAVVSLEEVHEGYEKQLRDLEEEIGRVYASAVESLSGGDEVNEEVLAVIKDAEDGGVVERIDLSDHELKLLPDALGKIVGLVSLNVSRNNLRFLPDTISGLEKLEELDLSSNRLVFLPDSIGLLLNLRILNVTGNKLTLLPESIAQCRSLVELDASFNNLTSLPANFGYGLLNLERLSIQLNKIRFFPNSICEMRSLRYLDAHMNEIHGLPIAIGRLTNLEVMNLSSNFSDLIELPDTISDLANLRELDLSNNQIRVLPDSFFRLEKLEKLNLDQNPLEYPPQEMVNQSAEAVREFMRKRWEEMVEEEQLRSVIEAEKQQGGATGWLSWGSSIVTSLFSGGTHGGAAKKPKNSFLDEQL

SEQ ID NO: 91634 - DNA, 1785 bp, Arabidopsis thaliana
  misc_feature (1)..(1785): Ceres Seq. ID no. 12728541
  misc_feature (1)..(1785): Ortholog of  Ceres SEQ ID NO 14303423 as cited in SEQ ID NO 54243
  misc_feature (1)..(1785): Ortholog of  Ceres SEQ ID NO 12611314 as cited in SEQ ID NO 56535
  misc_feature (1)..(1785): Ortholog of  Ceres SEQ ID NO 13661438 as cited in SEQ ID NO 61414
aaaaaaaaaatctcagtcaagttcgtccgaaagttttcaacgacgacggctttttagagatttgattcgtttcactcttctgggtattgattttcttccttaaatttgcatcctttttaacgtttatccaacgatcttgctccgttactgaaactctgtttctccgttgcttctctcgtctcatttattgttcgtaacgtgattttactacttctgttactcgagtagagattacccttcttatgtccgaatctgattcgtcgtctttaagctttgtcttctcccaattagctcaaagttcgtaactttgtttacttgccaataagaaatttccagagactgaagtttccattgaatgtattgttcttggagaacttaaccggattcaggacatggctaaccgaacagacaactcgaatcgctgttcgaatggtaaaaagccaaatgatggaatgagactcattatagcgacattcgtaggaatagttgtcggtttcttcttggggatatctttccctacactatcactaacaaaactaaattttccctctggcattcttccctctgttgatattacttacgtagaagatgagacaccagaaacatcgagtgaaacgcttttgcatacatggtcatctaggggtccgttacatggggctaattcaagtgatgcaccgcattggaagatttgggttccatcgaatccccgaggtgcagagatgctgactcctggtatcattgcacctgaatcagattactacttacgcagactttggggattacctgaggaggatgttcctgtgaagccaaagtatctcattgcgtttactgtcggttttggtcagaaagtgaacgttgatgcttgtgtcaagaagttttcaaaagattttacaattgttctattccactacgacggacgaaccacagaatgggaagaattagaatggtccaaacgcgcaatacacgtgagcgtgccaaagcaaaccaaatggtggtatgctaaaaggtttctgcatcctgacattgtggcaccttatgactatgtattcatctgggatgaagacctcggccttgaaaacttcgatgtagaagagtacatcaggcttataaagaaacacggtctagagatatcgcagcctgctgttgagtctaagaaaaagatcacatgggagataacaaagagaaaaaccaaaggagaagttcacaaagatgcgaaggagaaaccaggtcgatgcaatgaccctcacttgcctccctgtgcagcgtttatagagattatggctccagtattctcaagagatgcatggcgttgcgtgtggcatatgattcagaacgatttggttcacggttggggtcttgatttcgcactccgtaaatgcgttgagcctgcacatgagaagataggagttgtggattctcaatggatcatacatcaatctcttccttctttaggcagccagggagaggcacaagacggtaaagcagggtggcaaggggtgagagacagatgtaaacgggaatggacaatgttccaaagccgaatggctagttccgagaagcagtatctcaaggaaatcgcaaactcaacgattcattagctgaagaaactaaacaaatagaaagacaagtgaaggattatacaatgacatggtagagtccagaaatgtttacgagtgttcatacgatgattatgcaaatccaagttatattgttcatatgataactaagcaactatacacaggacacaattttttacagaaactattagagatcatttttgtcgtt

SEQ ID NO: 91635 - protein, 401 aa, Arabidopsis thaliana
  peptide (1)..(401): Ceres Seq. ID no. 12728542
MANRTDNSNRCSNGKKPNDGMRLIIATFVGIVVGFFLGISFPTLSLTKLNFPSGILPSVDITYVEDETPETSSETLLHTWSSRGPLHGANSSDAPHWKIWVPSNPRGAEMLTPGIIAPESDYYLRRLWGLPEEDVPVKPKYLIAFTVGFGQKVNVDACVKKFSKDFTIVLFHYDGRTTEWEELEWSKRAIHVSVPKQTKWWYAKRFLHPDIVAPYDYVFIWDEDLGLENFDVEEYIRLIKKHGLEISQPAVESKKKITWEITKRKTKGEVHKDAKEKPGRCNDPHLPPCAAFIEIMAPVFSRDAWRCVWHMIQNDLVHGWGLDFALRKCVEPAHEKIGVVDSQWIIHQSLPSLGSQGEAQDGKAGWQGVRDRCKREWTMFQSRMASSEKQYLKEIANSTIH

SEQ ID NO: 91636 - protein, 381 aa, Arabidopsis thaliana
  peptide (1)..(381): Ceres Seq. ID no. 12728543
MRLIIATFVGIVVGFFLGISFPTLSLTKLNFPSGILPSVDITYVEDETPETSSETLLHTWSSRGPLHGANSSDAPHWKIWVPSNPRGAEMLTPGIIAPESDYYLRRLWGLPEEDVPVKPKYLIAFTVGFGQKVNVDACVKKFSKDFTIVLFHYDGRTTEWEELEWSKRAIHVSVPKQTKWWYAKRFLHPDIVAPYDYVFIWDEDLGLENFDVEEYIRLIKKHGLEISQPAVESKKKITWEITKRKTKGEVHKDAKEKPGRCNDPHLPPCAAFIEIMAPVFSRDAWRCVWHMIQNDLVHGWGLDFALRKCVEPAHEKIGVVDSQWIIHQSLPSLGSQGEAQDGKAGWQGVRDRCKREWTMFQSRMASSEKQYLKEIANSTIH

SEQ ID NO: 91637 - protein, 292 aa, Arabidopsis thaliana
  peptide (1)..(292): Ceres Seq. ID no. 12728544
MLTPGIIAPESDYYLRRLWGLPEEDVPVKPKYLIAFTVGFGQKVNVDACVKKFSKDFTIVLFHYDGRTTEWEELEWSKRAIHVSVPKQTKWWYAKRFLHPDIVAPYDYVFIWDEDLGLENFDVEEYIRLIKKHGLEISQPAVESKKKITWEITKRKTKGEVHKDAKEKPGRCNDPHLPPCAAFIEIMAPVFSRDAWRCVWHMIQNDLVHGWGLDFALRKCVEPAHEKIGVVDSQWIIHQSLPSLGSQGEAQDGKAGWQGVRDRCKREWTMFQSRMASSEKQYLKEIANSTIH

SEQ ID NO: 91638 - DNA, 2165 bp, Arabidopsis thaliana
  misc_feature (1)..(2165): Ceres Seq. ID no. 12728545
  misc_feature (1)..(2165): Ortholog of  Ceres SEQ ID NO 14305215 as cited in SEQ ID NO 0
ggctttcagtttctccccttctccttcttctccgtctttggagctcaacaggggtttaaggattttctccgaaagctcaaaacttgagtgaaatttctctcattttacttatctgaagttcgtctacgatggaggaagagaaggtgagggttcgtctggtgtttgaagaccgacggattctgagtaagtatcaaaagaagcaaggtttaacacggagctgggttgttctaaatcgtaaatgtcaccgaactatatcagagttttctgatcatatctttcacacatttagcctctgtgaagcgtgtcctcatggcctctctctatctatggaaggtttcgttttgccacctttcgagtccagctgtgtattgaaggataaagatatcgtttgtgttaagaagaagaaagagtctttgttggagattgttggggaagacagtgatgagaatgtttacaacgctattgaggttgaggaaaggcctcagattcgtcctggtgaaatgctgcttgctaatgaggaattccagaaggaaactggaggatatgaaagtgagtctgaggaagatgagcttgaagaggaagcagaagagtttgtgccagagaagaaggcttcgaagaaacgtaaaacttcaagcaaaaaccagagcaccaagaggaagaagtgtaagttagatactactgaagaatctcccgacgaaagagaaaacacagctgttgttagcaatgttgtgaagaagaagaagaagaagaaatcattggatgtacaaagtgctaacaatgatgaacagaataacgatagtaccaaacccatgaccaaatcaaagaggtcatcacaacaagaagagagcaaagagcataacgatctgtgccaactatctgctgaaactaaaaagacacctagcagaagtgcccgacgtaaaaaggcgaaacggcaatggctgagagagaaaacaaaactagagaaggaagagcttctacagacgcagttggttgtagcacccagccaaaaaccagtcatcactatagatcaccaagcaaccaaggaaaagcactgtgaaactcttgaaaatcaacaggcagaagaagttagtgatggtttcggggatgaagttgtacctgtggaagtgaggccaggccacatacgcttcaagcctctcgctggaacagatgaagcctctcttgatagtgaacctcttgtggaaaatgtcttgtggaatggaaacatgacgaagaagaagggacagaaatggggcacagagaagtcagggttttccaaacgatatgctcaggattttaatgaagatgctacgacacagcccgctgaagcagagacacttgctaattgtccgattgattatgaacagcttgtggcttacactggctcagtaaagaaaggagatgttattgcataccgcctcattgagttaacatcatcttggacacccgaggtttcctcttttcgggttgggaagataagctactatgatccagactccaagatggtgactttgatgcctgttcaagaatttccaatcgagaaaaagacagaagaggacgacgatttctgtatgcaacctgatacatctctttataaagaagatggatccctggagatagaattttctgctctgctcgatgttcgcagtgtcaaaactagcagctcagattctgcagaagtcgccaagtcagcactgcccgagcctgaccagtcagctaaaaagccaaagctaagcgcaaacaaagaattgcaaacccctgcaaaagaaaatggagaagtgagcccttgggaagaactaagtgaagctttaagtgcaaagaaagcagcgttgtctcaggccaacaatgggtggaacaagaaagggagttcaagtggaggctcatggtcttacaaggcactgcgaggcagtgctatgggtcctgtaatgaactatctcagatctcagaaagagatttgagaaactaggtcacatctctctagaagaaactctgctgcttttgtcttcattttggatatgaaaaactcagacaaagggtagagaaagccattttgtttttgatgctgtaaacgcacagtttagctttctaaggttaaaggtttatgtatagagaaaaacgatgaatgtgtaatactctctcaagatctttttgaatttcacgtttgaatc

SEQ ID NO: 91639 - protein, 608 aa, Arabidopsis thaliana [sequence omitted]

SEQ ID NO: 91640 - protein, 542 aa, Arabidopsis thaliana
  peptide (1)..(542): Ceres Seq. ID no. 12728547
MEGFVLPPFESSCVLKDKDIVCVKKKKESLLEIVGEDSDENVYNAIEVEERPQIRPGEMLLANEEFQKETGGYESESEEDELEEEAEEFVPEKKASKKRKTSSKNQSTKRKKCKLDTTEESPDERENTAVVSNVVKKKKKKKSLDVQSANNDEQNNDSTKPMTKSKRSSQQEESKEHNDLCQLSAETKKTPSRSARRKKAKRQWLREKTKLEKEELLQTQLVVAPSQKPVITIDHQATKEKHCETLENQQAEEVSDGFGDEVVPVEVRPGHIRFKPLAGTDEASLDSEPLVENVLWNGNMTKKKGQKWGTEKSGFSKRYAQDFNEDATTQPAEAETLANCPIDYEQLVAYTGSVKKGDVIAYRLIELTSSWTPEVSSFRVGKISYYDPDSKMVTLMPVQEFPIEKKTEEDDDFCMQPDTSLYKEDGSLEIEFSALLDVRSVKTSSSDSAEVAKSALPEPDQSAKKPKLSANKELQTPAKENGEVSPWEELSEALSAKKAALSQANNGWNKKGSSSGGSWSYKALRGSAMGPVMNYLRSQKEI

SEQ ID NO: 91641 - protein, 484 aa, Arabidopsis thaliana
  peptide (1)..(484): Ceres Seq. ID no. 12728548
MLLANEEFQKETGGYESESEEDELEEEAEEFVPEKKASKKRKTSSKNQSTKRKKCKLDTTEESPDERENTAVVSNVVKKKKKKKSLDVQSANNDEQNNDSTKPMTKSKRSSQQEESKEHNDLCQLSAETKKTPSRSARRKKAKRQWLREKTKLEKEELLQTQLVVAPSQKPVITIDHQATKEKHCETLENQQAEEVSDGFGDEVVPVEVRPGHIRFKPLAGTDEASLDSEPLVENVLWNGNMTKKKGQKWGTEKSGFSKRYAQDFNEDATTQPAEAETLANCPIDYEQLVAYTGSVKKGDVIAYRLIELTSSWTPEVSSFRVGKISYYDPDSKMVTLMPVQEFPIEKKTEEDDDFCMQPDTSLYKEDGSLEIEFSALLDVRSVKTSSSDSAEVAKSALPEPDQSAKKPKLSANKELQTPAKENGEVSPWEELSEALSAKKAALSQANNGWNKKGSSSGGSWSYKALRGSAMGPVMNYLRSQKEI

SEQ ID NO: 91642 - DNA, 1620 bp, Arabidopsis thaliana
  misc_feature (1)..(1620): Ceres Seq. ID no. 12728556
  misc_feature (1)..(1620): Ortholog of  Ceres SEQ ID NO 13594209 as cited in SEQ ID NO 59089
  misc_feature (1)..(1620): Ortholog of  Ceres SEQ ID NO 14313084 as cited in SEQ ID NO 59183
  misc_feature (1)..(1620): Ortholog of  Ceres SEQ ID NO 14308041 as cited in SEQ ID NO 62601
  misc_feature (1)..(1620): Ortholog of  Ceres SEQ ID NO 14307995 as cited in SEQ ID NO 63970
  misc_feature (1)..(1620): Ortholog of  Ceres SEQ ID NO 14303546 as cited in SEQ ID NO 64893
  misc_feature (1)..(1620): Ortholog of  Ceres SEQ ID NO 15176091 as cited in SEQ ID NO 65733
  misc_feature (1)..(1620): Ortholog of  Ceres SEQ ID NO 14308007 as cited in SEQ ID NO 65760
  misc_feature (1)..(1620): Ortholog of  Ceres SEQ ID NO 14308027 as cited in SEQ ID NO 65826
  misc_feature (1)..(1620): Ortholog of  Ceres SEQ ID NO 15170163 as cited in SEQ ID NO 66262
  misc_feature (1)..(1620): Ortholog of  Ceres SEQ ID NO 13502874 as cited in SEQ ID NO 66298
  misc_feature (1)..(1620): Ortholog of  Ceres SEQ ID NO 15169631 as cited in SEQ ID NO 67173
  misc_feature (1)..(1620): Ortholog of  Ceres SEQ ID NO 12614124 as cited in SEQ ID NO 68392
gaaaaacaaaaatgacgatcttgctctgtttcttcttagtttcacttcttactatcgtatcatcaatctttcttaaacagaataaaacctcaaaattcaatcttcccccaagcccttcaagccttccgatcattggaaacttacaccatctcgcaggattgcctcacagatgttttcataagctctctatcaaatacggacccttggtctttcttcgtctcgggtctgttccggttgttgtgatctcatcgagtgaagcagctgaagcagttctcaaaaccaatgacttggaatgttgcagccgaccaaagacggtggggagcggaaaactctcttacggtttcaaagacatcactttcgcaccatacggtgagtattggcgagaagtgcgaaaactcgcggttatcgagctttttagctctaaaaaggttcaatctttcaggtatataagagaggaagaggtcgacttcgtggtcaagaaagtgtcagaatcagctttgaagcaatctcctgtggatttaagcaaaacctttttctccctcaccgctagtatcatttgtagagtcgccttaggacagaatttcaatgaaagcggctttgttatcgatcaagacaggatcgaagaacttgttaccgaatcagcagaagctctagggactttcactttctctgacttcttccctggtggacttggaagatttgtagattggttgtttcaacgacacaagaagatcaacaaagtctttaaggaacttgatgctttttatcagcatgtgattgatgatcacttgaagccagagggaagaaagaatcaagatattgtcaccttgattttggatatgatcgataaacaagaagattcagattctttcaaactcaacatggataatctcaaggcaattgtcatggatgtatttctcgcggggatagatacaagcgcggtaacaatgatttgggcgatgacagaacttattagaaaccctagagtgatgaagaaggctcaagaaagtattcgaaccactctgggtctcaagaaggaaagaatcactgaagaagatttaggcaaagttgagtatttgaaccacatactcaaggaaacttttaggttacacccggcacttccatttgtggtgccaagggaaacaatgtctcacatcaagatccaaggctatgatattccaccgaaaacacaaatccagcttaacgtgtggacgatcggacgtgaccctaagcgttggaatgaccctgaagaattcaaccctgaaaggtttgcaaatagctctgtagattttagaggacaacattttgacctattaccgtttggttctggtcgaaggatttgtcccggaatgccaatggcgattgctagtgtggaactagcattgatgaatttgctttattattttgattggagtatgcctgatgggactaaaggtgaagacattgatatggaagaagctggtaatatctctattgtcaagaaaatacctcttcaacttgtgcctgttcaacgttattgatgagcaataatataagctcgataacatggaaagtgtatgaagcaaaaaacataagattctttagattttgttgtgttatataagaaagaaatgttccaat

SEQ ID NO: 91643 - protein, 505 aa, Arabidopsis thaliana
  peptide (1)..(505): Ceres Seq. ID no. 12728557
KTKMTILLCFFLVSLLTIVSSIFLKQNKTSKFNLPPSPSSLPIIGNLHHLAGLPHRCFHKLSIKYGPLVFLRLGSVPVVVISSSEAAEAVLKTNDLECCSRPKTVGSGKLSYGFKDITFAPYGEYWREVRKLAVIELFSSKKVQSFRYIREEEVDFVVKKVSESALKQSPVDLSKTFFSLTASIICRVALGQNFNESGFVIDQDRIEELVTESAEALGTFTFSDFFPGGLGRFVDWLFQRHKKINKVFKELDAFYQHVIDDHLKPEGRKNQDIVTLILDMIDKQEDSDSFKLNMDNLKAIVMDVFLAGIDTSAVTMIWAMTELIRNPRVMKKAQESIRTTLGLKKERITEEDLGKVEYLNHILKETFRLHPALPFVVPRETMSHIKIQGYDIPPKTQIQLNVWTIGRDPKRWNDPEEFNPERFANSSVDFRGQHFDLLPFGSGRRICPGMPMAIASVELALMNLLYYFDWSMPDGTKGEDIDMEEAGNISIVKKIPLQLVPVQRY

SEQ ID NO: 91644 - protein, 502 aa, Arabidopsis thaliana
  peptide (1)..(502): Ceres Seq. ID no. 12728558
MTILLCFFLVSLLTIVSSIFLKQNKTSKFNLPPSPSSLPIIGNLHHLAGLPHRCFHKLSIKYGPLVFLRLGSVPVVVISSSEAAEAVLKTNDLECCSRPKTVGSGKLSYGFKDITFAPYGEYWREVRKLAVIELFSSKKVQSFRYIREEEVDFVVKKVSESALKQSPVDLSKTFFSLTASIICRVALGQNFNESGFVIDQDRIEELVTESAEALGTFTFSDFFPGGLGRFVDWLFQRHKKINKVFKELDAFYQHVIDDHLKPEGRKNQDIVTLILDMIDKQEDSDSFKLNMDNLKAIVMDVFLAGIDTSAVTMIWAMTELIRNPRVMKKAQESIRTTLGLKKERITEEDLGKVEYLNHILKETFRLHPALPFVVPRETMSHIKIQGYDIPPKTQIQLNVWTIGRDPKRWNDPEEFNPERFANSSVDFRGQHFDLLPFGSGRRICPGMPMAIASVELALMNLLYYFDWSMPDGTKGEDIDMEEAGNISIVKKIPLQLVPVQRY

SEQ ID NO: 91645 - DNA, 1473 bp, Arabidopsis thaliana
  misc_feature (1)..(1473): Ceres Seq. ID no. 12728559
  misc_feature (1)..(1473): Ortholog of  Ceres SEQ ID NO 13594209 as cited in SEQ ID NO 59089
  misc_feature (1)..(1473): Ortholog of  Ceres SEQ ID NO 13502874 as cited in SEQ ID NO 66298
  misc_feature (1)..(1473): Ortholog of  Ceres SEQ ID NO 12614124 as cited in SEQ ID NO 68392
atggcaatcatcctctgtttcctcattctcttaccccttatcttaatcttcttgaaaaaactcaaacattcgaaatggaagcttcctccggggccaccaaagcttccgttcattggaaacttacaccaactccaagaactacctcccaggaatctcaaccacaagtacgggccagtgatacttctccgtttcggattcgtccccttggtcgtgatctcatctaaagaagcagcagaggaagttctcaagattcacgatcttgaatgttgtagccgaccagagacggccgggactagaaagatctcttacaactttaaagacatcggattcgcgccttacggtgaggaatggaaggccatgcgaaagctctcggtggtcgaactcttcaccgccaaaaaacatcagtattttaggtctatcagagaggaagagaatgacttgttggtcaagaaactaacagaattggctctgacacgatccccggtgaatttgaagaagacccttttcactttagtcgggagtattgtgtgtcggatcggattcgggtttaatcttcatgagtgtgagttcatcgatgaaaatagcatctccgaccttgttgacaagtctgagatacttgagatgacttctatgttctctgatttctttccaggaggaatcggtagattcatcgattggatctccggtcaaaacaagcgattcgataatgttttctcggacctcgacactttctttcaaaacattcttgattatcatcttaagcctggaagaaaagtagcagatagctctgatataatcgacgtggtgatcaacatgataaagaagcaagagaaagatggagactctttcaagctcacaacggatcatcttaaagggatgatctcggacatatttctagctggagttagcacaagtgcctccacactgatatgggcgataacagagttagttaggaaccgtaaagtgatgaagaaagtgcaagaagagattaggacaacactcggagacaagaaggagagaatcacagagcaagatctcaccaatctccattacttcaagcttgtggtcaaagagatattcagattacacccagcagttccatttttgctaccaagagagacattatctcatgtcaagattcaaggctacgacattcccgccaaaacccagatcatgatcaacgtctatgcgattgctcgcgatccaaaactttggacaaacccagatgagtttaaccctgacaggttcctagacagttccatagattacaaaggactaaattttgaactgttaccgtttgggtctggtaggagaatctgtccaggaatgacgatgggaatcacacttgttgaatttgctttattgaatttgctttacttctttgattggggtttgccggagaaggaagaggcggacaagatcatcaccggcaatggagttgctgttggcctagttcaagttcttctccactga

SEQ ID NO: 91646 - protein, 490 aa, Arabidopsis thaliana
  peptide (1)..(490): Ceres Seq. ID no. 12728560
MAIILCFLILLPLILIFLKKLKHSKWKLPPGPPKLPFIGNLHQLQELPPRNLNHKYGPVILLRFGFVPLVVISSKEAAEEVLKIHDLECCSRPETAGTRKISYNFKDIGFAPYGEEWKAMRKLSVVELFTAKKHQYFRSIREEENDLLVKKLTELALTRSPVNLKKTLFTLVGSIVCRIGFGFNLHECEFIDENSISDLVDKSEILEMTSMFSDFFPGGIGRFIDWISGQNKRFDNVFSDLDTFFQNILDYHLKPGRKVADSSDIIDVVINMIKKQEKDGDSFKLTTDHLKGMISDIFLAGVSTSASTLIWAITELVRNRKVMKKVQEEIRTTLGDKKERITEQDLTNLHYFKLVVKEIFRLHPAVPFLLPRETLSHVKIQGYDIPAKTQIMINVYAIARDPKLWTNPDEFNPDRFLDSSIDYKGLNFELLPFGSGRRICPGMTMGITLVEFALLNLLYFFDWGLPEKEEADKIITGNGVAVGLVQVLLH

SEQ ID NO: 91647 - protein, 371 aa, Arabidopsis thaliana
  peptide (1)..(371): Ceres Seq. ID no. 12728561
MRKLSVVELFTAKKHQYFRSIREEENDLLVKKLTELALTRSPVNLKKTLFTLVGSIVCRIGFGFNLHECEFIDENSISDLVDKSEILEMTSMFSDFFPGGIGRFIDWISGQNKRFDNVFSDLDTFFQNILDYHLKPGRKVADSSDIIDVVINMIKKQEKDGDSFKLTTDHLKGMISDIFLAGVSTSASTLIWAITELVRNRKVMKKVQEEIRTTLGDKKERITEQDLTNLHYFKLVVKEIFRLHPAVPFLLPRETLSHVKIQGYDIPAKTQIMINVYAIARDPKLWTNPDEFNPDRFLDSSIDYKGLNFELLPFGSGRRICPGMTMGITLVEFALLNLLYFFDWGLPEKEEADKIITGNGVAVGLVQVLLH

SEQ ID NO: 91648 - protein, 283 aa, Arabidopsis thaliana
  peptide (1)..(283): Ceres Seq. ID no. 12728562
MTSMFSDFFPGGIGRFIDWISGQNKRFDNVFSDLDTFFQNILDYHLKPGRKVADSSDIIDVVINMIKKQEKDGDSFKLTTDHLKGMISDIFLAGVSTSASTLIWAITELVRNRKVMKKVQEEIRTTLGDKKERITEQDLTNLHYFKLVVKEIFRLHPAVPFLLPRETLSHVKIQGYDIPAKTQIMINVYAIARDPKLWTNPDEFNPDRFLDSSIDYKGLNFELLPFGSGRRICPGMTMGITLVEFALLNLLYFFDWGLPEKEEADKIITGNGVAVGLVQVLLH

SEQ ID NO: 91649 - DNA, 1691 bp, Arabidopsis thaliana
  misc_feature (1)..(1691): Ceres Seq. ID no. 12728563
  misc_feature (1)..(1691): Ortholog of  Ceres SEQ ID NO 13594209 as cited in SEQ ID NO 59089
  misc_feature (1)..(1691): Ortholog of  Ceres SEQ ID NO 14313084 as cited in SEQ ID NO 59183
  misc_feature (1)..(1691): Ortholog of  Ceres SEQ ID NO 13502874 as cited in SEQ ID NO 66298
  misc_feature (1)..(1691): Ortholog of  Ceres SEQ ID NO 15169631 as cited in SEQ ID NO 67173
  misc_feature (1)..(1691): Ortholog of  Ceres SEQ ID NO 12614124 as cited in SEQ ID NO 68392
aaatcgaaccaactaacacaaaagaaaagaaaaaaaaaacagagtatcaaacatgtcaatcttgctctgtttcctctgtcttttacctgttttcttagtttctttatcaatcttgtcaaaaaggctaaaaccctcaaaatggaagcttcctccgggaccaaagacgctcccgatcatcggaaacttacacaacctcacaggtttgcctcacacatgttttcgaaatctctcacaaaagttcggaccagtgatgcttctccacttcggattcgtccccgtagtcgtgatctcatcgaaagaaggagcagaagaagctctcaagacccaagatcttgaatgttgcagccgaccagagactgtagcgacaagaatgatctcttacaacttcaaagacattggattcgctccttacggtgaggaatggaaagcgttgaggaagctcgtggttatggagctcttgaacacgaaaaagtttcagtctttcaggtatataagagaggaagagaatgacttgttgatcaagaaactaaccgaatccgctctgaaaaaatcaccggtgaatctgaagaagacccttttcacgctagtcgcgagtatcgtgtgtaggctcgcgttcggggtgaatatccacaagtgcgagttcgtagacgaggacaacgttgctgatctagttaacaagtttgagatgctagtcgctggtgttgccttcactgatttcttccctggagtgggttggcttgtagaccgaatctcaggtcagaacaagacactaaacaatgttttctcagaacttgacactttcttccaaaacgtgctcgatgatcatattaagcctggaagacaagtatctgagaaccctgacgtcgtagatgtgatgcttgatctaatgaagaagcaagagaaagatggagaatctttcaaactcacaacagatcatctcaaaggaatcatctcggacatatttcttgcaggagtaaacacaagcgccgtcactttgaactgggcgatggccgagctgatcagaaacccgagagtgatgaagaaagtgcaagacgagattaggacaacacttggggacaagaaacagagaatcacagagcaagatctaagccaagttcactacttcaagcttgtggtcaaggagatatttagattacatccagcagctccacttttgcttccaagagagacaatgtctcatgtcaagatccaaggctacgatattcctgtgaaaacacagatgatgatcaacatctactcgatcgcacgtgatccaaaactatggacaaaccctgatgagtttaaccctgacaggtttcttgacagctccatagattacagaggactaaactttgagctgttaccatttggttctggccggagaatctgtcccgggatgacgctgggaatcaccaccgtggaattgggactgttgaatttgctttacttcttcgattgggtagtgcctgtagggaagaatgtgaaggacatcaacttggaagaaacaggatcaatcattattagcaagaagacaacccttgagcttgttccacttgttcatcattgaaatgacgatcatgaaacaattagtccataagattatgtatttgtatccagcttctttatcttgatatggttgtaatcataatctgaatagtgatatcaacacaagtttttgttttttaaacaac

SEQ ID NO: 91650 - protein, 504 aa, Arabidopsis thaliana; identical to SEQ ID NO: 76886
  peptide (1)..(504): Ceres Seq. ID no. 12728564

SEQ ID NO: 91651 - protein, 438 aa, Arabidopsis thaliana; identical to SEQ ID NO: 76887
  peptide (1)..(438): Ceres Seq. ID no. 12728565

SEQ ID NO: 91652 - protein, 398 aa, Arabidopsis thaliana
  peptide (1)..(398): Ceres Seq. ID no. 12728566
MISYNFKDIGFAPYGEEWKALRKLVVMELLNTKKFQSFRYIREEENDLLIKKLTESALKKSPVNLKKTLFTLVASIVCRLAFGVNIHKCEFVDEDNVADLVNKFEMLVAGVAFTDFFPGVGWLVDRISGQNKTLNNVFSELDTFFQNVLDDHIKPGRQVSENPDVVDVMLDLMKKQEKDGESFKLTTDHLKGIISDIFLAGVNTSAVTLNWAMAELIRNPRVMKKVQDEIRTTLGDKKQRITEQDLSQVHYFKLVVKEIFRLHPAAPLLLPRETMSHVKIQGYDIPVKTQMMINIYSIARDPKLWTNPDEFNPDRFLDSSIDYRGLNFELLPFGSGRRICPGMTLGITTVELGLLNLLYFFDWVVPVGKNVKDINLEETGSIIISKKTTLELVPLVHH

SEQ ID NO: 91653 - DNA, 1170 bp, Arabidopsis thaliana
  misc_feature (1)..(1170): Ceres Seq. ID no. 12728599
  misc_feature (1)..(1170): Ortholog of  Ceres SEQ ID NO 14313743 as cited in SEQ ID NO 59555
atggacaaaagagaacgtgaagccttgtactctgcgattcaaggatttgttggtgattcttggaacggatctgctctctatcctgatccttgtggttggactccaattcagggtgtttcttgtgacatctacaatgacctgtggtatgtcacggatttgagtttagggcttatttatgaaaactcgcttccttgctcctcaagtcttcagataagaccagagttatttgagctcaagcatttaagatctctctccttcttcaactgctttatctctcccatggtgatagctaaagaggagttgtggacaaactttgcatctaacttagaatctctcgagtttagatccaatcccggtctcattggggaacttcctgaaacaattggaaatctcacaaagctgaagtctttagtggttctcgaaaatggatttagtggagagctacccgcgagtatctgcaacttaaagagactaaagaggctggttttcgcagggaactcgtttgcgggaatgatcccaaactgtttcaaagggttaaaagagctcttgatcttggatttgagccgcaactctttctcagggacattgcctacatcttttggagatttggtttcattgctcaagcttgacctaagcaataacctcttagaagggaacttacctcaagaactaggatttttgaagaatttgacacttttggacctgaggaacaacagattctctggtgggctgtccaagaatattgaaaatatccaatctctaacggaattagttttatctaacaatccaatgggtgaagaggatatggtgggaacaaattgggggaagatgagcaatttggtagttttggacttatccaaaatgggtttgagaggtgagattcctacaagtctaaccaacctgaagaggttaaggtttcttggtctgaacaacaacaatctaaccggttttgttccatcgaagaagcttgaagctttgccttgccttggtgctttatacatcaatggaaacaacctaacaggtgagcttagattctctacaaagttctatgagaagatgggaagaagatttaaagcttcaaagaatccaaatctgtgtcaacctttagagatggtaatgtcagaatctcataaacatttaagtcctcttggagtgaagccatgcacttaa

SEQ ID NO: 91654 - protein, 389 aa, Arabidopsis thaliana
  peptide (1)..(389): Ceres Seq. ID no. 12728600
MDKREREALYSAIQGFVGDSWNGSALYPDPCGWTPIQGVSCDIYNDLWYVTDLSLGLIYENSLPCSSSLQIRPELFELKHLRSLSFFNCFISPMVIAKEELWTNFASNLESLEFRSNPGLIGELPETIGNLTKLKSLVVLENGFSGELPASICNLKRLKRLVFAGNSFAGMIPNCFKGLKELLILDLSRNSFSGTLPTSFGDLVSLLKLDLSNNLLEGNLPQELGFLKNLTLLDLRNNRFSGGLSKNIENIQSLTELVLSNNPMGEEDMVGTNWGKMSNLVVLDLSKMGLRGEIPTSLTNLKRLRFLGLNNNNLTGFVPSKKLEALPCLGALYINGNNLTGELRFSTKFYEKMGRRFKASKNPNLCQPLEMVMSESHKHLSPLGVKPCT

SEQ ID NO: 91655 - protein, 296 aa, Arabidopsis thaliana
  peptide (1)..(296): Ceres Seq. ID no. 12728601
MVIAKEELWTNFASNLESLEFRSNPGLIGELPETIGNLTKLKSLVVLENGFSGELPASICNLKRLKRLVFAGNSFAGMIPNCFKGLKELLILDLSRNSFSGTLPTSFGDLVSLLKLDLSNNLLEGNLPQELGFLKNLTLLDLRNNRFSGGLSKNIENIQSLTELVLSNNPMGEEDMVGTNWGKMSNLVVLDLSKMGLRGEIPTSLTNLKRLRFLGLNNNNLTGFVPSKKLEALPCLGALYINGNNLTGELRFSTKFYEKMGRRFKASKNPNLCQPLEMVMSESHKHLSPLGVKPCT

SEQ ID NO: 91656 - protein, 219 aa, Arabidopsis thaliana
  peptide (1)..(219): Ceres Seq. ID no. 12728602
MIPNCFKGLKELLILDLSRNSFSGTLPTSFGDLVSLLKLDLSNNLLEGNLPQELGFLKNLTLLDLRNNRFSGGLSKNIENIQSLTELVLSNNPMGEEDMVGTNWGKMSNLVVLDLSKMGLRGEIPTSLTNLKRLRFLGLNNNNLTGFVPSKKLEALPCLGALYINGNNLTGELRFSTKFYEKMGRRFKASKNPNLCQPLEMVMSESHKHLSPLGVKPCT

SEQ ID NO: 91657 - DNA, 531 bp, Arabidopsis thaliana
  misc_feature (1)..(531): Ceres Seq. ID no. 12728619
  misc_feature (1)..(531): Ortholog of  Ceres SEQ ID NO 15174355 as cited in SEQ ID NO 0
atgatgaacagctgtggaatccaacaaaacgcttttgaagagatgaggagaaacgccgccgtttctgatcggagagacgccgtgatttgtcctaaacctcgtcgtgttggtgctcttaatcaccactcttctcgatctctccgttggcaactcaatcatcagatggaattatgtgaatcgaattcaggaagtgagattttggatttcatcctcacaaagggtggtggtggtggtggtgagcaagatcagacgaggacggtgatgacgccacctctgttctttacagggtcacctccaagtagagtttctaacccattaacaaaagattcgctttttcgagaagagcttctcatggtggcttctccgagtccatcgactccacgagcaaccaaaccgcagccaccgtcttctccaaggaacggtagttgtgttatggcggcgacgagtttcgggaacaatcctgtggttcgtgttgtggggtttgattgtgacagacgcagcagcaacaggagcatttcgactcttgcataa

SEQ ID NO: 91658 - protein, 176 aa, Arabidopsis thaliana
  peptide (1)..(176): Ceres Seq. ID no. 12728620
MMNSCGIQQNAFEEMRRNAAVSDRRDAVICPKPRRVGALNHHSSRSLRWQLNHQMELCESNSGSEILDFILTKGGGGGGEQDQTRTVMTPPLFFTGSPPSRVSNPLTKDSLFREELLMVASPSPSTPRATKPQPPSSPRNGSCVMAATSFGNNPVVRVVGFDCDRRSSNRSISTLA

SEQ ID NO: 91659 - protein, 175 aa, Arabidopsis thaliana
  peptide (1)..(175): Ceres Seq. ID no. 12728621
MNSCGIQQNAFEEMRRNAAVSDRRDAVICPKPRRVGALNHHSSRSLRWQLNHQMELCESNSGSEILDFILTKGGGGGGEQDQTRTVMTPPLFFTGSPPSRVSNPLTKDSLFREELLMVASPSPSTPRATKPQPPSSPRNGSCVMAATSFGNNPVVRVVGFDCDRRSSNRSISTLA

SEQ ID NO: 91660 - protein, 162 aa, Arabidopsis thaliana
  peptide (1)..(162): Ceres Seq. ID no. 12728622
MRRNAAVSDRRDAVICPKPRRVGALNHHSSRSLRWQLNHQMELCESNSGSEILDFILTKGGGGGGEQDQTRTVMTPPLFFTGSPPSRVSNPLTKDSLFREELLMVASPSPSTPRATKPQPPSSPRNGSCVMAATSFGNNPVVRVVGFDCDRRSSNRSISTLA

SEQ ID NO: 91661 - DNA, 1020 bp, Arabidopsis thaliana
  misc_feature (1)..(1020): Ceres Seq. ID no. 12728623
  misc_feature (1)..(1020): Ortholog of  Ceres SEQ ID NO 12614972 as cited in SEQ ID NO 61986
  misc_feature (1)..(1020): Ortholog of  Ceres SEQ ID NO 12625706 as cited in SEQ ID NO 64144
  misc_feature (1)..(1020): Ortholog of  Ceres SEQ ID NO 13584933 as cited in SEQ ID NO 65009
  misc_feature (1)..(1020): Ortholog of  Ceres SEQ ID NO 12634984 as cited in SEQ ID NO 0
  misc_feature (1)..(1020): Ortholog of  Ceres SEQ ID NO 13599377 as cited in SEQ ID NO 0
atggatgagaaagatattctaaggaacttgagggaagaagaagaagaagaagaagaaaatcaaagcgaagaaaccaaaattttgatctcttcacttccttgggagatagattaccttgggaacaagcttttcaagtaccaaggatattggtactacgaagacgttctccaatcaatccccaatatacactcgagttttcagccacaagaaaccgatatagttgttgcttctttctacaaatcgggcacgacttggctcaaagcactcacatttgcactcgttcaacgatcaaaacactcgttagaagatcatcatcatcctctgctatctcataaccctcatgagatagtaccgtacctcgagctagatctgtatctcaacagctcaaaaccggacttgaccaagttcttatcatcatcatcatcatcatcatctccgagattgttctcaactcatatgtccttggacgcgcttaaactacccttgaagaagtctccttgcaaggtagtgtacgtgtgcaggaacgtgaaagacgtgttggtgtcactttggtattttagccaaaatgaaaagatcattcgagcggagaattattctttcaaggctatatttgagtcattctgcaacggagttaccctacacggtcccttttgggaccatgcacagagctattggcgaggcagcttggaagatcctaagcattttcttttcatgaggtacgaggagttgaaagcggagcctcgtactcaggtcaagagacttgcagagttcttggattgtccattcactaaggaagaggaagatagcggaactgtagacaagatcttggaactttgctctctaagtaatttaagcagtttggagatcaacaaaactggatccttgggtggagtagattacaagacttatttccgtaaaggacaagttggtgactggaagagttatatgacctctgaaatggtaaataaaatcgatatgatcgtcgaggagaaactcaaaggttccggtttgaaattctag

SEQ ID NO: 91662 - protein, 339 aa, Arabidopsis thaliana
  peptide (1)..(339): Ceres Seq. ID no. 12728624
MDEKDILRNLREEEEEEEENQSEETKILISSLPWEIDYLGNKLFKYQGYWYYEDVLQSIPNIHSSFQPQETDIVVASFYKSGTTWLKALTFALVQRSKHSLEDHHHPLLSHNPHEIVPYLELDLYLNSSKPDLTKFLSSSSSSSSPRLFSTHMSLDALKLPLKKSPCKVVYVCRNVKDVLVSLWYFSQNEKIIRAENYSFKAIFESFCNGVTLHGPFWDHAQSYWRGSLEDPKHFLFMRYEELKAEPRTQVKRLAEFLDCPFTKEEEDSGTVDKILELCSLSNLSSLEINKTGSLGGVDYKTYFRKGQVGDWKSYMTSEMVNKIDMIVEEKLKGSGLKF

SEQ ID NO: 91663 - protein, 187 aa, Arabidopsis thaliana
  peptide (1)..(187): Ceres Seq. ID no. 12728625
MSLDALKLPLKKSPCKVVYVCRNVKDVLVSLWYFSQNEKIIRAENYSFKAIFESFCNGVTLHGPFWDHAQSYWRGSLEDPKHFLFMRYEELKAEPRTQVKRLAEFLDCPFTKEEEDSGTVDKILELCSLSNLSSLEINKTGSLGGVDYKTYFRKGQVGDWKSYMTSEMVNKIDMIVEEKLKGSGLKF

SEQ ID NO: 91664 - DNA, 615 bp, Arabidopsis thaliana
  misc_feature (1)..(615): Ceres Seq. ID no. 12728700
  misc_feature (1)..(615): Ortholog of  Ceres SEQ ID NO 13599568 as cited in SEQ ID NO 509
  misc_feature (1)..(615): Ortholog of  Ceres SEQ ID NO 15172903 as cited in SEQ ID NO 51839
  misc_feature (1)..(615): Ortholog of  Ceres SEQ ID NO 15177108 as cited in SEQ ID NO 52015
  misc_feature (1)..(615): Ortholog of  Ceres SEQ ID NO 13638595 as cited in SEQ ID NO 52050
  misc_feature (1)..(615): Ortholog of  Ceres SEQ ID NO 13594748 as cited in SEQ ID NO 52114
  misc_feature (1)..(615): Ortholog of  Ceres SEQ ID NO 15173596 as cited in SEQ ID NO 63267
  misc_feature (1)..(615): Ortholog of  Ceres SEQ ID NO 12583993 as cited in SEQ ID NO 68098
  misc_feature (1)..(615): Ortholog of  Ceres SEQ ID NO 13654535 as cited in SEQ ID NO 68227
atgttttgtctctttgtaatcccatctctctcatctgattctgatcctttacaagacttctgcgttggcgatctcaaagcttctgcttccatcaatggctttccatgcaaatcagccgtttctgcttctgacttcttctactccggtttaggtggccccttagacacgtcaaaccctaacggagtaaccgttgctcccgccaacgtcttaaccttcccgggtctaaacactttaggaatctcgatgaataacgttgagctagctccaggaggtgtaaatccgcctcacttgcacccgcgtgcaaccgaagtaggaactgtgatcgaaggctcggtgtttgtcggattcttgagtaccaacaacactttgttctcaaaagttttgaatgcaggagaggcgtttgttatccctagaggattggttcatttccaatggaacgttggccaagtgaaagcgcgaatgataaccgcttttaacagccagctcccaggagcagttgttttgcctagtactctgttcggctcgaaacctgagattccaaacgcagtcctgaccagagcgtttaggactgatgatacaactgtgcagaatctcaagtccaagtttgctgtttga

SEQ ID NO: 91665 - protein, 204 aa, Arabidopsis thaliana; identical to SEQ ID NO: 44280
  peptide (1)..(204): Ceres Seq. ID no. 12728701

SEQ ID NO: 91666 - protein, 123 aa, Arabidopsis thaliana
  peptide (1)..(123): Ceres Seq. ID no. 12728702
MNNVELAPGGVNPPHLHPRATEVGTVIEGSVFVGFLSTNNTLFSKVLNAGEAFVIPRGLVHFQWNVGQVKARMITAFNSQLPGAVVLPSTLFGSKPEIPNAVLTRAFRTDDTTVQNLKSKFAV

SEQ ID NO: 91667 - DNA, 1736 bp, Arabidopsis thaliana
  misc_feature (1)..(1736): Ceres Seq. ID no. 12728711
  misc_feature (1)..(1736): Ortholog of  Ceres SEQ ID NO 13581563 as cited in SEQ ID NO 58942
  misc_feature (1)..(1736): Ortholog of  Ceres SEQ ID NO 13658707 as cited in SEQ ID NO 66286
  misc_feature (1)..(1736): Ortholog of  Ceres SEQ ID NO 13654528 as cited in SEQ ID NO 68080
aaactctcttcaccagcttctgacacagactttgcaactctcatgacggatctttgcttctaattcactatttctcggctagatctgtggcaaaaccagaacctcaatgtttctagttcctcgttaatcgaatcatggtggagaatttgtttccttctcgatttcaatttcatcttcagagacttgacccgaagcgtcgtcttacttctctccttgcttctcacaaaacactcttcacatttctctggatcactgcctttggttccgtctttctatggcagcgaacggcttacatcgaaggcggctctggaactggtcctgtcggaggaaagttcacaattttcggtaagatcaaaccgattcagccaattccccgattgagacctgtggtgtttgatttgaaggattttggaggtgttggagatgggtttacgcttaacactgaagcattcgagagagctgtgatttcaatctctaagcttgggggaagtagcggcggaggtcagctgaatgtgccgcctggacggtggcttacggcgccgtttaatctcactagccatatgactctgtttctcgcagaggattccgagattcttggtgttgaggatgagaagtattggcctttaatgccaccattgccttcatatggttacggtagagagcgtccgggacctcgttatgggagcttaatccatggtcaaaacctcaaagatattgtgataactggtcataatggaacaataaacgggcaaggacaatcgtggtggaagaagcatcaaagaagacttctcaactatacgagagggcctttagttcaaattatgtggtctagtgacatagttatcgctaacattacaatgcgtgactcaccgttctggactctgcatccatatgactgcaaaaatgtaacaataaggaatgtcaccatcttggctcctgtaaccggagcaccaaacactgatggaattgatccagattcgtgcgaggatatggtaattgaggactgttacattagcaccggggatgatgcgatcgcgataaagagtggatgggatcagtttgggattgcatatggacgaccttcaacaaacattcttattcgtaatctcgttgttcgctctgttatcagtgctggtgtatcaatcggaagcgaaatgtctggtggaatatctaatgtgacgatcgagaaccttctgatctggaactcacgccgtggaatcagaattaaaacggctccaggacgaggcggttacatcagaaacataacctacaaaaacctaacactagacaatgttcgggttgggatagtgatcaaaacggattacaacgagcatgcagacgataattatgatcggaaagcatacccgatactttcgggattcagtttcgcgggaatccacggacaaggagtgcgagtgccggtccggatccatggaagcgaacagattccggtaaggaatgtgacgtttcgggacatgtccgttgggttaacgtacaagaagaaacatatattccaatgttcgttcgtgaaaggacgagtgttcggttcgatatttcctcgaccttgcgagaattttgatgtttacgacgaggaaggtcgtctggttaagcctgcagctgagtccaatgtggcggacattgactacgacatttgaatgttttttcagttcattgtcatttgtgtacataaaagtaaattttgggacacaaaaatgaaaattatttttctttggacc

SEQ ID NO: 91668 - protein, 506 aa, Arabidopsis thaliana
  peptide (1)..(506): Ceres Seq. ID no. 12728712
MVENLFPSRFQFHLQRLDPKRRLTSLLASHKTLFTFLWITAFGSVFLWQRTAYIEGGSGTGPVGGKFTIFGKIKPIQPIPRLRPVVFDLKDFGGVGDGFTLNTEAFERAVISISKLGGSSGGGQLNVPPGRWLTAPFNLTSHMTLFLAEDSEILGVEDEKYWPLMPPLPSYGYGRERPGPRYGSLIHGQNLKDIVITGHNGTINGQGQSWWKKHQRRLLNYTRGPLVQIMWSSDIVIANITMRDSPFWTLHPYDCKNVTIRNVTILAPVTGAPNTDGIDPDSCEDMVIEDCYISTGDDAIAIKSGWDQFGIAYGRPSTNILIRNLVVRSVISAGVSIGSEMSGGISNVTIENLLIWNSRRGIRIKTAPGRGGYIRNITYKNLTLDNVRVGIVIKTDYNEHADDNYDRKAYPILSGFSFAGIHGQGVRVPVRIHGSEQIPVRNVTFRDMSVGLTYKKKHIFQCSFVKGRVFGSIFPRPCENFDVYDEEGRLVKPAAESNVADIDYDI

SEQ ID NO: 91669 - protein, 364 aa, Arabidopsis thaliana
  peptide (1)..(364): Ceres Seq. ID no. 12728713
MTLFLAEDSEILGVEDEKYWPLMPPLPSYGYGRERPGPRYGSLIHGQNLKDIVITGHNGTINGQGQSWWKKHQRRLLNYTRGPLVQIMWSSDIVIANITMRDSPFWTLHPYDCKNVTIRNVTILAPVTGAPNTDGIDPDSCEDMVIEDCYISTGDDAIAIKSGWDQFGIAYGRPSTNILIRNLVVRSVISAGVSIGSEMSGGISNVTIENLLIWNSRRGIRIKTAPGRGGYIRNITYKNLTLDNVRVGIVIKTDYNEHADDNYDRKAYPILSGFSFAGIHGQGVRVPVRIHGSEQIPVRNVTFRDMSVGLTYKKKHIFQCSFVKGRVFGSIFPRPCENFDVYDEEGRLVKPAAESNVADIDYDI

SEQ ID NO: 91670 - protein, 342 aa, Arabidopsis thaliana; identical to SEQ ID NO: 79534
  peptide (1)..(342): Ceres Seq. ID no. 12728714

SEQ ID NO: 91671 - DNA, 537 bp, Arabidopsis thaliana
  misc_feature (1)..(537): Ceres Seq. ID no. 12728715
  misc_feature (1)..(537): Ortholog of  Ceres SEQ ID NO 15170337 as cited in SEQ ID NO 57970
atgcagtcaaagtacaaaggagtgaggaagaggaaatggggaaaatgggtttcagagatcagacttcccaacagcagagaacgtatttggttgggctcttacgatactcctgagaaggcggcgcgtgctttcgacgcggctctttattgtctccgtggcaacaacgcaaagttcaatttccctgataatcctccggtgatctccggcggacgtaacttgtcgcgatctgagataagagaagctgctgcgaggttcgctaattcggcggaggatgattcaagtggcggagcaggatacgagatacggcaagaatctgcttcaacatcgatggacgttgattcggagtttttgagtatgcttccgacggttggttcgggtaacttcgcttcggagtttgggttattccctgggtttgatgatttctccgatgaatactccggtgatcgtttcagagagcagctttcgcctacacaagattattatcagcttggagaagagacttacgccgatggttccatgtttctttggaatttttga

SEQ ID NO: 91672 - protein, 178 aa, Arabidopsis thaliana
  peptide (1)..(178): Ceres Seq. ID no. 12728716
MQSKYKGVRKRKWGKWVSEIRLPNSRERIWLGSYDTPEKAARAFDAALYCLRGNNAKFNFPDNPPVISGGRNLSRSEIREAAARFANSAEDDSSGGAGYEIRQESASTSMDVDSEFLSMLPTVGSGNFASEFGLFPGFDDFSDEYSGDRFREQLSPTQDYYQLGEETYADGSMFLWNF

SEQ ID NO: 91673 - DNA, 819 bp, Arabidopsis thaliana
  misc_feature (1)..(819): Ceres Seq. ID no. 12728717
  misc_feature (1)..(819): Ortholog of  Ceres SEQ ID NO 12613614 as cited in SEQ ID NO 68243
  misc_feature (1)..(819): Ortholog of  Ceres SEQ ID NO 12556636 as cited in SEQ ID NO 0
  misc_feature (1)..(819): Ortholog of  Ceres SEQ ID NO 13600066 as cited in SEQ ID NO 0
  misc_feature (1)..(819): Ortholog of  Ceres SEQ ID NO 15179946 as cited in SEQ ID NO 0
gagaagggagaaaactttctccgagctcgattgtttttggaaatcgtcaatcagatatttctcgttcgtctccgccttcgatttatccaaaggctcttgttattgaaaatggcagattccaccaaagcagggttgaagaagccagctttcactaaggttgatcagctgcgtcctgggactagcggacacaatgtcaatgtgaagattgtcagcacgaaaatggtgttacagaaaggtcgtgctgatggtcctcaagctcgccagttgcggatttctgaatgcattgttggtgacgagacaggagtgatcgtctttaccgcaagaaatgaccaagtggacttaatgaaagagggatcaactgtaactctacgcaatgcgaaaatcgacatgtataaaggatcaatgaggctagctgtagacaagtggggtcgtgttgaagtcacagagcctgcgagcttcaaagtgaaagaagacaccaacatgtcccttatcgagtatgagctcgtaaacgtcgttgaatgagtgacaaattcctcgaaataccactaggagaaacgccctcaagaataaacaagtcaaatccgtaaccgtttatgttagcgtcaagaaaagagttaaaccctgatcagctgatgtcttgcactaagctatgtaagagtgatgatggctctaaaagttgaatgcagagcttttggcttaggttatgacttcgtgataccttttcttttgtaatgtcatcatacacgctaaggcttttgtgctacattattactctctttgtctttgcctcgtttcaaaaaatccatattcttagtgaag

SEQ ID NO: 91674 - protein, 173 aa, Arabidopsis thaliana; identical to SEQ ID NO: 29808
  peptide (1)..(173): Ceres Seq. ID no. 12728718

SEQ ID NO: 91675 - protein, 137 aa, Arabidopsis thaliana; identical to SEQ ID NO: 29809
  peptide (1)..(137): Ceres Seq. ID no. 12728719

SEQ ID NO: 91676 - protein, 100 aa, Arabidopsis thaliana; identical to SEQ ID NO: 29810
  peptide (1)..(100): Ceres Seq. ID no. 12728720

SEQ ID NO: 91677 - DNA, 1360 bp, Arabidopsis thaliana
  misc_feature (1)..(1360): Ceres Seq. ID no. 12728755
  misc_feature (1)..(1360): Ortholog of  Ceres SEQ ID NO 13597638 as cited in SEQ ID NO 65448
  misc_feature (1)..(1360): Ortholog of  Ceres SEQ ID NO 14302772 as cited in SEQ ID NO 69055
aacaaaaacttaacccatttcttcttctttttttgtttctctctcacaaacacaacaaatatggaatacagctgtgtagacgacagtagtacaacgtcagaatctctctccatctctactactccaaagccgacaacgacgacggagaagaaactctcttctccgccggcgacgtcgatgcgtctctacagaatgggaagcggcggaagcagcgtcgttttggattcagagaacggcgtcgagaccgagtcacgtaagcttccttcgtcgaaatataaaggcgttgtgcctcagcctaacggaagatggggagctcagatttacgagaagcatcagcgagtttggctcggtactttcaacgaggaagaagaagctgcgtcttcttacgacatcgccgtgaggagattccgcggccgcgacgccgtcactaacttcaaatctcaagttgatggaaacgacgccgaatcggcttttcttgacgctcattctaaagctgagatcgtggatatgttgaggaaacacacttacgccgatgagtttgagcagagtagacggaagtttgttaacggcgacggaaaacgctctgggttggagacggcgacgtacggaaacgacgctgttttgagagcgcgtgaggttttgttcgagaagactgttacgccgagcgacgtcgggaagctgaaccgtttagtgataccgaaacaacacgcggagaagcattttccgttaccggcgatgacgacggcgatggggatgaatccgtctccgacgaaaggcgttttgattaacttggaagatagaacagggaaagtgtggcggttccgttacagttactggaacagcagtcaaagttacgtgttgaccaagggctggagccggttcgttaaagagaagaatcttcgagccggtgatgtggtttgtttcgagagatcaaccggaccagaccggcaattgtatatccactggaaagtccggtctagtccggttcagactgtggttaggctattcggagtcaacattttcaatgtgagtaacgagaaaccaaacgacgtcgcagtagagtgtgttggcaagaagagatctcgggaagatgatttgttttcgttagggtgttccaagaagcaggcgattatcaacatcttgtgacaaattctttttttttggttttttttcttcaatttgtttctcctttttcaatattttgtattgaaatgacaagttgtaaattaggacaagacaagaaaaaatgacaactagacaaaatagtttttgtttacatctaatttaggatctgttttttcaccctttcctgaaatatgatatgtgttctcctccttaatctaataatcttgtttaatct

SEQ ID NO: 91678 - protein, 381 aa, Arabidopsis thaliana
  peptide (1)..(381): Ceres Seq. ID no. 12728756
NKNLTHFFFFFCFSLTNTTNMEYSCVDDSSTTSESLSISTTPKPTTTTEKKLSSPPATSMRLYRMGSGGSSVVLDSENGVETESRKLPSSKYKGVVPQPNGRWGAQIYEKHQRVWLGTFNEEEEAASSYDIAVRRFRGRDAVTNFKSQVDGNDAESAFLDAHSKAEIVDMLRKHTYADEFEQSRRKFVNGDGKRSGLETATYGNDAVLRAREVLFEKTVTPSDVGKLNRLVIPKQHAEKHFPLPAMTTAMGMNPSPTKGVLINLEDRTGKVWRFRYSYWNSSQSYVLTKGWSRFVKEKNLRAGDVVCFERSTGPDRQLYIHWKVRSSPVQTVVRLFGVNIFNVSNEKPNDVAVECVGKKRSREDDLFSLGCSKKQAIINIL

SEQ ID NO: 91679 - protein, 361 aa, Arabidopsis thaliana; identical to SEQ ID NO: 36043
  peptide (1)..(361): Ceres Seq. ID no. 12728757

SEQ ID NO: 91680 - protein, 322 aa, Arabidopsis thaliana; identical to SEQ ID NO: 36044
  peptide (1)..(322): Ceres Seq. ID no. 12728758

SEQ ID NO: 91681 - DNA, 1080 bp, Arabidopsis thaliana
  misc_feature (1)..(1080): Ceres Seq. ID no. 12728759
  misc_feature (1)..(1080): Ortholog of  Ceres SEQ ID NO 15169976 as cited in SEQ ID NO 60438
gcagcaatggaggatctatggaagagggcaaaatcgttcgcagaagaagcgggtaagaagtctcagacgataacacaatcatcctccgcgaccttcgtcaatctcgtcaccgagactgctaagaaatccaaggaactcgctctcgaagcttcgaagaaagctgatcaattcaatgccgccgatttcgttgctgaaacggctaagaaatccaaagaattcgctgctgaagcttcaaagaaggcggatcagttcaaagtcgccgcgctgaaacaagctgatcagatccagaacatcaaatcgatcgctgatataatcgggaccgggaccgggtcaggatccggttcagaagcggagcttctcgaattcggtgtaacggatgatttgagagagttcgctgaaggcttgacctctgctacattccaagcttttcctgatcaagatcaaggggatgaagtttccgatgtgataacaaatgcttcgaatgttcgaaaggatctctcggattggcaagagagacatgccactctggttctaacctctgtcaagcaaatctccaagttaagatacgaactttgccctcgtttcatgaaagaaaggaggttctggaggatttatttcacactagtgagcactcatgtttctccatatgagaggaagtacatggaggaacttaagaccaaaggagagcatggaaatgaagaagctaagaaggctccagcgactggagagacagaaacagtagaaaagaatgttgcaatccgtagaacatctactgcgtcttctgagcaggatctggatacattcctgttgggtgatctagaagacagtgatgaagctccagatgatggtgatggaagccttgaggatgactttgacaagattggaaactcagatgttgaagacgagaagcaatcatctaaagctacaacaaatgcaggaaacgaagtgtcttgttagttttaagttccaattagaaaagggtaaatgaagaagatgcttgaaatgtatagttttgatttagtaagtgatgcatacgaagaccttgatttcgcaattcatatatgattcatttgttttgcc

SEQ ID NO: 91682 - protein, 318 aa, Arabidopsis thaliana
  peptide (1)..(318): Ceres Seq. ID no. 12728760
AAMEDLWKRAKSFAEEAGKKSQTITQSSSATFVNLVTETAKKSKELALEASKKADQFNAADFVAETAKKSKEFAAEASKKADQFKVAALKQADQIQNIKSIADIIGTGTGSGSGSEAELLEFGVTDDLREFAEGLTSATFQAFPDQDQGDEVSDVITNASNVRKDLSDWQERHATLVLTSVKQISKLRYELCPRFMKERRFWRIYFTLVSTHVSPYERKYMEELKTKGEHGNEEAKKAPATGETETVEKNVAIRRTSTASSEQDLDTFLLGDLEDSDEAPDDGDGSLEDDFDKIGNSDVEDEKQSSKATTNAGNEVSC

SEQ ID NO: 91683 - protein, 316 aa, Arabidopsis thaliana
  peptide (1)..(316): Ceres Seq. ID no. 12728761
MEDLWKRAKSFAEEAGKKSQTITQSSSATFVNLVTETAKKSKELALEASKKADQFNAADFVAETAKKSKEFAAEASKKADQFKVAALKQADQIQNIKSIADIIGTGTGSGSGSEAELLEFGVTDDLREFAEGLTSATFQAFPDQDQGDEVSDVITNASNVRKDLSDWQERHATLVLTSVKQISKLRYELCPRFMKERRFWRIYFTLVSTHVSPYERKYMEELKTKGEHGNEEAKKAPATGETETVEKNVAIRRTSTASSEQDLDTFLLGDLEDSDEAPDDGDGSLEDDFDKIGNSDVEDEKQSSKATTNAGNEVSC

SEQ ID NO: 91684 - DNA, 570 bp, Arabidopsis thaliana
  misc_feature (1)..(570): Ceres Seq. ID no. 12728798
  misc_feature (1)..(570): Ortholog of  Ceres SEQ ID NO 12585325 as cited in SEQ ID NO 63062
atggatccaacacagaacacaagtgcagggattggtgggagcaatggtacaatcagatatcaaaccaatgatgggacttcaactgtgaccgttgctgatgattcaaaggagaatctttcccaagtcataaactctattgagaaaactttaggagtccttcatcagttacaccttaccgtcacttctttcacacccgcgtctcaactccatctcctccagcgccttaactctcttgtgatggagctagataacatgactaagttgtctgagaaatgcaacattcaaatccccatggaggttcttaacttgattgatgatgggaagaacccggatgagtttacgaaagatgttcttaatagctgcatagctagaaatcaagttactaagggcaagactgatgcttttaaggatttgagaaaacatattctggaggagcttgaacagaatttccctgatgaagtcgatatgtatagagaaatccgtgctagttctgctgctgaagcgaaacggttggcgcaatcgcaaagtgtgttaccaaatggggatgcaaaggtcaagaatgagctataa

SEQ ID NO: 91685 - protein, 189 aa, Arabidopsis thaliana; identical to SEQ ID NO: 77692
  peptide (1)..(189): Ceres Seq. ID no. 12728799

SEQ ID NO: 91686 - protein, 110 aa, Arabidopsis thaliana; identical to SEQ ID NO: 77693
  peptide (1)..(110): Ceres Seq. ID no. 12728800

SEQ ID NO: 91687 - protein, 105 aa, Arabidopsis thaliana; identical to SEQ ID NO: 77694
  peptide (1)..(105): Ceres Seq. ID no. 12728801

SEQ ID NO: 91688 - DNA, 923 bp, Arabidopsis thaliana
  misc_feature (1)..(923): Ceres Seq. ID no. 12728840
  misc_feature (1)..(923): Ortholog of  Ceres SEQ ID NO 14316367 as cited in SEQ ID NO 57626
  misc_feature (1)..(923): Ortholog of  Ceres SEQ ID NO 14315039 as cited in SEQ ID NO 57668
  misc_feature (1)..(923): Ortholog of  Ceres SEQ ID NO 13664189 as cited in SEQ ID NO 66834
  misc_feature (1)..(923): Ortholog of  Ceres SEQ ID NO 13654321 as cited in SEQ ID NO 67850
ctattgagtctttagggtctctctgtgtttgcaaatctgacgccgagtattttgctaaagcagcagccagtcgggacagtgaaatggcgactgaagatgtgcaagatcccagaatcgctaagattgcctcttccattagagtcatccccgacttccctaaaccaggaatcatgtttcaggacataacgacgcttcttctcgacactgaggcctttaaggatactattgctttgtttgttgatagatacaaagataaaggcatatctgttgttgcaggtgttgaagctagaggtttcatttttggccctcctattgcgttggctattggtgccaaatttgttcccatgaggaagcccaagaagctacctgggaaggttatttcggaggagtattcgttggagtatggaacagatacgattgagatgcacgtaggtgcagtagagcctggtgagcgtgctattattattgatgacctcattgccacgggtgggactctcgctgctgcaatccgactacttgaacgagtaggagtgaagattgttgaatgtgcttgcgtaattgagttaccagagcttaagggaaaggagaaactaggagagacgtcgctatttgttcttgtaaagtcggctgcttaacaagaaactggaagagaaggttattggatcgagtgttgatgctatttttcatgtatggtgagacattttgcgtgggatttgatccttgttgtttcaacttatcataattggttcagactagaaaatggcatttgaatgtcaggattcgattgcagtttcctattgttccacttaaaatccccgattaataaggtgttatgggttttatttatagaatcaagttgtaatagtagactccaacaggggctaaagtcttggtaacgcaattcttcttttaagtttcgcagc

SEQ ID NO: 91689 - protein, 210 aa, Arabidopsis thaliana; identical to SEQ ID NO: 26646
  peptide (1)..(210): Ceres Seq. ID no. 12728841

SEQ ID NO: 91690 - protein, 183 aa, Arabidopsis thaliana; identical to SEQ ID NO: 26647
  peptide (1)..(183): Ceres Seq. ID no. 12728842

SEQ ID NO: 91691 - protein, 154 aa, Arabidopsis thaliana; identical to SEQ ID NO: 26648
  peptide (1)..(154): Ceres Seq. ID no. 12728843

SEQ ID NO: 91692 - DNA, 1809 bp, Arabidopsis thaliana
  misc_feature (1)..(1809): Ceres Seq. ID no. 12728880
  misc_feature (1)..(1809): Ortholog of  Ceres SEQ ID NO 15180188 as cited in SEQ ID NO 0
atggatccaggagatcctacttcgatacttttcacaaagatcagaactttagaaccagatttcgcttccaaaatcattggttacttgcttttacaggacttgggtaagacagatttgatgcgtttggctcttggaccagagactctcttgcagtccgtttgtctcaaagctaaatctgctttaggtctttcttctaatggatcttcttctgcttcttcgccattgaaccctatctccagacccattaacatccaccgtcattctctctctcactcttcaccgggaaatgggttttcgaggaaccctttgtctccttcttttgctactcctggttcactcggaagtaaccctaacatgatttcgagtccgtttcaagcaagttcgtctctttttgcttctgacggtgctgctgctggtgattccactggaaacggcgatttcctcgatgagcagcaactagggaactacttgtcgtttcttaacgaatcttcttcgaagaataacgacgaatctctggatccgtttgggttctcggctgataacggcgatgcccatttgcataagaggagtttctcagccagtgatgcttgttttgggtcagaggagcccggatttggtggcgggggttacaacaggttccttcacggtggtttaggtgatgattttgattctcctggtggttttggctcgccggattatgtttctagacagcaagaggagattgtgaggatgaagatggctcagagacagcgaatggctgctgctcagtacttggcggctactggttctccaatgtcgtatgagaaaggcctcaattttctcttgcatcagcgtaatgcgcatagatcaggagcaggacaatttggggaagagggttactggtttggtagtccaggccggcatgaaagggatgagtttatggggatgggagataaatctaactctgcatctaaacagatttacttgacatttccagctgacagctccttcacagatgaagatgtctccaattattttggcaattttggaccagtgcaagatgttaggattccataccagcagaaacggatgtttgggtttgtcacttttctccactctgaaactgtgagaatcatattggccagaggaaatcctcatttcatctgtgactcacgtgtgcttgttaaaccgtacaaggagaagggaagaatccttgaaaagaggcagcagcaacaactgctgcagcagatggagagaggaaacttttctcctggttcaagtccatctggaatggattccagggatctctttgattctcatctcgcaccaaggatgttttctaacacacaggagatgatgaggagaaaagctgagcaagctgacctgcaacaagcaatagaattccaaaggagaagatttttgagtctgcagttgcccgacatggacagtgaatcgtttctccatcaccagcgtagtctttccattggatcccccgtccatttttcccctcgtgtcaatcaaagcatgctctttcgatcagaaagcaccagtgatgaagtcttcgaaggtaatggtgattcaggacatcagtctgaagcaacccgagcttttctgagtgatactggtcataacatcagccaagaacgtggttacaatagccatcttaacaaagggcaagagacaagtctggagaatactctgcctgatagcttctttgcttccccatcaaagacaggtgaaacccaacaccccgagtttgagaaagagaattgtgctactatctctgttactacagaaaataaggcagcctcgtcacttcaatcagcctag

SEQ ID NO: 91693 - protein, 602 aa, Arabidopsis thaliana
  peptide (1)..(602): Ceres Seq. ID no. 12728881
MDPGDPTSILFTKIRTLEPDFASKIIGYLLLQDLGKTDLMRLALGPETLLQSVCLKAKSALGLSSNGSSSASSPLNPISRPINIHRHSLSHSSPGNGFSRNPLSPSFATPGSLGSNPNMISSPFQASSSLFASDGAAAGDSTGNGDFLDEQQLGNYLSFLNESSSKNNDESLDPFGFSADNGDAHLHKRSFSASDACFGSEEPGFGGGGYNRFLHGGLGDDFDSPGGFGSPDYVSRQQEEIVRMKMAQRQRMAAAQYLAATGSPMSYEKGLNFLLHQRNAHRSGAGQFGEEGYWFGSPGRHERDEFMGMGDKSNSASKQIYLTFPADSSFTDEDVSNYFGNFGPVQDVRIPYQQKRMFGFVTFLHSETVRIILARGNPHFICDSRVLVKPYKEKGRILEKRQQQQLLQQMERGNFSPGSSPSGMDSRDLFDSHLAPRMFSNTQEMMRRKAEQADLQQAIEFQRRRFLSLQLPDMDSESFLHHQRSLSIGSPVHFSPRVNQSMLFRSESTSDEVFEGNGDSGHQSEATRAFLSDTGHNISQERGYNSHLNKGQETSLENTLPDSFFASPSKTGETQHPEFEKENCATISVTTENKAASSLQSA

SEQ ID NO: 91694 - protein, 563 aa, Arabidopsis thaliana
  peptide (1)..(563): Ceres Seq. ID no. 12728882
MRLALGPETLLQSVCLKAKSALGLSSNGSSSASSPLNPISRPINIHRHSLSHSSPGNGFSRNPLSPSFATPGSLGSNPNMISSPFQASSSLFASDGAAAGDSTGNGDFLDEQQLGNYLSFLNESSSKNNDESLDPFGFSADNGDAHLHKRSFSASDACFGSEEPGFGGGGYNRFLHGGLGDDFDSPGGFGSPDYVSRQQEEIVRMKMAQRQRMAAAQYLAATGSPMSYEKGLNFLLHQRNAHRSGAGQFGEEGYWFGSPGRHERDEFMGMGDKSNSASKQIYLTFPADSSFTDEDVSNYFGNFGPVQDVRIPYQQKRMFGFVTFLHSETVRIILARGNPHFICDSRVLVKPYKEKGRILEKRQQQQLLQQMERGNFSPGSSPSGMDSRDLFDSHLAPRMFSNTQEMMRRKAEQADLQQAIEFQRRRFLSLQLPDMDSESFLHHQRSLSIGSPVHFSPRVNQSMLFRSESTSDEVFEGNGDSGHQSEATRAFLSDTGHNISQERGYNSHLNKGQETSLENTLPDSFFASPSKTGETQHPEFEKENCATISVTTENKAASSLQSA

SEQ ID NO: 91695 - protein, 484 aa, Arabidopsis thaliana
  peptide (1)..(484): Ceres Seq. ID no. 12728883
MISSPFQASSSLFASDGAAAGDSTGNGDFLDEQQLGNYLSFLNESSSKNNDESLDPFGFSADNGDAHLHKRSFSASDACFGSEEPGFGGGGYNRFLHGGLGDDFDSPGGFGSPDYVSRQQEEIVRMKMAQRQRMAAAQYLAATGSPMSYEKGLNFLLHQRNAHRSGAGQFGEEGYWFGSPGRHERDEFMGMGDKSNSASKQIYLTFPADSSFTDEDVSNYFGNFGPVQDVRIPYQQKRMFGFVTFLHSETVRIILARGNPHFICDSRVLVKPYKEKGRILEKRQQQQLLQQMERGNFSPGSSPSGMDSRDLFDSHLAPRMFSNTQEMMRRKAEQADLQQAIEFQRRRFLSLQLPDMDSESFLHHQRSLSIGSPVHFSPRVNQSMLFRSESTSDEVFEGNGDSGHQSEATRAFLSDTGHNISQERGYNSHLNKGQETSLENTLPDSFFASPSKTGETQHPEFEKENCATISVTTENKAASSLQSA

SEQ ID NO: 91696 - DNA, 1083 bp, Arabidopsis thaliana
  misc_feature (1)..(1083): Ceres Seq. ID no. 12728893
  misc_feature (1)..(1083): Ortholog of  Ceres SEQ ID NO 14304176 as cited in SEQ ID NO 56343
atggcgaatcttaccttagagctcaacgtttactcagcaaaagatcttgaaaatgtcaacctcatcacaaaaatggacgtatacgccgtcgtttggatcaccggcgatgattctcggaagaatcataaggagaaaacccccatcgatcgcaccggagaatctgagcctacttggaatcacaccgtcaaattttccgttgatcaaaggttagcacacgaaggtcgtttaaccctcgtcgtgaaattggtctgcgatcggatcttcggcgacaaagatctcggagaggtccaagtcccggttcttgagcttcttcatggttcttcgtcgccgtcatctaacggtgacggtcaggggatgatgagatttgttacgtatcaggtcagaactccgtttggaaaaggtcaaggctcgttgactttttcgtaccggttcgattcaccgacatttaaaccggatcaaccggtttcatcacacgttttccaccaggatccaccggtatcatcatcacacgtttacacgaatccgatggatataccgtctgatttctcgtcggcgacgacaaattatcctccgccgcaatcgtctgaagcaaatttctatccaccattatcatcgattggatatcctccgtcgtctccgccgcaacattattcctcaccgccgtacccgtacccgaacccgtatcagtaccattctcattacccggaacagccagtcgctgtttatccacctccgccaccctctgcatcgaatttatatcctccgccgtattacagtacttctccgccgcagcatcaatcctatccgccgcctcccggccattcgttccaccaaacgcaaccgtcacagtcgtttcacgggttcgcgccttcgtctccgcagaatcagcacgggtatggttatccgccgccgacgtcaccgggatatggatacggttgtccgactacacaagtgccgccgaagaataataataataaaccagggcttgggcttgggcttggagtgggagctgggcttctgggaggagcattgggtgggctcttaatcagtgatatagtatccgacattggttttgatttttaa

SEQ ID NO: 91697 - protein, 360 aa, Arabidopsis thaliana
  peptide (1)..(360): Ceres Seq. ID no. 12728894
MANLTLELNVYSAKDLENVNLITKMDVYAVVWITGDDSRKNHKEKTPIDRTGESEPTWNHTVKFSVDQRLAHEGRLTLVVKLVCDRIFGDKDLGEVQVPVLELLHGSSSPSSNGDGQGMMRFVTYQVRTPFGKGQGSLTFSYRFDSPTFKPDQPVSSHVFHQDPPVSSSHVYTNPMDIPSDFSSATTNYPPPQSSEANFYPPLSSIGYPPSSPPQHYSSPPYPYPNPYQYHSHYPEQPVAVYPPPPPSASNLYPPPYYSTSPPQHQSYPPPPGHSFHQTQPSQSFHGFAPSSPQNQHGYGYPPPTSPGYGYGCPTTQVPPKNNNNKPGLGLGLGVGAGLLGGALGGLLISDIVSDIGFDF

SEQ ID NO: 91698 - protein, 336 aa, Arabidopsis thaliana
  peptide (1)..(336): Ceres Seq. ID no. 12728895
MDVYAVVWITGDDSRKNHKEKTPIDRTGESEPTWNHTVKFSVDQRLAHEGRLTLVVKLVCDRIFGDKDLGEVQVPVLELLHGSSSPSSNGDGQGMMRFVTYQVRTPFGKGQGSLTFSYRFDSPTFKPDQPVSSHVFHQDPPVSSSHVYTNPMDIPSDFSSATTNYPPPQSSEANFYPPLSSIGYPPSSPPQHYSSPPYPYPNPYQYHSHYPEQPVAVYPPPPPSASNLYPPPYYSTSPPQHQSYPPPPGHSFHQTQPSQSFHGFAPSSPQNQHGYGYPPPTSPGYGYGCPTTQVPPKNNNNKPGLGLGLGVGAGLLGGALGGLLISDIVSDIGFDF

SEQ ID NO: 91699 - protein, 242 aa, Arabidopsis thaliana
  peptide (1)..(242): Ceres Seq. ID no. 12728896
MMRFVTYQVRTPFGKGQGSLTFSYRFDSPTFKPDQPVSSHVFHQDPPVSSSHVYTNPMDIPSDFSSATTNYPPPQSSEANFYPPLSSIGYPPSSPPQHYSSPPYPYPNPYQYHSHYPEQPVAVYPPPPPSASNLYPPPYYSTSPPQHQSYPPPPGHSFHQTQPSQSFHGFAPSSPQNQHGYGYPPPTSPGYGYGCPTTQVPPKNNNNKPGLGLGLGVGAGLLGGALGGLLISDIVSDIGFDF

SEQ ID NO: 91700 - DNA, 1428 bp, Arabidopsis thaliana
  misc_feature (1)..(1428): Ceres Seq. ID no. 12728922
  misc_feature (1)..(1428): Ortholog of  Ceres SEQ ID NO 14303706 as cited in SEQ ID NO 66068
atgaattccaacttcgggaagagatcatccggatcgaccaatagctttgatttcgatctggggcttggatcgagccaaggtagacctctgaatggtcagaagagccaaacatcttcttattcgagctcgaattcgcagccgagacctgcgtggcagcctggtaagccgtcgtggacgcatcaacctgcaccgaagcagagtacgatccgatctgagatcggaagtggaccgacttcaatggtgggtgatattcatggtaagacgtgggggtcagcttcgggatcgggttcgggtattgggattgtgaataaggatcctagtttgtttggagatttggttggttctgcgataggtcaaggtaaatctagtagaaacgtgccgttgaagaatgcaccgcctgtttcggcttcaggttcgagtaagagtccttattctatggggaatttgggtgattcgttgcctaaatctggtaattcgatgaaaactggtggtggtatgggttatagcagtaatccgagtggtttttctggtggttacacgagctccggtggttttaatgctaatcttggaggtccttcaatgaaaaatatggctgggggcaatctaaatgggtctggtcttccttcgaatagtgatccatttggttctttggttggtttcggatcaaaatcatcaggaagcaaaccaggaaaggttaacaacaatgcacagaatgatacttttgggaattttcaaggagtgtcgaaccttaacagtggcggttctacgggaacaactactcaaatcaacgactttgggggtttccaggcttcgaaatcaaacacattctcatcaggaggtagcttcaatgcttcaaacgttgattttggtgtgcaaccaagtggtccacaatcttcgagtgcaaacgatgatccattaggaatgttctctaattccaaaccctcagctgcaccacctacgccacagaccgaagattggggatttgaaagttttgacggtggggctggttccaccaccgagcttgatggtttgccaccgcctccaccgggtgtatcagctacatcagctaagaacaagggcattgataaccagagacaaggtcagtatgctgatgccataaagtggctctcttgggctgtgattcttatggatagagctggtgatgaagctggatcagccgaggttctttcaacaagggcttcgtgttacaaagaagttggagagtataagaaagctgtagccgactgcacaaaggtacttgatcacgacaagaagaatgtgaccattctggttcaacgagcactgttatacgagagcatggagaaatacaaactcggagctgaagacctaaggatggttctaaagattgatcccgggaatagaatcgctagaagtactgttcaccgcctaaccaaaatggctggttga

SEQ ID NO: 91701 - protein, 475 aa, Arabidopsis thaliana
  peptide (1)..(475): Ceres Seq. ID no. 12728923
MNSNFGKRSSGSTNSFDFDLGLGSSQGRPLNGQKSQTSSYSSSNSQPRPAWQPGKPSWTHQPAPKQSTIRSEIGSGPTSMVGDIHGKTWGSASGSGSGIGIVNKDPSLFGDLVGSAIGQGKSSRNVPLKNAPPVSASGSSKSPYSMGNLGDSLPKSGNSMKTGGGMGYSSNPSGFSGGYTSSGGFNANLGGPSMKNMAGGNLNGSGLPSNSDPFGSLVGFGSKSSGSKPGKVNNNAQNDTFGNFQGVSNLNSGGSTGTTTQINDFGGFQASKSNTFSSGGSFNASNVDFGVQPSGPQSSSANDDPLGMFSNSKPSAAPPTPQTEDWGFESFDGGAGSTTELDGLPPPPPGVSATSAKNKGIDNQRQGQYADAIKWLSWAVILMDRAGDEAGSAEVLSTRASCYKEVGEYKKAVADCTKVLDHDKKNVTILVQRALLYESMEKYKLGAEDLRMVLKIDPGNRIARSTVHRLTKMAG

SEQ ID NO: 91702 - protein, 396 aa, Arabidopsis thaliana
  peptide (1)..(396): Ceres Seq. ID no. 12728924
MVGDIHGKTWGSASGSGSGIGIVNKDPSLFGDLVGSAIGQGKSSRNVPLKNAPPVSASGSSKSPYSMGNLGDSLPKSGNSMKTGGGMGYSSNPSGFSGGYTSSGGFNANLGGPSMKNMAGGNLNGSGLPSNSDPFGSLVGFGSKSSGSKPGKVNNNAQNDTFGNFQGVSNLNSGGSTGTTTQINDFGGFQASKSNTFSSGGSFNASNVDFGVQPSGPQSSSANDDPLGMFSNSKPSAAPPTPQTEDWGFESFDGGAGSTTELDGLPPPPPGVSATSAKNKGIDNQRQGQYADAIKWLSWAVILMDRAGDEAGSAEVLSTRASCYKEVGEYKKAVADCTKVLDHDKKNVTILVQRALLYESMEKYKLGAEDLRMVLKIDPGNRIARSTVHRLTKMAG

SEQ ID NO: 91703 - protein, 330 aa, Arabidopsis thaliana
  peptide (1)..(330): Ceres Seq. ID no. 12728925
MGNLGDSLPKSGNSMKTGGGMGYSSNPSGFSGGYTSSGGFNANLGGPSMKNMAGGNLNGSGLPSNSDPFGSLVGFGSKSSGSKPGKVNNNAQNDTFGNFQGVSNLNSGGSTGTTTQINDFGGFQASKSNTFSSGGSFNASNVDFGVQPSGPQSSSANDDPLGMFSNSKPSAAPPTPQTEDWGFESFDGGAGSTTELDGLPPPPPGVSATSAKNKGIDNQRQGQYADAIKWLSWAVILMDRAGDEAGSAEVLSTRASCYKEVGEYKKAVADCTKVLDHDKKNVTILVQRALLYESMEKYKLGAEDLRMVLKIDPGNRIARSTVHRLTKMAG

SEQ ID NO: 91704 - DNA, 2194 bp, Arabidopsis thaliana
  misc_feature (1)..(2194): Ceres Seq. ID no. 12728930
  misc_feature (1)..(2194): Ortholog of  Ceres SEQ ID NO 12544053 as cited in SEQ ID NO 62492
aaaaaccctagaaactgtaaaacccttgcctatctcttacacacaccaccatcacagttcaacttttgtttgtcaacaacaatgtcttccaaaggtctgaaacctcagaaatcaaccaagaggaaggacaccgatagctctgccaaattcgattctctaaaatcaaagaagccaaagctagtgtctggagaacaacaacaacatgtgaaacctaaatttggtaaacccaaatctgcaggtgataaggagcagagtactaatctatcgaagaaggagcgtcgtgtacaggctaaggagctaacagaagctaggaagaagaagagaaagcctcattacaatcttgagcaagagcttgtatctctatgggagaagatgagacgccgtaatatcggcaaggaggatcgatcaaagctgatttctgaagctataaggaagatgaaggggaaggttccagagattgcagtctcacatgtttcatctcgtgtacttcagacttgtgtgaagttttgctcacaagctgagaaagatgttctcttcacggaactccagccacagtttcttaaccttgcttctaacaaatatgctgttcactttatacagaagatgttggatggagcatctaagcagcagctggcagcttgtatatccagcctcaggggacatgttgctcctcttctccgtcatgtgttcggatctcttgttgtggagcatgcataccatctgggaagtgcagcacaaaaacaagaactccttgcagaattgtattctactgagcttcagttattcaagggcttgaccacatctaacgaaaaaacggtggtggacatcattgctaagctgggactgcaaaaaggcgctgttaaccgacacatgactgccattatccaaccgatacttgagaagggaattgtcgaccacactatcacacacaaattgctgattgaatacctgacaatagctgataagacttctgctgcagatgtgcttcagctactgacaggctcccttcttttgcgtatggttcatacccgtgatggttctaggcttgccatgctttctatcaaacatggaagcgctaaggagagaaagaagattatcaaagcaatgaaagagcatgttaaaaagatggcttttgatcagtttggaagtatggtgcttgcatgtattttttcaatagttgatgacacaaagctcgtgaccaagataattgttcgtgagcttgaggccaccctaaaggatcttgttatggacaagaatggtaggagaccgctattgcagctactgcatccaaattcctcacgttatttaagccatgatgatttggccgctcttgatctttctgttccatcactctgctcaatggataagtcagagacatcctctaaaacaaaggacacagatggtaacgaaattggtgaggagacgaaggatgaacaagaagatacagtagctgaacattctgatcatgaagaaaacgtcacagctatgggtggtaaaaaagacccccttgtgagaagacaggagttgcttgtcaacagtggccttgctgagaggcttattgatgtgtgtgtggagaacgccgaggaattcctccagtcaaaatttggcaatgaggtcatgtatgaggttgcaatcggaggctctgatggtattctctgcccatctctgagcgagaagctgtgtgagctgtacgaagctattagctctgtagcagcagaaccgaaaccccaagaatctgagaaggattcagaacacatcctggaaaactttcactcaagtcggaccataagaaggcttgtcttgaatcgccctggtttcgcgtccattctctttaagaaggccttgtctggaaaatgtcggtcgtgggcacaaggacactgttcaaagatactatctgctttcgtagagactgaagatgttcaagttcgtgagatggctaaaacagagcttcaggtgttggtgaatgaaggtactctgaagatctcagcaaccaagaaacctgaatgatgcaacggcctcacttggctttcagaattgcgaatattatggcaaattttgtccttttgtcactataaagggtagaagcaaatcctctttatgacaaaactgaaaactaatccttgtcacaaaactcatcaatgttggatattatatatgaaatagttttttcttttaaaattgtttattcaagtct

SEQ ID NO: 91705 - protein, 668 aa, Arabidopsis thaliana
  peptide (1)..(668): Ceres Seq. ID no. 12728931
KNPRNCKTLAYLLHTPPSQFNFCLSTTMSSKGLKPQKSTKRKDTDSSAKFDSLKSKKPKLVSGEQQQHVKPKFGKPKSAGDKEQSTNLSKKERRVQAKELTEARKKKRKPHYNLEQELVSLWEKMRRRNIGKEDRSKLISEAIRKMKGKVPEIAVSHVSSRVLQTCVKFCSQAEKDVLFTELQPQFLNLASNKYAVHFIQKMLDGASKQQLAACISSLRGHVAPLLRHVFGSLVVEHAYHLGSAAQKQELLAELYSTELQLFKGLTTSNEKTVVDIIAKLGLQKGAVNRHMTAIIQPILEKGIVDHTITHKLLIEYLTIADKTSAADVLQLLTGSLLLRMVHTRDGSRLAMLSIKHGSAKERKKIIKAMKEHVKKMAFDQFGSMVLACIFSIVDDTKLVTKIIVRELEATLKDLVMDKNGRRPLLQLLHPNSSRYLSHDDLAALDLSVPSLCSMDKSETSSKTKDTDGNEIGEETKDEQEDTVAEHSDHEENVTAMGGKKDPLVRRQELLVNSGLAERLIDVCVENAEEFLQSKFGNEVMYEVAIGGSDGILCPSLSEKLCELYEAISSVAAEPKPQESEKDSEHILENFHSSRTIRRLVLNRPGFASILFKKALSGKCRSWAQGHCSKILSAFVETEDVQVREMAKTELQVLVNEGTLKISATKKPE

SEQ ID NO: 91706 - protein, 641 aa, Arabidopsis thaliana
  peptide (1)..(641): Ceres Seq. ID no. 12728932
MSSKGLKPQKSTKRKDTDSSAKFDSLKSKKPKLVSGEQQQHVKPKFGKPKSAGDKEQSTNLSKKERRVQAKELTEARKKKRKPHYNLEQELVSLWEKMRRRNIGKEDRSKLISEAIRKMKGKVPEIAVSHVSSRVLQTCVKFCSQAEKDVLFTELQPQFLNLASNKYAVHFIQKMLDGASKQQLAACISSLRGHVAPLLRHVFGSLVVEHAYHLGSAAQKQELLAELYSTELQLFKGLTTSNEKTVVDIIAKLGLQKGAVNRHMTAIIQPILEKGIVDHTITHKLLIEYLTIADKTSAADVLQLLTGSLLLRMVHTRDGSRLAMLSIKHGSAKERKKIIKAMKEHVKKMAFDQFGSMVLACIFSIVDDTKLVTKIIVRELEATLKDLVMDKNGRRPLLQLLHPNSSRYLSHDDLAALDLSVPSLCSMDKSETSSKTKDTDGNEIGEETKDEQEDTVAEHSDHEENVTAMGGKKDPLVRRQELLVNSGLAERLIDVCVENAEEFLQSKFGNEVMYEVAIGGSDGILCPSLSEKLCELYEAISSVAAEPKPQESEKDSEHILENFHSSRTIRRLVLNRPGFASILFKKALSGKCRSWAQGHCSKILSAFVETEDVQVREMAKTELQVLVNEGTLKISATKKPE

SEQ ID NO: 91707 - protein, 544 aa, Arabidopsis thaliana
  peptide (1)..(544): Ceres Seq. ID no. 12728933
MRRRNIGKEDRSKLISEAIRKMKGKVPEIAVSHVSSRVLQTCVKFCSQAEKDVLFTELQPQFLNLASNKYAVHFIQKMLDGASKQQLAACISSLRGHVAPLLRHVFGSLVVEHAYHLGSAAQKQELLAELYSTELQLFKGLTTSNEKTVVDIIAKLGLQKGAVNRHMTAIIQPILEKGIVDHTITHKLLIEYLTIADKTSAADVLQLLTGSLLLRMVHTRDGSRLAMLSIKHGSAKERKKIIKAMKEHVKKMAFDQFGSMVLACIFSIVDDTKLVTKIIVRELEATLKDLVMDKNGRRPLLQLLHPNSSRYLSHDDLAALDLSVPSLCSMDKSETSSKTKDTDGNEIGEETKDEQEDTVAEHSDHEENVTAMGGKKDPLVRRQELLVNSGLAERLIDVCVENAEEFLQSKFGNEVMYEVAIGGSDGILCPSLSEKLCELYEAISSVAAEPKPQESEKDSEHILENFHSSRTIRRLVLNRPGFASILFKKALSGKCRSWAQGHCSKILSAFVETEDVQVREMAKTELQVLVNEGTLKISATKKPE

SEQ ID NO: 91708 - DNA, 573 bp, Arabidopsis thaliana
  misc_feature (1)..(573): Ceres Seq. ID no. 12728950
  misc_feature (1)..(573): Ortholog of  Ceres SEQ ID NO 13595210 as cited in SEQ ID NO 56285
atgtctgagggatcagaagatacgaaaacaaaactcgactctgccggagagttatcagatgttgataacgagaactgcagtagcagcggaagtggcggtggtagtagttctggtgataccaaaaggacttgcgttgattgcggaactatccgaactcctctttggcgtggtggtcctgccggaccaaagtcattgtgcaatgcttgtgggatcaagagtaggaagaagagacaagcagcacttggtatgagatcagaggagaagaagaagaacagaaaaagcaattgcaataatgatctaaacctcgaccatcgaaacgccaagaaatacaaaatcaacatagttgatgatggcaagatcgacatcgatgatgatccgaaaatttgcaataacaagcgtagtagtagtagtagcagtaacaaaggagtgagtaagtttttggatttagggtttaaagtaccggtgatgaagagatcagcggttgagaagaagaggttatggagaaaactcggtgaggaagaaagagctgctgtgcttctcatggctctctcttgtagctctgtttacgcctaa

SEQ ID NO: 91709 - protein, 190 aa, Arabidopsis thaliana
  peptide (1)..(190): Ceres Seq. ID no. 12728951
MSEGSEDTKTKLDSAGELSDVDNENCSSSGSGGGSSSGDTKRTCVDCGTIRTPLWRGGPAGPKSLCNACGIKSRKKRQAALGMRSEEKKKNRKSNCNNDLNLDHRNAKKYKINIVDDGKIDIDDDPKICNNKRSSSSSSNKGVSKFLDLGFKVPVMKRSAVEKKRLWRKLGEEERAAVLLMALSCSSVYA

SEQ ID NO: 91710 - protein, 108 aa, Arabidopsis thaliana
  peptide (1)..(108): Ceres Seq. ID no. 12728952
MRSEEKKKNRKSNCNNDLNLDHRNAKKYKINIVDDGKIDIDDDPKICNNKRSSSSSSNKGVSKFLDLGFKVPVMKRSAVEKKRLWRKLGEEERAAVLLMALSCSSVYA

SEQ ID NO: 91711 - DNA, 1980 bp, Arabidopsis thaliana
  misc_feature (1)..(1980): Ceres Seq. ID no. 12728957
  misc_feature (1)..(1980): Ortholog of  Ceres SEQ ID NO 13657677 as cited in SEQ ID NO 66119
atgagaggctttgcttcttcagcatctagaatagcgacggcggcagcagcttccaaatcactaaacgcttccacatccgtaaaccctaagctctcaaaaaccctaaactcttcaggtaaacccaccaatcctctgaaccagcgttacatttcgcaagtcatagagagaaaagattggtttttgatactgaatcaagaattcaccactcatcgaattggtctcaacactcgattcgtcatcagcgttttgcagaatcaagacaacccattacactccctgcgattttacctctgggtctccaacttcgacccggtttacgctaaggatcagtctctgaagagtgttctagggaacgcactttttcgtaaaggccccttattgttgtctatggaattgcttaaagagattagagattcagggtatcggattagtgatgaattgatgtgtgttttgatcggaagctggggaagattaggtttagctaagtactgtaatgatgtttttgctcagatatcttttcttggaatgaaaccaagtacaaggctttataatgctgtgattgatgcgttggtgaagtctaattcacttgatttggcttacctcaagtttcagcagatgcgtagtgatggctgtaaaccggatcggtttacctataatatacttatacatggtgtttgcaagaagggtgtggttgatgaagctattcgattggttaaacagatggaacaggaagggaatagacccaatgtgttcacatacacgattttgatcgacgggtttttgatagcagggagggttgatgaggcgttgaagcaattggagatgatgcgggtgagaaagttgaatcctaatgaagctacaatcagaactttcgtacacgggattttccgttgcttgccgccgtgtaaagcgtttgaggttttggttgggtttatggagaaagactcaaacttgcaaagagttggttacgatgctgtgttgtattgtctttcaaacaactcaatggctaaagagactggtcaattcttgaggaagataggtgagagaggttatattccggatagctcaacattcaatgctgcgatgagttgtctcctaaaagggcatgatcttgttgagacttgtaggatatttgacggttttgtcagccgtggagttaagccaggattcaatggttatcttgtgttagttcaagctctgttgaatgctcagaggttctctgaaggtgaccggtatctgaaacaaatgggtgttgacgggcttctatcaagtgtatatagttataatgcggtaattgactgtctctgcaaggctcgacgcatagagaatgcagctatgttcttaacagagatgcaggatagaggtatttctccgaatctcgtaactttcaatacctttctgagcggttatagcgtgaggggtgatgtaaagaaggttcacggcgtgctagagaagcttcttgtacatggtttcaaaccagacgtgatcactttcagtttgatcataaactgtctttgcagagcaaaagaaattaaagatgcatttgactgtttcaaggagatgttggaatggggtattgagccaaacgagatcacatacaatatcttgattcgctcctgttgttccaccggagataccgatagatcagtgaagctgtttgcgaagatgaaggaaaacgggttaagtccagacctttatgcgtacaatgcgactattcagagtttttgcaagatgagaaaggttaagaaggctgaggaattgcttaaaacaatgctgagaattggtttgaaaccagataactttacatatagcactctcatcaaagctctaagtgaatctggaagagagagtgaagcaagagagatgttcagttcaatcgaaagacatggatgtgttccagattcatatactaagcgtcttgttgaagaacttgacctaagaaaaagtggactctcgagagaaaccgtgtcagcctcatag

SEQ ID NO: 91712 - protein, 659 aa, Arabidopsis thaliana
  peptide (1)..(659): Ceres Seq. ID no. 12728958
MRGFASSASRIATAAAASKSLNASTSVNPKLSKTLNSSGKPTNPLNQRYISQVIERKDWFLILNQEFTTHRIGLNTRFVISVLQNQDNPLHSLRFYLWVSNFDPVYAKDQSLKSVLGNALFRKGPLLLSMELLKEIRDSGYRISDELMCVLIGSWGRLGLAKYCNDVFAQISFLGMKPSTRLYNAVIDALVKSNSLDLAYLKFQQMRSDGCKPDRFTYNILIHGVCKKGVVDEAIRLVKQMEQEGNRPNVFTYTILIDGFLIAGRVDEALKQLEMMRVRKLNPNEATIRTFVHGIFRCLPPCKAFEVLVGFMEKDSNLQRVGYDAVLYCLSNNSMAKETGQFLRKIGERGYIPDSSTFNAAMSCLLKGHDLVETCRIFDGFVSRGVKPGFNGYLVLVQALLNAQRFSEGDRYLKQMGVDGLLSSVYSYNAVIDCLCKARRIENAAMFLTEMQDRGISPNLVTFNTFLSGYSVRGDVKKVHGVLEKLLVHGFKPDVITFSLIINCLCRAKEIKDAFDCFKEMLEWGIEPNEITYNILIRSCCSTGDTDRSVKLFAKMKENGLSPDLYAYNATIQSFCKMRKVKKAEELLKTMLRIGLKPDNFTYSTLIKALSESGRESEAREMFSSIERHGCVPDSYTKRLVEELDLRKSGLSRETVSAS

SEQ ID NO: 91713 - protein, 530 aa, Arabidopsis thaliana
  peptide (1)..(530): Ceres Seq. ID no. 12728959
MELLKEIRDSGYRISDELMCVLIGSWGRLGLAKYCNDVFAQISFLGMKPSTRLYNAVIDALVKSNSLDLAYLKFQQMRSDGCKPDRFTYNILIHGVCKKGVVDEAIRLVKQMEQEGNRPNVFTYTILIDGFLIAGRVDEALKQLEMMRVRKLNPNEATIRTFVHGIFRCLPPCKAFEVLVGFMEKDSNLQRVGYDAVLYCLSNNSMAKETGQFLRKIGERGYIPDSSTFNAAMSCLLKGHDLVETCRIFDGFVSRGVKPGFNGYLVLVQALLNAQRFSEGDRYLKQMGVDGLLSSVYSYNAVIDCLCKARRIENAAMFLTEMQDRGISPNLVTFNTFLSGYSVRGDVKKVHGVLEKLLVHGFKPDVITFSLIINCLCRAKEIKDAFDCFKEMLEWGIEPNEITYNILIRSCCSTGDTDRSVKLFAKMKENGLSPDLYAYNATIQSFCKMRKVKKAEELLKTMLRIGLKPDNFTYSTLIKALSESGRESEAREMFSSIERHGCVPDSYTKRLVEELDLRKSGLSRETVSAS

SEQ ID NO: 91714 - protein, 512 aa, Arabidopsis thaliana
  peptide (1)..(512): Ceres Seq. ID no. 12728960
MCVLIGSWGRLGLAKYCNDVFAQISFLGMKPSTRLYNAVIDALVKSNSLDLAYLKFQQMRSDGCKPDRFTYNILIHGVCKKGVVDEAIRLVKQMEQEGNRPNVFTYTILIDGFLIAGRVDEALKQLEMMRVRKLNPNEATIRTFVHGIFRCLPPCKAFEVLVGFMEKDSNLQRVGYDAVLYCLSNNSMAKETGQFLRKIGERGYIPDSSTFNAAMSCLLKGHDLVETCRIFDGFVSRGVKPGFNGYLVLVQALLNAQRFSEGDRYLKQMGVDGLLSSVYSYNAVIDCLCKARRIENAAMFLTEMQDRGISPNLVTFNTFLSGYSVRGDVKKVHGVLEKLLVHGFKPDVITFSLIINCLCRAKEIKDAFDCFKEMLEWGIEPNEITYNILIRSCCSTGDTDRSVKLFAKMKENGLSPDLYAYNATIQSFCKMRKVKKAEELLKTMLRIGLKPDNFTYSTLIKALSESGRESEAREMFSSIERHGCVPDSYTKRLVEELDLRKSGLSRETVSAS

SEQ ID NO: 91715 - DNA, 1002 bp, Arabidopsis thaliana
  misc_feature (1)..(1002): Ceres Seq. ID no. 12728965
  misc_feature (1)..(1002): Ortholog of  Ceres SEQ ID NO 14307280 as cited in SEQ ID NO 59443
  misc_feature (1)..(1002): Ortholog of  Ceres SEQ ID NO 14316536 as cited in SEQ ID NO 60272
  misc_feature (1)..(1002): Ortholog of  Ceres SEQ ID NO 13598570 as cited in SEQ ID NO 65434
  misc_feature (1)..(1002): Ortholog of  Ceres SEQ ID NO 13660333 as cited in SEQ ID NO 67464
  misc_feature (1)..(1002): Ortholog of  Ceres SEQ ID NO 13596238 as cited in SEQ ID NO 68834
atggtttcgaaaccgctattctccctattgcttctcacggttgcattggttgtgtttcaaaccggaacccttgtcaacgctgaagattccgagccttcgagttcaacgagaaagcctctggtgaagattgtgaaaggtaaaaaattatgcgacaaaggatgggaatgcaaaggatggtccgagtattgttgcaaccatacaatctccgatttttttgagacatatcaattcgagaatctattctctaagcgtaacagtccagtggctcacgccgtcggcttttgggattaccgatcattcattactgcggctgccgagtaccagcctcttggtttcggtactgctggtgagaaacttcaagggatgaaggaagtcgctgcgtttcttggccacgttgggagcaaaacctcatgcgggtacggggttgcaacaggcggaccattagcttggggattgtgttacaacaaggagatgagtcctgatcagctttattgcgatgattactacaaattgacatatccttgtactcctggtgtctcgtaccacggtcgaggagctttaccggtttactggaattacaattatggtcaaaccggggaggctttgaaagtggatctactgagtcatccagagtatctcgagaacaatgctacgttagcgtttcaagcggcgatttggcggtggatgacgccaccgaagaagcatttaccgtcggcgcacgatgttttcgtcggaaaatggaagccaacaaagaatgacactgctgcaaaacgaactccggggtttggagccaccataaacgttctttacggcgatcaaatctgcaacagcggattcgataacgatgagatgaacaacattgtttctcattatttgtattatcttgatctgataggtgttggacgagaagaagctggtcctcacgagaagctgtcatgcgcagatcaagaacctttttcttcttcctcctctgctcctccgagttctggttcctcttcttga

SEQ ID NO: 91716 - protein, 333 aa, Arabidopsis thaliana; identical to SEQ ID NO: 42185
  peptide (1)..(333): Ceres Seq. ID no. 12728966

SEQ ID NO: 91717 - protein, 212 aa, Arabidopsis thaliana
  peptide (1)..(212): Ceres Seq. ID no. 12728967
MKEVAAFLGHVGSKTSCGYGVATGGPLAWGLCYNKEMSPDQLYCDDYYKLTYPCTPGVSYHGRGALPVYWNYNYGQTGEALKVDLLSHPEYLENNATLAFQAAIWRWMTPPKKHLPSAHDVFVGKWKPTKNDTAAKRTPGFGATINVLYGDQICNSGFDNDEMNNIVSHYLYYLDLIGVGREEAGPHEKLSCADQEPFSSSSSAPPSSGSSS

SEQ ID NO: 91718 - protein, 176 aa, Arabidopsis thaliana
  peptide (1)..(176): Ceres Seq. ID no. 12728968
MSPDQLYCDDYYKLTYPCTPGVSYHGRGALPVYWNYNYGQTGEALKVDLLSHPEYLENNATLAFQAAIWRWMTPPKKHLPSAHDVFVGKWKPTKNDTAAKRTPGFGATINVLYGDQICNSGFDNDEMNNIVSHYLYYLDLIGVGREEAGPHEKLSCADQEPFSSSSSAPPSSGSSS

SEQ ID NO: 91719 - DNA, 552 bp, Arabidopsis thaliana
  misc_feature (1)..(552): Ceres Seq. ID no. 12728984
  misc_feature (1)..(552): Ortholog of  Ceres SEQ ID NO 15176173 as cited in SEQ ID NO 0
atgaaaagatcatccaccgtcacatcattaccgtgtctctccctctttctccttctgcttctgccgtcggtagtccaatcctccgacgaccttatcgacaaaatatgccaagcaacgccattctgcgacctatgtgaagcctctcttcgtccattctctccgtcaccttctgatcccaaatccttaggtgccgctatggccagcgtcgtgctcggaaacatgaccgatactttaggatacatccaatcgctgatcaaacatgctcacgatcctgcggcagagcgcgcgctggctcagtgcgctgagctgtaccggccggtggtcaagtttaatattcctcaggcgatggaggcaatgcagggcggcaaattcggctttgcgatatatgtgctcggagacgccgagaagcagactgattcttgtcagaaaggaatcacgaacgccggcgccgacgatgaaagctcggtggctgttacggctagaaacaagctagttaaaaatctttgtgacgtggcgatttctgtgcttaagtctctgatgaatggtctttaa

SEQ ID NO: 91720 - protein, 183 aa, Arabidopsis thaliana
  peptide (1)..(183): Ceres Seq. ID no. 12728985
MKRSSTVTSLPCLSLFLLLLLPSVVQSSDDLIDKICQATPFCDLCEASLRPFSPSPSDPKSLGAAMASVVLGNMTDTLGYIQSLIKHAHDPAAERALAQCAELYRPVVKFNIPQAMEAMQGGKFGFAIYVLGDAEKQTDSCQKGITNAGADDESSVAVTARNKLVKNLCDVAISVLKSLMNGL

SEQ ID NO: 91721 - protein, 118 aa, Arabidopsis thaliana
  peptide (1)..(118): Ceres Seq. ID no. 12728986
MASVVLGNMTDTLGYIQSLIKHAHDPAAERALAQCAELYRPVVKFNIPQAMEAMQGGKFGFAIYVLGDAEKQTDSCQKGITNAGADDESSVAVTARNKLVKNLCDVAISVLKSLMNGL

SEQ ID NO: 91722 - protein, 110 aa, Arabidopsis thaliana
  peptide (1)..(110): Ceres Seq. ID no. 12728987
MTDTLGYIQSLIKHAHDPAAERALAQCAELYRPVVKFNIPQAMEAMQGGKFGFAIYVLGDAEKQTDSCQKGITNAGADDESSVAVTARNKLVKNLCDVAISVLKSLMNGL

SEQ ID NO: 91723 - DNA, 1437 bp, Arabidopsis thaliana
  misc_feature (1)..(1437): Ceres Seq. ID no. 12728992
  misc_feature (1)..(1437): Ortholog of  Ceres SEQ ID NO 13594349 as cited in SEQ ID NO 58161
  misc_feature (1)..(1437): Ortholog of  Ceres SEQ ID NO 13663419 as cited in SEQ ID NO 66561
atgaatttgacacttccgatgaaaaaacaaaaatttctgctaatcatctcattattgatattattatcattacttcatcaagattatcacattgaagctcaaaattcagacaaagtagtcaatcttcctgaacaaccactgaacccaaagatctctcatttctcaggttatgtcaacgtcaatcaagaaaatacacgatcactcttcttttggttcttcgaagcattgtctgaatctccttcaacaagacctctagttctctggctcaatggaggtcctggatgttcatcgattggatatggagcagcatctgaattaggaccttttcgtgttgttgaaaatgggacaagtcttagtttcaatcaatactcttgggtccaagaagcgaatatgttgtttttagaatcaccagtcggagtagggttttcgtacacgaactcatcatctgatttggaaaacctcaacgacgctttcgttgcggaagatgcatacaacttcatggttgcttggtttgcaaggtatcctcagtataagtctcgtgatttcttcatagctggtgaaagctatgccggtcactactcacctcagctagccgagcttatatacgatcggaacaaagttcagccaaaggactccttcattaatctcaaaggcttcatcgtgggaaatccattgacggacgatgagtacgataacaaagggattctagaatacgcatggagccatgcagtgatctctgatcatctttacgactccgcaaaacataactgcgacttcaagtcttcgaactggtcagagccatgcaacgttgctatgaacacagtgttcacaaaatacaaagagattgatatttataacatatatgctcccaagtgcatatctaatagctcatcaggagcttcctacttaggtttcggagtcaatgataagtctccggcggttaaagactggttcaagagagtgagatggtttgaaggatacgatccttgttactctaattacgctgaagaatatttcaatagagtcgatgttcgattgtctcttcatgctactacacgaaatgtagcaaggtggaaagtttgcaatgattcgatattgcaaacgtaccattttacagtctcctcaatgttgcctacttatagtaagctcatcaaagctggcctcaagatatgggtttatagtggagatgccgacgggagagtcccggtgatcggaagtcggtattgtgttgaagctttagggatttccgtcaaatcggagtggcgttcttggttccacaatcatcaggtgggagggagaataacggagtacgagggagggttaacgttcgtaacggtgagaggagctggacacttggttcctctcaataaacctgaagaagctctcgcgcttttccggtccttccttaacggccaagaacttccgtcaagcccctag

SEQ ID NO: 91724 - protein, 478 aa, Arabidopsis thaliana
  peptide (1)..(478): Ceres Seq. ID no. 12728993
MNLTLPMKKQKFLLIISLLILLSLLHQDYHIEAQNSDKVVNLPEQPLNPKISHFSGYVNVNQENTRSLFFWFFEALSESPSTRPLVLWLNGGPGCSSIGYGAASELGPFRVVENGTSLSFNQYSWVQEANMLFLESPVGVGFSYTNSSSDLENLNDAFVAEDAYNFMVAWFARYPQYKSRDFFIAGESYAGHYSPQLAELIYDRNKVQPKDSFINLKGFIVGNPLTDDEYDNKGILEYAWSHAVISDHLYDSAKHNCDFKSSNWSEPCNVAMNTVFTKYKEIDIYNIYAPKCISNSSSGASYLGFGVNDKSPAVKDWFKRVRWFEGYDPCYSNYAEEYFNRVDVRLSLHATTRNVARWKVCNDSILQTYHFTVSSMLPTYSKLIKAGLKIWVYSGDADGRVPVIGSRYCVEALGISVKSEWRSWFHNHQVGGRITEYEGGLTFVTVRGAGHLVPLNKPEEALALFRSFLNGQELPSSP

SEQ ID NO: 91725 - protein, 472 aa, Arabidopsis thaliana
  peptide (1)..(472): Ceres Seq. ID no. 12728994
MKKQKFLLIISLLILLSLLHQDYHIEAQNSDKVVNLPEQPLNPKISHFSGYVNVNQENTRSLFFWFFEALSESPSTRPLVLWLNGGPGCSSIGYGAASELGPFRVVENGTSLSFNQYSWVQEANMLFLESPVGVGFSYTNSSSDLENLNDAFVAEDAYNFMVAWFARYPQYKSRDFFIAGESYAGHYSPQLAELIYDRNKVQPKDSFINLKGFIVGNPLTDDEYDNKGILEYAWSHAVISDHLYDSAKHNCDFKSSNWSEPCNVAMNTVFTKYKEIDIYNIYAPKCISNSSSGASYLGFGVNDKSPAVKDWFKRVRWFEGYDPCYSNYAEEYFNRVDVRLSLHATTRNVARWKVCNDSILQTYHFTVSSMLPTYSKLIKAGLKIWVYSGDADGRVPVIGSRYCVEALGISVKSEWRSWFHNHQVGGRITEYEGGLTFVTVRGAGHLVPLNKPEEALALFRSFLNGQELPSSP

SEQ ID NO: 91726 - protein, 348 aa, Arabidopsis thaliana
  peptide (1)..(348): Ceres Seq. ID no. 12728995
MLFLESPVGVGFSYTNSSSDLENLNDAFVAEDAYNFMVAWFARYPQYKSRDFFIAGESYAGHYSPQLAELIYDRNKVQPKDSFINLKGFIVGNPLTDDEYDNKGILEYAWSHAVISDHLYDSAKHNCDFKSSNWSEPCNVAMNTVFTKYKEIDIYNIYAPKCISNSSSGASYLGFGVNDKSPAVKDWFKRVRWFEGYDPCYSNYAEEYFNRVDVRLSLHATTRNVARWKVCNDSILQTYHFTVSSMLPTYSKLIKAGLKIWVYSGDADGRVPVIGSRYCVEALGISVKSEWRSWFHNHQVGGRITEYEGGLTFVTVRGAGHLVPLNKPEEALALFRSFLNGQELPSSP

SEQ ID NO: 91727 - DNA, 6027 bp, Arabidopsis thaliana
  misc_feature (1)..(6027): Ceres Seq. ID no. 12729019
  misc_feature (1)..(6027): Ortholog of  Ceres SEQ ID NO 13600310 as cited in SEQ ID NO 5086
atgtcccgaaacgttccgagaatagagatgccggaatcggaagaaaacgagttcgcgagcttgtctttgttttcgccttcaagacctcctctgaattcgataccggatccaagtcaaattcagaaggcgaatcatctaccccatttcgatttggttcagaaattggaaggtacaagagcgcagcatcaacgaacacttggtccagagaagaaatttgaagttttggaaggtagagctggaaattcgagtgattcgaaccctaagattgttaatcgtaatggaaaatctcggtcggagccaaactctgcgcagagtacgcccactaggaacggtgctagggtttctcttggtggtggttgtgctaccggcgcaagatttcttcagtctttcggtggaagaggaaggattccgaggggagtttctattgctgagtctgttagcttcgcggaaacaactccacattttgaactcaatgaagatcattcgttttggaaagaccacaatgtgcaggttttgataaggctgagaccattaggcacaatggaaagggctaatcaaggatatggccatccagaggccagattcacctttgaccacgttgccagtgagacaatatctcaggaaaaactgtttcgcgttgctggactgcccatggtggagaattgcttatctggttacaacagctgtgtgtttgcctacggtcagactggtagtggcaagacttatactatgatgggagagatatctgaggcagagggaagcctcggtgaagactgcggagttactgctcgtatttttgagtatctgttctcaagaattaaaatggaagaagaggaaaggagagatgaaaatttgaagttcagttgcaaatgttcttttcttgagatatataacgagcagataaccgacctcttggaaccatcgtcaaccaatttgcaacttagagaagacttggggaaaggagtatatgttgaaaatcttgtagaacataatgtgagaactgttagtgacgttctaaagcttctactacagggagcaactaaccggaagattgctgcaacccgtatgaacagtgaaagcagcagatcccacagcgttttcacttgtacaattgagagtctctgggagaaagattctctaactcgttcaagatttgccagactaaacttggtcgatttggctggttctgaaaggcagaaaagctcaggtgcggaaggggatcgcctaaaagaagcagcaaacattaacaaatccttatcaactttgggcttggtgataatgtctctggtggatttggcacatgggaaacatagacatgttccctatagagattctcgacttacctttttactgcaggattctctagggggtaactccaaaacaatgataatagctaatgtcagcccatctctttgctctacaaacgaaaccctcagcaccctgaagttcgcgcaacgggcaaaactaatccagaataatgctaaagtaaatgaagatgcctctggggatgttacagcactccaacaggaaataagaaagttaaaggtccaactgacttctcttctgaagaaccatgactcttgtggggctctttcagactgcatatcttctcttgaagaatccagatactctggtacatgtaaagtagcaggagaaacaagacaagacaagtgtcactgtcaggtgcataattcactgagagtgaaggtgaaaaatatgaacgataatatgattggtgctctcagaagggaaaagattgctgaatctgcccttcagaagtccgaggctgagattgagcgtatagattgcttggttagagacatggaagaagatgctaagcgcattaaaataatgcttaatcttagggaagagaaagttggagagatggaattctgtacgtctggttcattgatgacaaaagagtgtctcattgaagaaaataaaactctaaaaggagagatcaagcttcttcgcgacagcattgacaagaatccagagttgacacgttcagccttggagaacaccaagctccgggagcagctacaacgatatcagaaattttacgagcatggggaacgagaggcattacttgctgaggtgacaggactacgtgaccagcttcttgatgttcttgaagcaaaagatgaatccttttctaaacacgttatgaaggagaacgaaatggaaaaggaattcgaagactgcagaaacatgaactctagtttgatcagagaactagatgaaatacaagcaggacttggaagatacttgaatttcgatcaaatacaatccaacgttgttgcatcttccaccagaggagctgagcaggcagaaacaatgccaactataagtgaaatccaagaggaggtggctatttcacatagtaaaaactatgatagaggtgcactagtgaagacagatgaggggatagaccggtcaatcctgcagttcaagttagggaagttaatgaaggacctcgaggaggccagaacactcaattgtaaatatgaaaaagatcataagtcgcagttatctcaacaagaagacattgaagtagtccgtgagcaagtcgagacagaaactgctagaaccattcttgagttgcaggaagaggtgattgctctccagtctgaatttcaaagaagaatctgtaacttgaccgaggaaaatcagtcgataaaagatactataactgctagagagtcagaaataagagcacttaaccaagactgggaaaaggctaccttagaactgactaatttcatcgtcgctgggtccaaatccatcaaaaatgcctctacacagattgaaagtatcatctgttcatttccacaagtgaatgcgtggataggtgattatgttgagaaggctgcaaaaaattgtataaaaaaggaagaaacaattttacttctacagaaaagcttggaagatgcaaggatattagtagcagagatgaatttgaagctgaattctttaaagggcgcaacaattgctctcaacgaatttcaactgggtggcaatgctgcaacgactgaagaggctttcaacttgaataatgatgtagacaggatgagcgatgaggtagacacgcttgagagtaactttaaagcaaatcaatattctattctgaaaacagaacgacatgccgaagctgctttagctgttacaaaatggctttctgattctagagatcaacaccaaatgatggaaaaagtacaagatcaatcagttaaagaatttggtacattaagttcaatctctgcttctcttagtgcggaagggaatgctgatattagtttgtcaagggatggacatctaagtgacgcaacatatccaaagggtgatgagctttcaacatcaagctctgacttttcaaactgtagatggcaacatgattgtgcactgaacgtaaagtgtcaaggagtttcaagttctgaatctgacgctcaagaaagtaataacaagattacatcagcagctttaattgctaagaatggttctgcacattctgtttactgtggagaggggaggcagtcagttgagaagccattgaccattatgatggggagagaagaaacagaatacaaatgcagtaaaccgctttcttctggggtatatatgggtcttatgcagagaatggatcctgttagaactttcttcgatcgatttgaggaagtcaatgctaccatgaaagaagctgatctcacaatatgtgaattagtaaaggccaatgaaaaatcaaatagtgttactgaaatgtggcttcaaacccatgaagagttaataagtaaggaaaaaaatttgatggatgatcttgaacaggtcaagtctatactatctgcttgtgaagaagaaaaacaagtcttgctaaatcaaacacacaccactttggcggacatggaaaattcagtgtctttgcttgaagaatattttcaggaaatgaaaagaggagtagaagaaacagtagaggctttgttttcccatgcccgtttagctggaaaagagcttctccaattgatttccaactcaagaccatcacttgaacagattgcatctgaattcatggagagagagttcaccatgtatgcaacataccaatgccacattgggaaactgatcgatcaaattttggatcagagaaaacaggttatcactcccaacctttcaggccaagaaaccaatcagtcagtgaagattaatgccattgggtataatgccgaagatgaagtcactaaaaagcaaagcagagaagagattgtcacaggcttagaaaatgatgaagttgttcagtcacatgaaagcctattatatgagaacttgtatctgaaaaaggagcttgagagaaaagaagctttgtttgaaggcttgctttttgattttaggctacttcaggaatcagcatcaaataaaagagatatcaagaatgaaatggatgagctgtttgacgcattatgcaaagtacagctagagctggaactgaaagcaagtcaagttcatgagctttttgttcataacgagaatcttgaaaattgctccattgacttgaaaacggcgttgttcacgtcacagtcagatctagagcaggctaaacagaggatacaaattcttgcggagcagaatgatgagttaagggcccttgttagtgatctctgtaaggaaaaggctgcagctgaggagggattggacgaacaaagggatcttgtcaataggttggaaaaagaaatccttcacttgactactacagcagagaagcaattgctttctgcggtcaagtccattaaagaaaatttgaaaaagaccagcgatgagaaagatcagattgttgacgaaatatgttcgttaaataataagcttgagttggcctatgctatagctgatgaaaaagaagcaattgccgtagaggctcatcaggaatctgaagcaagtaaaatatatgctgaacaaaaggaagaggaggtcaagattctagaaatttctgttgaggaacttgagcgtacgataaatatattagaaagacgggtgtatgatatggatgaagaagtaaaaaggcatcgtaccacccaagattcgttagagacagagctgcaagctctcagacagagattgtttcgatttgaaaacttcactggcactatggtcacaaccaatgaaagcacagaggaatataagagtcacatatccaggtcgacagggctgcaaggtgcgcatagtcagatacaagtcctacagaaggaagtagcagaacaaaccaaagagattaaacagctaaaagagtacatctccgagatcttactgcattctgaggcccaatcatctgcttaccaagagaagatgaaactggagaaggatcaggaattgacaatggcaagggttcgtgttgaagaattggagtcattgctagctgttaaacagaaagagatttgcacattgaacacgaggatagctgcagctgatagcatgactcatgatgtgattcgggatttacttggtgtgaaaatggatataaccagctatgctgagttgattgaccagcaccaggtccaaagagtggttgaaaaggctcagcaacatgctgaagagatcctgtccaaggagcaagaagtcatgaacctgaagagacatattgattatctatttaaggatagagagagttgcatgtcagagttgaacaagaaagatacagatgttcttgcgacacagatatcattagaccaactacaagagcgagttcagttgctttctatgcaaaacgaaatgcttaagaatgacaagagcaatttgctgaggaagttagctgaacttgatcgaacagtccacaatgcacaggccagtaaccatcgtgttccacagacaacaaaggatacagcgtcatttaaacttgctgatactgattataccaagagactggaaaacgctcagaagcttctttcccatgctaataacgaattggcaaagtatcgcaaaacgagcaataaccatccatctacaagaactcaaggacagagctctggtacaagatatcggtaa

SEQ ID NO: 91728 - protein, 2008 aa, Arabidopsis thaliana
  peptide (1)..(2008): Ceres Seq. ID no. 12729020
MSRNVPRIEMPESEENEFASLSLFSPSRPPLNSIPDPSQIQKANHLPHFDLVQKLEGTRAQHQRTLGPEKKFEVLEGRAGNSSDSNPKIVNRNGKSRSEPNSAQSTPTRNGARVSLGGGCATGARFLQSFGGRGRIPRGVSIAESVSFAETTPHFELNEDHSFWKDHNVQVLIRLRPLGTMERANQGYGHPEARFTFDHVASETISQEKLFRVAGLPMVENCLSGYNSCVFAYGQTGSGKTYTMMGEISEAEGSLGEDCGVTARIFEYLFSRIKMEEEERRDENLKFSCKCSFLEIYNEQITDLLEPSSTNLQLREDLGKGVYVENLVEHNVRTVSDVLKLLLQGATNRKIAATRMNSESSRSHSVFTCTIESLWEKDSLTRSRFARLNLVDLAGSERQKSSGAEGDRLKEAANINKSLSTLGLVIMSLVDLAHGKHRHVPYRDSRLTFLLQDSLGGNSKTMIIANVSPSLCSTNETLSTLKFAQRAKLIQNNAKVNEDASGDVTALQQEIRKLKVQLTSLLKNHDSCGALSDCISSLEESRYSGTCKVAGETRQDKCHCQVHNSLRVKVKNMNDNMIGALRREKIAESALQKSEAEIERIDCLVRDMEEDAKRIKIMLNLREEKVGEMEFCTSGSLMTKECLIEENKTLKGEIKLLRDSIDKNPELTRSALENTKLREQLQRYQKFYEHGEREALLAEVTGLRDQLLDVLEAKDESFSKHVMKENEMEKEFEDCRNMNSSLIRELDEIQAGLGRYLNFDQIQSNVVASSTRGAEQAETMPTISEIQEEVAISHSKNYDRGALVKTDEGIDRSILQFKLGKLMKDLEEARTLNCKYEKDHKSQLSQQEDIEVVREQVETETARTILELQEEVIALQSEFQRRICNLTEENQSIKDTITARESEIRALNQDWEKATLELTNFIVAGSKSIKNASTQIESIICSFPQVNAWIGDYVEKAAKNCIKKEETILLLQKSLEDARILVAEMNLKLNSLKGATIALNEFQLGGNAATTEEAFNLNNDVDRMSDEVDTLESNFKANQYSILKTERHAEAALAVTKWLSDSRDQHQMMEKVQDQSVKEFGTLSSISASLSAEGNADISLSRDGHLSDATYPKGDELSTSSSDFSNCRWQHDCALNVKCQGVSSSESDAQESNNKITSAALIAKNGSAHSVYCGEGRQSVEKPLTIMMGREETEYKCSKPLSSGVYMGLMQRMDPVRTFFDRFEEVNATMKEADLTICELVKANEKSNSVTEMWLQTHEELISKEKNLMDDLEQVKSILSACEEEKQVLLNQTHTTLADMENSVSLLEEYFQEMKRGVEETVEALFSHARLAGKELLQLISNSRPSLEQIASEFMEREFTMYATYQCHIGKLIDQILDQRKQVITPNLSGQETNQSVKINAIGYNAEDEVTKKQSREEIVTGLENDEVVQSHESLLYENLYLKKELERKEALFEGLLFDFRLLQESASNKRDIKNEMDELFDALCKVQLELELKASQVHELFVHNENLENCSIDLKTALFTSQSDLEQAKQRIQILAEQNDELRALVSDLCKEKAAAEEGLDEQRDLVNRLEKEILHLTTTAEKQLLSAVKSIKENLKKTSDEKDQIVDEICSLNNKLELAYAIADEKEAIAVEAHQESEASKIYAEQKEEEVKILEISVEELERTINILERRVYDMDEEVKRHRTTQDSLETELQALRQRLFRFENFTGTMVTTNESTEEYKSHISRSTGLQGAHSQIQVLQKEVAEQTKEIKQLKEYISEILLHSEAQSSAYQEKMKLEKDQELTMARVRVEELESLLAVKQKEICTLNTRIAAADSMTHDVIRDLLGVKMDITSYAELIDQHQVQRVVEKAQQHAEEILSKEQEVMNLKRHIDYLFKDRESCMSELNKKDTDVLATQISLDQLQERVQLLSMQNEMLKNDKSNLLRKLAELDRTVHNAQASNHRVPQTTKDTASFKLADTDYTKRLENAQKLLSHANNELAKYRKTSNNHPSTRTQGQSSGTRYR

SEQ ID NO: 91729 - protein, 1999 aa, Arabidopsis thaliana
  peptide (1)..(1999): Ceres Seq. ID no. 12729021
MPESEENEFASLSLFSPSRPPLNSIPDPSQIQKANHLPHFDLVQKLEGTRAQHQRTLGPEKKFEVLEGRAGNSSDSNPKIVNRNGKSRSEPNSAQSTPTRNGARVSLGGGCATGARFLQSFGGRGRIPRGVSIAESVSFAETTPHFELNEDHSFWKDHNVQVLIRLRPLGTMERANQGYGHPEARFTFDHVASETISQEKLFRVAGLPMVENCLSGYNSCVFAYGQTGSGKTYTMMGEISEAEGSLGEDCGVTARIFEYLFSRIKMEEEERRDENLKFSCKCSFLEIYNEQITDLLEPSSTNLQLREDLGKGVYVENLVEHNVRTVSDVLKLLLQGATNRKIAATRMNSESSRSHSVFTCTIESLWEKDSLTRSRFARLNLVDLAGSERQKSSGAEGDRLKEAANINKSLSTLGLVIMSLVDLAHGKHRHVPYRDSRLTFLLQDSLGGNSKTMIIANVSPSLCSTNETLSTLKFAQRAKLIQNNAKVNEDASGDVTALQQEIRKLKVQLTSLLKNHDSCGALSDCISSLEESRYSGTCKVAGETRQDKCHCQVHNSLRVKVKNMNDNMIGALRREKIAESALQKSEAEIERIDCLVRDMEEDAKRIKIMLNLREEKVGEMEFCTSGSLMTKECLIEENKTLKGEIKLLRDSIDKNPELTRSALENTKLREQLQRYQKFYEHGEREALLAEVTGLRDQLLDVLEAKDESFSKHVMKENEMEKEFEDCRNMNSSLIRELDEIQAGLGRYLNFDQIQSNVVASSTRGAEQAETMPTISEIQEEVAISHSKNYDRGALVKTDEGIDRSILQFKLGKLMKDLEEARTLNCKYEKDHKSQLSQQEDIEVVREQVETETARTILELQEEVIALQSEFQRRICNLTEENQSIKDTITARESEIRALNQDWEKATLELTNFIVAGSKSIKNASTQIESIICSFPQVNAWIGDYVEKAAKNCIKKEETILLLQKSLEDARILVAEMNLKLNSLKGATIALNEFQLGGNAATTEEAFNLNNDVDRMSDEVDTLESNFKANQYSILKTERHAEAALAVTKWLSDSRDQHQMMEKVQDQSVKEFGTLSSISASLSAEGNADISLSRDGHLSDATYPKGDELSTSSSDFSNCRWQHDCALNVKCQGVSSSESDAQESNNKITSAALIAKNGSAHSVYCGEGRQSVEKPLTIMMGREETEYKCSKPLSSGVYMGLMQRMDPVRTFFDRFEEVNATMKEADLTICELVKANEKSNSVTEMWLQTHEELISKEKNLMDDLEQVKSILSACEEEKQVLLNQTHTTLADMENSVSLLEEYFQEMKRGVEETVEALFSHARLAGKELLQLISNSRPSLEQIASEFMEREFTMYATYQCHIGKLIDQILDQRKQVITPNLSGQETNQSVKINAIGYNAEDEVTKKQSREEIVTGLENDEVVQSHESLLYENLYLKKELERKEALFEGLLFDFRLLQESASNKRDIKNEMDELFDALCKVQLELELKASQVHELFVHNENLENCSIDLKTALFTSQSDLEQAKQRIQILAEQNDELRALVSDLCKEKAAAEEGLDEQRDLVNRLEKEILHLTTTAEKQLLSAVKSIKENLKKTSDEKDQIVDEICSLNNKLELAYAIADEKEAIAVEAHQESEASKIYAEQKEEEVKILEISVEELERTINILERRVYDMDEEVKRHRTTQDSLETELQALRQRLFRFENFTGTMVTTNESTEEYKSHISRSTGLQGAHSQIQVLQKEVAEQTKEIKQLKEYISEILLHSEAQSSAYQEKMKLEKDQELTMARVRVEELESLLAVKQKEICTLNTRIAAADSMTHDVIRDLLGVKMDITSYAELIDQHQVQRVVEKAQQHAEEILSKEQEVMNLKRHIDYLFKDRESCMSELNKKDTDVLATQISLDQLQERVQLLSMQNEMLKNDKSNLLRKLAELDRTVHNAQASNHRVPQTTKDTASFKLADTDYTKRLENAQKLLSHANNELAKYRKTSNNHPSTRTQGQSSGTRYR

SEQ ID NO: 91730 - protein, 1828 aa, Arabidopsis thaliana
  peptide (1)..(1828): Ceres Seq. ID no. 12729022
MERANQGYGHPEARFTFDHVASETISQEKLFRVAGLPMVENCLSGYNSCVFAYGQTGSGKTYTMMGEISEAEGSLGEDCGVTARIFEYLFSRIKMEEEERRDENLKFSCKCSFLEIYNEQITDLLEPSSTNLQLREDLGKGVYVENLVEHNVRTVSDVLKLLLQGATNRKIAATRMNSESSRSHSVFTCTIESLWEKDSLTRSRFARLNLVDLAGSERQKSSGAEGDRLKEAANINKSLSTLGLVIMSLVDLAHGKHRHVPYRDSRLTFLLQDSLGGNSKTMIIANVSPSLCSTNETLSTLKFAQRAKLIQNNAKVNEDASGDVTALQQEIRKLKVQLTSLLKNHDSCGALSDCISSLEESRYSGTCKVAGETRQDKCHCQVHNSLRVKVKNMNDNMIGALRREKIAESALQKSEAEIERIDCLVRDMEEDAKRIKIMLNLREEKVGEMEFCTSGSLMTKECLIEENKTLKGEIKLLRDSIDKNPELTRSALENTKLREQLQRYQKFYEHGEREALLAEVTGLRDQLLDVLEAKDESFSKHVMKENEMEKEFEDCRNMNSSLIRELDEIQAGLGRYLNFDQIQSNVVASSTRGAEQAETMPTISEIQEEVAISHSKNYDRGALVKTDEGIDRSILQFKLGKLMKDLEEARTLNCKYEKDHKSQLSQQEDIEVVREQVETETARTILELQEEVIALQSEFQRRICNLTEENQSIKDTITARESEIRALNQDWEKATLELTNFIVAGSKSIKNASTQIESIICSFPQVNAWIGDYVEKAAKNCIKKEETILLLQKSLEDARILVAEMNLKLNSLKGATIALNEFQLGGNAATTEEAFNLNNDVDRMSDEVDTLESNFKANQYSILKTERHAEAALAVTKWLSDSRDQHQMMEKVQDQSVKEFGTLSSISASLSAEGNADISLSRDGHLSDATYPKGDELSTSSSDFSNCRWQHDCALNVKCQGVSSSESDAQESNNKITSAALIAKNGSAHSVYCGEGRQSVEKPLTIMMGREETEYKCSKPLSSGVYMGLMQRMDPVRTFFDRFEEVNATMKEADLTICELVKANEKSNSVTEMWLQTHEELISKEKNLMDDLEQVKSILSACEEEKQVLLNQTHTTLADMENSVSLLEEYFQEMKRGVEETVEALFSHARLAGKELLQLISNSRPSLEQIASEFMEREFTMYATYQCHIGKLIDQILDQRKQVITPNLSGQETNQSVKINAIGYNAEDEVTKKQSREEIVTGLENDEVVQSHESLLYENLYLKKELERKEALFEGLLFDFRLLQESASNKRDIKNEMDELFDALCKVQLELELKASQVHELFVHNENLENCSIDLKTALFTSQSDLEQAKQRIQILAEQNDELRALVSDLCKEKAAAEEGLDEQRDLVNRLEKEILHLTTTAEKQLLSAVKSIKENLKKTSDEKDQIVDEICSLNNKLELAYAIADEKEAIAVEAHQESEASKIYAEQKEEEVKILEISVEELERTINILERRVYDMDEEVKRHRTTQDSLETELQALRQRLFRFENFTGTMVTTNESTEEYKSHISRSTGLQGAHSQIQVLQKEVAEQTKEIKQLKEYISEILLHSEAQSSAYQEKMKLEKDQELTMARVRVEELESLLAVKQKEICTLNTRIAAADSMTHDVIRDLLGVKMDITSYAELIDQHQVQRVVEKAQQHAEEILSKEQEVMNLKRHIDYLFKDRESCMSELNKKDTDVLATQISLDQLQERVQLLSMQNEMLKNDKSNLLRKLAELDRTVHNAQASNHRVPQTTKDTASFKLADTDYTKRLENAQKLLSHANNELAKYRKTSNNHPSTRTQGQSSGTRYR

SEQ ID NO: 91731 - DNA, 1324 bp, Arabidopsis thaliana
  misc_feature (1)..(1324): Ceres Seq. ID no. 12729055
  misc_feature (1)..(1324): Ortholog of  Ceres SEQ ID NO 13637958 as cited in SEQ ID NO 60404
acttgtaagtgattcagagagatcagaagaaaagaataattacgaagaaatggagaattttggtgaagggagaagaagtggaggcggaatgttgccgttgctggctctaagcgccgtcgcggagtactatagactaccgtggaaaccaccggtgacggcgagtctcctggccgcgaacactctcgtttatctcaggccggcgtttatcgatcccgttattcctcacatcagtgaggtctggttcaatcctcacctcatcttcaagcataaggacttgaagcgtttatttctatcagcgttctaccatgttaacgagcctcacttagtctataacatgatgtcacttctctggaaaggtatcaagcttgagacatcaatgggaagcagtgagtttgcttcaatggtctttactcttattggtatgtctcaaggagtcacattgttgttagccaaatcgcttcttctcttgtttgactatgacagagcttactacaacgagtatgcggttgggttctcgggtgttctctttgctatgaaagttgttcttaattctcaagctgaggattactcaagtgtgtatggtatcttggttccaacaaagtatgctgcttgggcagaattgattctagtgcagatgtttgtacctaacgcttcgtttcttgggcatttgggtggaatccttgctggtattatctatttgaagctgaaaggttcttactcaggctcagatccagtcactatggcggttagaggtgtatctcgattggtgacgtggcccttgaggtttctgaatggtatggttaggtctcggagaaggaggattacggggagaggaagagtgggaagaggtcagactgggatagcaggacctggtatttggagatgtcagtcgtgtacatatgacaattctggttggttaagtgcttgcgagatgtgtggctcgggacgggctagaggaaatggatggtcactgaatcagggaccagcactttcttcttctaatgatctccctttagatgagctgcgccgtcgaagagtagagaggtttagttgatctcgggagcgcattcttaaagctgaggaaggattgtgaatgaagctttgttgaatcattcattgcattagcttatgaatagcagagttagtggtcgtgtttttcgatctgtttcttcaatttgtcttctcttttgttgttgaagatttggttctacgtgaactggtcctttgattagattgctgaaagtagcgagtgattcagataatatagtatcttcacaccaaacttacagtttcacagactttcgattttaacaaaattttatcc

SEQ ID NO: 91732 - protein, 350 aa, Arabidopsis thaliana
  peptide (1)..(350): Ceres Seq. ID no. 12729056
LVSDSERSEEKNNYEEMENFGEGRRSGGGMLPLLALSAVAEYYRLPWKPPVTASLLAANTLVYLRPAFIDPVIPHISEVWFNPHLIFKHKDLKRLFLSAFYHVNEPHLVYNMMSLLWKGIKLETSMGSSEFASMVFTLIGMSQGVTLLLAKSLLLLFDYDRAYYNEYAVGFSGVLFAMKVVLNSQAEDYSSVYGILVPTKYAAWAELILVQMFVPNASFLGHLGGILAGIIYLKLKGSYSGSDPVTMAVRGVSRLVTWPLRFLNGMVRSRRRRITGRGRVGRGQTGIAGPGIWRCQSCTYDNSGWLSACEMCGSGRARGNGWSLNQGPALSSSNDLPLDELRRRRVERFS

SEQ ID NO: 91733 - protein, 334 aa, Arabidopsis thaliana
  peptide (1)..(334): Ceres Seq. ID no. 12729057
MENFGEGRRSGGGMLPLLALSAVAEYYRLPWKPPVTASLLAANTLVYLRPAFIDPVIPHISEVWFNPHLIFKHKDLKRLFLSAFYHVNEPHLVYNMMSLLWKGIKLETSMGSSEFASMVFTLIGMSQGVTLLLAKSLLLLFDYDRAYYNEYAVGFSGVLFAMKVVLNSQAEDYSSVYGILVPTKYAAWAELILVQMFVPNASFLGHLGGILAGIIYLKLKGSYSGSDPVTMAVRGVSRLVTWPLRFLNGMVRSRRRRITGRGRVGRGQTGIAGPGIWRCQSCTYDNSGWLSACEMCGSGRARGNGWSLNQGPALSSSNDLPLDELRRRRVERFS

SEQ ID NO: 91734 - protein, 321 aa, Arabidopsis thaliana
  peptide (1)..(321): Ceres Seq. ID no. 12729058
MLPLLALSAVAEYYRLPWKPPVTASLLAANTLVYLRPAFIDPVIPHISEVWFNPHLIFKHKDLKRLFLSAFYHVNEPHLVYNMMSLLWKGIKLETSMGSSEFASMVFTLIGMSQGVTLLLAKSLLLLFDYDRAYYNEYAVGFSGVLFAMKVVLNSQAEDYSSVYGILVPTKYAAWAELILVQMFVPNASFLGHLGGILAGIIYLKLKGSYSGSDPVTMAVRGVSRLVTWPLRFLNGMVRSRRRRITGRGRVGRGQTGIAGPGIWRCQSCTYDNSGWLSACEMCGSGRARGNGWSLNQGPALSSSNDLPLDELRRRRVERFS

SEQ ID NO: 91735 - DNA, 2067 bp, Arabidopsis thaliana
  misc_feature (1)..(2067): Ceres Seq. ID no. 12729094
  misc_feature (1)..(2067): Ortholog of  Ceres SEQ ID NO 13657677 as cited in SEQ ID NO 66119
atgttcttcgtcactcgtctgcgactacgagccagagaaaatggcttcttcttctctaaatccctctctttctcatctgcctccgtattgaaatctgatgatgtcgaaggagaagatgatgcaatagaagcagaagatcgtcgacgcagtgtaaccgatagagcttactggagaagacggatacacagtatctgcgccgtacggaggaatcctgacgaagctcttcggattctagacggactctgcctccgtgggtatcgtcctgattcgcttaacctcagcagtgtgatccactctctttgtgacgccggacgatttgacgaagctcaccgtcggtttttactcttcctcgcttcaggttttatcccagacgagcgaacctgcaacgttatcatcgcaagattgttatattcgagatctccggtgagtacgttgggagttatacaccgtttgatcggtttcaagaaggagtttgtgccatcgttgacgaattacaaccgtttgatgaatcagttgtgtacgatctatagagtaatcgatgcgcataagctagtattcgatatgagaaacagagggcatctcccagatgttgtgactttcacaactttaatcggtggttactgtgagattcgagaactggaagttgctcataaagtgttcgacgaaatgcgtgtgtgtggcataaggcctaattctctcacattgagtgttcttattggtgggtttttgaaaatgagagatgttgaaacaggacggaagctgatgaaggaactatgggaatacatgaagaatgagactgatacatcaatgaaagcagcagcttttgcgaatctcgttgattctatgtgcagggaagggtatttcaatgatatttttgagattgcagagaacatgtcactatgcgagtctgtgaacgttgaatttgcttacgggcatatgatagattccttgtgtcgatacaggagaaaccatggagcagcgaggattgtttatataatgaagagtaaagggttaaaaccgagaagaacgtcatacaatgctataattcatggcttgtgcaaggatggtgggtgtatgagggcttatcagttgctagaagagggatctgaatttgagttttttccgtctgagtatacttataagctcctaatggagagtctatgcaaggaactggacacgggtaaagccaggaatgttctagagctgatgttgagaaaagaaggagcagatagaactcgaatctataatatttatctacgcggtctctgcgtgatggataacccgactgagatcctgaacgtactggtcagtatgcttcagggagactgcaggcctgatgagtatacacttaacacagttattaatggattatgcaagatgggcagggtggacgatgccatgaaagttcttgatgatatgatgacagggaagttctgtgcaccagatgctgtgactttaaatactgttatgtgtggcttgctcgctcaaggaagagcagaagaagctctggatgtgttgaatcgcgttatgccggagaacaagattaagccaggtgttgttgcatacaatgctgttatacgtgggttgttcaagctccacaagggagatgaagctatgtctgtgtttggtcagctggaaaaggcgagtgtgactgcggatagcactacatatgcaataatcattgacgggttgtgtgtgactaataaggtggatatggcgaagaagttctgggatgatgtgatatggccatcaggcagacatgatgcgtttgtgtatgcagcatttctgaaagggctttgtcagtctggttatctaagtgatgcttgccatttcctatatgacctggcagattctggagcaatccctaatgttgtgtgctataatactgtgattgctgagtgtagcagaagtgggttaaagagagaagcgtaccagattttggaggagatgaggaagaacggtcaggctcctgatgctgttacatggcggatactcgataaactacatgattctatggatctaactgtggaaagagagttaatttcaaaccctgcaacctcaggatag

SEQ ID NO: 91736 - protein, 688 aa, Arabidopsis thaliana
  peptide (1)..(688): Ceres Seq. ID no. 12729095
MFFVTRLRLRARENGFFFSKSLSFSSASVLKSDDVEGEDDAIEAEDRRRSVTDRAYWRRRIHSICAVRRNPDEALRILDGLCLRGYRPDSLNLSSVIHSLCDAGRFDEAHRRFLLFLASGFIPDERTCNVIIARLLYSRSPVSTLGVIHRLIGFKKEFVPSLTNYNRLMNQLCTIYRVIDAHKLVFDMRNRGHLPDVVTFTTLIGGYCEIRELEVAHKVFDEMRVCGIRPNSLTLSVLIGGFLKMRDVETGRKLMKELWEYMKNETDTSMKAAAFANLVDSMCREGYFNDIFEIAENMSLCESVNVEFAYGHMIDSLCRYRRNHGAARIVYIMKSKGLKPRRTSYNAIIHGLCKDGGCMRAYQLLEEGSEFEFFPSEYTYKLLMESLCKELDTGKARNVLELMLRKEGADRTRIYNIYLRGLCVMDNPTEILNVLVSMLQGDCRPDEYTLNTVINGLCKMGRVDDAMKVLDDMMTGKFCAPDAVTLNTVMCGLLAQGRAEEALDVLNRVMPENKIKPGVVAYNAVIRGLFKLHKGDEAMSVFGQLEKASVTADSTTYAIIIDGLCVTNKVDMAKKFWDDVIWPSGRHDAFVYAAFLKGLCQSGYLSDACHFLYDLADSGAIPNVVCYNTVIAECSRSGLKREAYQILEEMRKNGQAPDAVTWRILDKLHDSMDLTVERELISNPATSG

SEQ ID NO: 91737 - protein, 520 aa, Arabidopsis thaliana
  peptide (1)..(520): Ceres Seq. ID no. 12729096
MNQLCTIYRVIDAHKLVFDMRNRGHLPDVVTFTTLIGGYCEIRELEVAHKVFDEMRVCGIRPNSLTLSVLIGGFLKMRDVETGRKLMKELWEYMKNETDTSMKAAAFANLVDSMCREGYFNDIFEIAENMSLCESVNVEFAYGHMIDSLCRYRRNHGAARIVYIMKSKGLKPRRTSYNAIIHGLCKDGGCMRAYQLLEEGSEFEFFPSEYTYKLLMESLCKELDTGKARNVLELMLRKEGADRTRIYNIYLRGLCVMDNPTEILNVLVSMLQGDCRPDEYTLNTVINGLCKMGRVDDAMKVLDDMMTGKFCAPDAVTLNTVMCGLLAQGRAEEALDVLNRVMPENKIKPGVVAYNAVIRGLFKLHKGDEAMSVFGQLEKASVTADSTTYAIIIDGLCVTNKVDMAKKFWDDVIWPSGRHDAFVYAAFLKGLCQSGYLSDACHFLYDLADSGAIPNVVCYNTVIAECSRSGLKREAYQILEEMRKNGQAPDAVTWRILDKLHDSMDLTVERELISNPATSG

SEQ ID NO: 91738 - protein, 501 aa, Arabidopsis thaliana
  peptide (1)..(501): Ceres Seq. ID no. 12729097
MRNRGHLPDVVTFTTLIGGYCEIRELEVAHKVFDEMRVCGIRPNSLTLSVLIGGFLKMRDVETGRKLMKELWEYMKNETDTSMKAAAFANLVDSMCREGYFNDIFEIAENMSLCESVNVEFAYGHMIDSLCRYRRNHGAARIVYIMKSKGLKPRRTSYNAIIHGLCKDGGCMRAYQLLEEGSEFEFFPSEYTYKLLMESLCKELDTGKARNVLELMLRKEGADRTRIYNIYLRGLCVMDNPTEILNVLVSMLQGDCRPDEYTLNTVINGLCKMGRVDDAMKVLDDMMTGKFCAPDAVTLNTVMCGLLAQGRAEEALDVLNRVMPENKIKPGVVAYNAVIRGLFKLHKGDEAMSVFGQLEKASVTADSTTYAIIIDGLCVTNKVDMAKKFWDDVIWPSGRHDAFVYAAFLKGLCQSGYLSDACHFLYDLADSGAIPNVVCYNTVIAECSRSGLKREAYQILEEMRKNGQAPDAVTWRILDKLHDSMDLTVERELISNPATSG

SEQ ID NO: 91739 - DNA, 1533 bp, Arabidopsis thaliana
  misc_feature (1)..(1533): Ceres Seq. ID no. 12729098
  misc_feature (1)..(1533): Ortholog of  Ceres SEQ ID NO 13532807 as cited in SEQ ID NO 53012
  misc_feature (1)..(1533): Ortholog of  Ceres SEQ ID NO 13663060 as cited in SEQ ID NO 60964
  misc_feature (1)..(1533): Ortholog of  Ceres SEQ ID NO 13500573 as cited in SEQ ID NO 67431
  misc_feature (1)..(1533): Ortholog of  Ceres SEQ ID NO 13656501 as cited in SEQ ID NO 69206
atggatcctcataaaaaggttgcactggagactgagttctttacagaatacggtgaagctagccgataccaaatccaagaagttatagggaaaggaagttacggtgttgtggcatctgcaatcgacacacattcaggcgaaaaggttgccattaagaaaatcaatgatgtgtttgagcacgtctctgatgcaacgcggattctaagagagatcaagcttctcaggttgctccgccatcctgatatagtggagataaagcatgtaatgcttcctccttcacgccgtgagttcagagacatttatgttgttttcgagttgatggaatcagatcttcaccaagttatcaaggcgaacgatgatcttacacctgagcactaccagtttttcctctaccagcttcttcgtggtctgaagttcatacacacagctaatgtgtttcatcgtgatttgaagcctaaaaatattctagccaactctgattgcaagttgaagatttgcgactttgggcttgctcgagtgtcctttaatgatgcaccttcggctatattctggactgactatgttgctacaagatggtaccgtgcgccagaactttgtggctctttcttctccaaatatactcctgccattgatatatggagcataggatgcatatttgcagaaatgctcactgggaagccattgtttcctgggaagaatgtggtgcaccaattggatattatgactgatttgcttggtactcctcctcccgaagctattgcaaggattcgtaatgaaaaggcgaggagatatctcggcaatatgaggagaaaaccgccagttccattcactcacaaatttcctcatgtagacccattggcccttcgcttactgcaccgtcttcttgcatttgatcccaaagaccgtccctcagctgaagaggcactggcagatccttacttctatggtctggcaaacgttgatcgggaaccatctactcaaccgattccgaaactcgagtttgagtttgaaagaaggaagataacaaaagaagatgtgagagaattgatctacagagagatattagagtatcatcctcagatgctgcaagaatatcttcgaggtggagaacagactagcttcatgtacccaagtggtgttgatcgctttaagagacaatttgctcatcttgaggaaaattacggtaagggtgagaaaggctcacctcttcaacgccaacacgcttccttgcctagagagcgagtccctgctcctaagaaagagaatggatcacataatcacgatatcgagaacagatccatagcgtctttagtcacgaccctcgaaagccctccaacgtcacaacacgaggggtcagactacaggaatgggacgagccagacgggttacagcgctcgcagcttgctgaaaagtgccagcatcagtgcatctaaatgcattggcatgaaaccaagaaacaagtccgagtacggggaatcaaacaatgatacggttgatgctctgtctcaaaaggtcgcggctctccacacttga

SEQ ID NO: 91740 - protein, 510 aa, Arabidopsis thaliana; identical to SEQ ID NO: 87363
  peptide (1)..(510): Ceres Seq. ID no. 12729099

SEQ ID NO: 91741 - protein, 422 aa, Arabidopsis thaliana; identical to SEQ ID NO: 87364
  peptide (1)..(422): Ceres Seq. ID no. 12729100

SEQ ID NO: 91742 - protein, 404 aa, Arabidopsis thaliana
  peptide (1)..(404): Ceres Seq. ID no. 12729101
MESDLHQVIKANDDLTPEHYQFFLYQLLRGLKFIHTANVFHRDLKPKNILANSDCKLKICDFGLARVSFNDAPSAIFWTDYVATRWYRAPELCGSFFSKYTPAIDIWSIGCIFAEMLTGKPLFPGKNVVHQLDIMTDLLGTPPPEAIARIRNEKARRYLGNMRRKPPVPFTHKFPHVDPLALRLLHRLLAFDPKDRPSAEEALADPYFYGLANVDREPSTQPIPKLEFEFERRKITKEDVRELIYREILEYHPQMLQEYLRGGEQTSFMYPSGVDRFKRQFAHLEENYGKGEKGSPLQRQHASLPRERVPAPKKENGSHNHDIENRSIASLVTTLESPPTSQHEGSDYRNGTSQTGYSARSLLKSASISASKCIGMKPRNKSEYGESNNDTVDALSQKVAALHT

SEQ ID NO: 91743 - DNA, 1506 bp, Arabidopsis thaliana
  misc_feature (1)..(1506): Ceres Seq. ID no. 12729102
  misc_feature (1)..(1506): Ortholog of  Ceres SEQ ID NO 13600220 as cited in SEQ ID NO 0
atgtttctttttctcctcctcctctctgcttcccgctccggcgaagagtcgccgtccggagacgccgtcccattggccaccggcggtcttaacagaaagagttttccggaaggattcttgttcggaaccgccacgtcagcttaccaggtcgaaggcgagacccaccaagatggtcgtggtccaagcatttgggatgcattcgtcaagattcctggtaagattgccaacaatgccactgctgagataacagtggaccaatatcatcgttacaaggaagatgtagatttgatgcagaacctgaacattgatgcctacagattttccatttcatggtctagaatattccctgagggatccggtaaaatcaactcgaatggagttgcttattacaatagattgatcgattacttgatcgaaaaagggattacaccgtatgctaatctgtaccactatgaccttcctttagccttggaacaaaagtatcaaggcctgcttagtaaacaaggaagattttgcggattacgcagagttttgtttcaaacatttggagatagagtgaagaactggatgacgtttaacgagcctcgtgtagtagctgctctaggttatgataacggcatttttgcgccgggtagatgctctgaagcatttggaaactgcactgatggaaactctgcaactgaaccatacattgttgcacatcaccttatcttggcacatgcagcagccgtccagagataccgccaaaattatcaggagaaacaaaagggaagggttgggattctactggattttgtttggtttgagccacttacgagtagtcaagcagacaatgacgctgctcaaagagcaagagacttccatgttggatggtttattcacccaatagtgtatggagagtacccaaatacgttgcaaaacatcgtgaaggagagacttccgaagttcaccgaggaagaagtgaaaatggtgaaaggttccatagacttcgtggggataaaccaatacacaacttatttcatgtctgatcctaaaatatctaccacacctaaagatttgggttatcaacaagattggaacgtcacttttaactttgcaaagaatgggacaccaattggtccaagggcacattcagaatggttatacaatgtcccatggggaatgtacaaagctttaatgtacattgaggaacgttatggcaacccaactatgattctctccgaaaacggtatggatgatccgggcaacataactctaactcaaggactaaatgatacaacaagagtcaagtattatagagactatttagtgcagcttaaaaaagcagtagacgatggagccaatctaactggatattttgcgtggtcgttgctagataatttcgaatggttatcaggatatacttcaaggtttggaatagtgtacgttgattacaaggacttgaagagataccccaagatgtctgctttatggtttaaacaacttttgaaacgggaccagaaatga

SEQ ID NO: 91744 - protein, 501 aa, Arabidopsis thaliana
  peptide (1)..(501): Ceres Seq. ID no. 12729103
MFLFLLLLSASRSGEESPSGDAVPLATGGLNRKSFPEGFLFGTATSAYQVEGETHQDGRGPSIWDAFVKIPGKIANNATAEITVDQYHRYKEDVDLMQNLNIDAYRFSISWSRIFPEGSGKINSNGVAYYNRLIDYLIEKGITPYANLYHYDLPLALEQKYQGLLSKQGRFCGLRRVLFQTFGDRVKNWMTFNEPRVVAALGYDNGIFAPGRCSEAFGNCTDGNSATEPYIVAHHLILAHAAAVQRYRQNYQEKQKGRVGILLDFVWFEPLTSSQADNDAAQRARDFHVGWFIHPIVYGEYPNTLQNIVKERLPKFTEEEVKMVKGSIDFVGINQYTTYFMSDPKISTTPKDLGYQQDWNVTFNFAKNGTPIGPRAHSEWLYNVPWGMYKALMYIEERYGNPTMILSENGMDDPGNITLTQGLNDTTRVKYYRDYLVQLKKAVDDGANLTGYFAWSLLDNFEWLSGYTSRFGIVYVDYKDLKRYPKMSALWFKQLLKRDQK

SEQ ID NO: 91745 - protein, 405 aa, Arabidopsis thaliana
  peptide (1)..(405): Ceres Seq. ID no. 12729104
MQNLNIDAYRFSISWSRIFPEGSGKINSNGVAYYNRLIDYLIEKGITPYANLYHYDLPLALEQKYQGLLSKQGRFCGLRRVLFQTFGDRVKNWMTFNEPRVVAALGYDNGIFAPGRCSEAFGNCTDGNSATEPYIVAHHLILAHAAAVQRYRQNYQEKQKGRVGILLDFVWFEPLTSSQADNDAAQRARDFHVGWFIHPIVYGEYPNTLQNIVKERLPKFTEEEVKMVKGSIDFVGINQYTTYFMSDPKISTTPKDLGYQQDWNVTFNFAKNGTPIGPRAHSEWLYNVPWGMYKALMYIEERYGNPTMILSENGMDDPGNITLTQGLNDTTRVKYYRDYLVQLKKAVDDGANLTGYFAWSLLDNFEWLSGYTSRFGIVYVDYKDLKRYPKMSALWFKQLLKRDQK

SEQ ID NO: 91746 - protein, 312 aa, Arabidopsis thaliana
  peptide (1)..(312): Ceres Seq. ID no. 12729105
MTFNEPRVVAALGYDNGIFAPGRCSEAFGNCTDGNSATEPYIVAHHLILAHAAAVQRYRQNYQEKQKGRVGILLDFVWFEPLTSSQADNDAAQRARDFHVGWFIHPIVYGEYPNTLQNIVKERLPKFTEEEVKMVKGSIDFVGINQYTTYFMSDPKISTTPKDLGYQQDWNVTFNFAKNGTPIGPRAHSEWLYNVPWGMYKALMYIEERYGNPTMILSENGMDDPGNITLTQGLNDTTRVKYYRDYLVQLKKAVDDGANLTGYFAWSLLDNFEWLSGYTSRFGIVYVDYKDLKRYPKMSALWFKQLLKRDQK

SEQ ID NO: 91747 - DNA, 1311 bp, Arabidopsis thaliana
  misc_feature (1)..(1311): Ceres Seq. ID no. 12729130
  misc_feature (1)..(1311): Ortholog of  Ceres SEQ ID NO 13599520 as cited in SEQ ID NO 633
  misc_feature (1)..(1311): Ortholog of  Ceres SEQ ID NO 13595142 as cited in SEQ ID NO 56671
  misc_feature (1)..(1311): Ortholog of  Ceres SEQ ID NO 15168569 as cited in SEQ ID NO 58123
  misc_feature (1)..(1311): Ortholog of  Ceres SEQ ID NO 15226382 as cited in SEQ ID NO 63295
  misc_feature (1)..(1311): Ortholog of  Ceres SEQ ID NO 13598460 as cited in SEQ ID NO 63382
atgccatcgccaccgacgacgacttctctctcggtgacacagaccataaacggatcacacagcttcacaatcaaaggctattctttggctaaaggaatcgggatcggaaaacacatcgccagcgatactttcaccgtcgggggttatcaatgggctatctatttctatcctgatggcaagaatcctgaggataattcggcttatgtctccgttttcattgctttagctagcgatggtaccgatgttagggctctttttgagctttctttgcttgatcagagtggtaaagggaagcataaggttcatagccacttcgatcgtgctcttgagagcggtccttatactctcaagtatcgtggcagcatgtggggctacaagcgcttttttcgaagacttatgctggaaacatctgattttctgaaggatgattgtctgaaaattaattgcaccgtgggagttgtggtctcagaaatagattgcccacggttacattctattcatgtccctgcatctgatattggatctcatttcgggatgcttctagagaacgaggacggttcagatataacttttaacgtctctggtgaaaagttccgtgctcacaggttagtattggctgctcgatctcctgtctttgaaagcgagttcctcgatgttacgggagaagaagatcgtgatatcgaagttactgacatggagcctaaggttttcaaggctttgctccactacatatacaaggatgctctcattgaagatgcagagtcatcatcatcttccggttcatctgttggtccatctgcctcagacacattagctgcaaagctactaggagccgctgataaatacaagttgcctagattaagtctaatgtgcgagtcagtgctctgcaaggatatatcagtagattccgttgcaaatattttggcgcttgctgaccgttacaatgcttccgccttgaaatccgtttgtctgaaattcgcagcagaaaatctcatcgctgttatgaggtcagatgggtttgattatctaagggaacactgcccgtcacttcagtctgagcttctgaaaacagttgcgggttgcgaagaggagttaagcggaggaggagggaagacgagaagcgtatggggccaattctcagacggtggagctgagacaaacggaagacaagcacagacttggggagatatcaatggaggagcagagagaagccagagtgtttgggtcgaagttgtgaacgctaatggaagcggtagaaacaataatgacaacaataacagtgatgacccaatggcagaactagaagattga

SEQ ID NO: 91748 - protein, 436 aa, Arabidopsis thaliana; identical to SEQ ID NO: 38880
  peptide (1)..(436): Ceres Seq. ID no. 12729131

SEQ ID NO: 91749 - protein, 315 aa, Arabidopsis thaliana; identical to SEQ ID NO: 38881
  peptide (1)..(315): Ceres Seq. ID no. 12729132

SEQ ID NO: 91750 - protein, 304 aa, Arabidopsis thaliana
  peptide (1)..(304): Ceres Seq. ID no. 12729133
MLETSDFLKDDCLKINCTVGVVVSEIDCPRLHSIHVPASDIGSHFGMLLENEDGSDITFNVSGEKFRAHRLVLAARSPVFESEFLDVTGEEDRDIEVTDMEPKVFKALLHYIYKDALIEDAESSSSSGSSVGPSASDTLAAKLLGAADKYKLPRLSLMCESVLCKDISVDSVANILALADRYNASALKSVCLKFAAENLIAVMRSDGFDYLREHCPSLQSELLKTVAGCEEELSGGGGKTRSVWGQFSDGGAETNGRQAQTWGDINGGAERSQSVWVEVVNANGSGRNNNDNNNSDDPMAELED

SEQ ID NO: 91751 - DNA, 627 bp, Arabidopsis thaliana
  misc_feature (1)..(627): Ceres Seq. ID no. 12729164
  misc_feature (1)..(627): Ortholog of  Ceres SEQ ID NO 13594341 as cited in SEQ ID NO 57917
  misc_feature (1)..(627): Ortholog of  Ceres SEQ ID NO 13656441 as cited in SEQ ID NO 65703
atgtcgacagtgggaaattcaacgaacatattttggcaagaatcccccattgggaaaactgaaaggcagaagttgttaaatcagaagggttgtgtggtgtggatcacagggctcagtggctcagggaaaagcacgttagcttgctcgcttagtagagagctgaacaaccggggaaagctatcatatattcttgatggtgacaatcttcgtcatggtttgaacaaagatcttggtttcaaggcagaggatagagtggaaaatatacgcagggtcggagaagtagccaaactctttgcggatgctggtttaatctgtattgccagcctcatatccccgtatagaaaagaccgtgacgcctgcagggaaatgatacagaattcatcttttattgaggttttcatgaacatgtctctgcaattgtgtgaagcaagggaccctaaaggcctatacaagcttgcacgtgcaggaaagatcaaaggtttcacaggaatagatgatccgtatgagtctcccttgaactgtgagatagagttgaaagagaaagagggagagtgtccttcccctgtagctatggctgaggaagtgatctcttatctagaagacaaaggtttccttcaaaacgagtaa

SEQ ID NO: 91752 - protein, 208 aa, Arabidopsis thaliana
  peptide (1)..(208): Ceres Seq. ID no. 12729165
MSTVGNSTNIFWQESPIGKTERQKLLNQKGCVVWITGLSGSGKSTLACSLSRELNNRGKLSYILDGDNLRHGLNKDLGFKAEDRVENIRRVGEVAKLFADAGLICIASLISPYRKDRDACREMIQNSSFIEVFMNMSLQLCEARDPKGLYKLARAGKIKGFTGIDDPYESPLNCEIELKEKEGECPSPVAMAEEVISYLEDKGFLQNE

SEQ ID NO: 91753 - DNA, 1236 bp, Arabidopsis thaliana
  misc_feature (1)..(1236): Ceres Seq. ID no. 12729166
  misc_feature (1)..(1236): Ortholog of  Ceres SEQ ID NO 15175898 as cited in SEQ ID NO 57344
atgaatgctttagcagcaaccaacagaaacttcaagcttgcttctaggcttcttggtttagactcaaagctcgagaaaagtcttctcattcccttcagagagatcaaggtggaatgtaccataccaaaagacgatggaactctagcatcctttgttggattcagagttcaacacgacaatgcaagaggtcccatgaaaggtggaatcagatatcatccagaggttgaaccggatgaagtaaacgctttggctcaacttatgacatggaaaacagcagtggctaagataccttatggaggagccaaaggaggaatcggttgtgacccgagcgagctaagtctctcagagctcgaacgtttgactcgagttttcactcagaagattcacgatcttattgggattcatactgatgttccagctcctgatatgggaaccggtcctcagacaatggcttggattcttgatgaatactcaaaattccatggacattctcctgctgttgtcactggaaaacccattgatcttggtggatctcttgggagagatgctgctacaggaagaggagtgttgtttgcaacagaagctttactcaacgaacatggaaagaccatatctggacagcgattcgccatccagggctttggaaatgtgggttcttgggcagcgaagttgataagtgacaaaggtggtaagattgtggcggtgagtgatgtcacaggagcaatcaagaacaataatggaattgacatcttgagtttgctcgagcatgctgaagaaaacagaggaatcaaagggtttgatggtgctgattcaatcgatcctgattcgattcttgtcgaagattgtgatattcttgtccctgcagctctagggggagtcatcaacagggaaaatgcaaacgaaataaaagccaaattcatcattgaaggtgctaatcacccaactgatcctgaggctgacgagatcttgaagaagaaaggtgttatgatcctcccagatatatacgcaaactcaggaggagtcactgtaagttacttcgagtgggttcagaacatacaaggattcatgtgggatgaggaaaaggtgaatagggagctaaagacctacatgactcgcgggttcaaagacttgaaagaaatgtgtcagacgcactcatgtgatctccgtatgggagctttcaccctcggtattaatcgtgtcgctcaagctaccactatcagaggctggggttcttga

SEQ ID NO: 91754 - protein, 411 aa, Arabidopsis thaliana
  peptide (1)..(411): Ceres Seq. ID no. 12729167
MNALAATNRNFKLASRLLGLDSKLEKSLLIPFREIKVECTIPKDDGTLASFVGFRVQHDNARGPMKGGIRYHPEVEPDEVNALAQLMTWKTAVAKIPYGGAKGGIGCDPSELSLSELERLTRVFTQKIHDLIGIHTDVPAPDMGTGPQTMAWILDEYSKFHGHSPAVVTGKPIDLGGSLGRDAATGRGVLFATEALLNEHGKTISGQRFAIQGFGNVGSWAAKLISDKGGKIVAVSDVTGAIKNNNGIDILSLLEHAEENRGIKGFDGADSIDPDSILVEDCDILVPAALGGVINRENANEIKAKFIIEGANHPTDPEADEILKKKGVMILPDIYANSGGVTVSYFEWVQNIQGFMWDEEKVNRELKTYMTRGFKDLKEMCQTHSCDLRMGAFTLGINRVAQATTIRGWGS

SEQ ID NO: 91755 - protein, 347 aa, Arabidopsis thaliana
  peptide (1)..(347): Ceres Seq. ID no. 12729168
MKGGIRYHPEVEPDEVNALAQLMTWKTAVAKIPYGGAKGGIGCDPSELSLSELERLTRVFTQKIHDLIGIHTDVPAPDMGTGPQTMAWILDEYSKFHGHSPAVVTGKPIDLGGSLGRDAATGRGVLFATEALLNEHGKTISGQRFAIQGFGNVGSWAAKLISDKGGKIVAVSDVTGAIKNNNGIDILSLLEHAEENRGIKGFDGADSIDPDSILVEDCDILVPAALGGVINRENANEIKAKFIIEGANHPTDPEADEILKKKGVMILPDIYANSGGVTVSYFEWVQNIQGFMWDEEKVNRELKTYMTRGFKDLKEMCQTHSCDLRMGAFTLGINRVAQATTIRGWGS

SEQ ID NO: 91756 - protein, 325 aa, Arabidopsis thaliana
  peptide (1)..(325): Ceres Seq. ID no. 12729169
MTWKTAVAKIPYGGAKGGIGCDPSELSLSELERLTRVFTQKIHDLIGIHTDVPAPDMGTGPQTMAWILDEYSKFHGHSPAVVTGKPIDLGGSLGRDAATGRGVLFATEALLNEHGKTISGQRFAIQGFGNVGSWAAKLISDKGGKIVAVSDVTGAIKNNNGIDILSLLEHAEENRGIKGFDGADSIDPDSILVEDCDILVPAALGGVINRENANEIKAKFIIEGANHPTDPEADEILKKKGVMILPDIYANSGGVTVSYFEWVQNIQGFMWDEEKVNRELKTYMTRGFKDLKEMCQTHSCDLRMGAFTLGINRVAQATTIRGWGS

SEQ ID NO: 91757 - DNA, 1359 bp, Arabidopsis thaliana
  misc_feature (1)..(1359): Ceres Seq. ID no. 12729181
  misc_feature (1)..(1359): Ortholog of  Ceres SEQ ID NO 13596816 as cited in SEQ ID NO 62287
atggcgagtcatcagttaccgccgaagacggtggtggagatgcttaaagacaacaatatacagaaagtgaagttgttcgatgccgacacaaacaccatgggagctctcgccggctccggcgtcgaagtgatggtggctatccctaatgatctgctcctagcgatgggaaactatcaaagagctaaagattgggtccaaagaaacgtctctagattcaactttaacaacggcgttaagatcaaatacgttgcagtggggaacgaaccgttcttgacagcgtacaacggatcattcataaacctaacgtacccagcactcttcaacatccaaaccgctttaaacgaggctggagttggtgattttaccaaagccaccgttcctttaaacgccgacgtttacaattctcctccggacaatcaagtcccatccgccggaagattccgttccgacattatccaagaaatgacacaaatcgttaacttcctcgcacagaacaaagctcctttcacagtcaacatttatcctttcctcagtctctacttaagcagcgactttcctttcgaatacgctttctttgacggccaaaacaccgttaacgataacggcgttatctacacgaacgtcttcgacgctagtttcgacacgcttttagcttctttaaacgcgttgaatcacggtaacatggaagtgattgttggagaagttggttggcctacggatggtgacaagaacgcaaacgttccaaacgcggaacggttttattccggtttgcttccgcggttggcgaacaacgttggaactcctatgcgtaaaggttacattgaggtttatcttttcggatttatcgatgaagatgcgaaaagtgtagcgccagggaacttcgaacgtcattgggggatatttaaatttgatggccaaccgaaattcccggtagattttcgtggacaaggtcagaaaaagttcttaacgggagctcaaaacgttcagtactttctgaaccagtggtgtatgtttaatcctaatggtcgtggtaatatgagtaggctcggagataatataaactacgcgtgttcgcattcggactgtaccgctttaggttatggatcatcttgtggcaatcttgatgcgaatggaaacgcatcttacgcgtttaatatgtatttccaagtgcaaaatcaggaagctcaggcgtgcgattttgaagggcttgcaacgattactactcaaaatatatctcaaggacaatgtaattttccaattcagattggagagccatcttctggtcattatgattatagctatggttcgatggttaggttgtgtttggtgatgagtggcttggtctttcttctcatatag

SEQ ID NO: 91758 - protein, 452 aa, Arabidopsis thaliana
  peptide (1)..(452): Ceres Seq. ID no. 12729182
MASHQLPPKTVVEMLKDNNIQKVKLFDADTNTMGALAGSGVEVMVAIPNDLLLAMGNYQRAKDWVQRNVSRFNFNNGVKIKYVAVGNEPFLTAYNGSFINLTYPALFNIQTALNEAGVGDFTKATVPLNADVYNSPPDNQVPSAGRFRSDIIQEMTQIVNFLAQNKAPFTVNIYPFLSLYLSSDFPFEYAFFDGQNTVNDNGVIYTNVFDASFDTLLASLNALNHGNMEVIVGEVGWPTDGDKNANVPNAERFYSGLLPRLANNVGTPMRKGYIEVYLFGFIDEDAKSVAPGNFERHWGIFKFDGQPKFPVDFRGQGQKKFLTGAQNVQYFLNQWCMFNPNGRGNMSRLGDNINYACSHSDCTALGYGSSCGNLDANGNASYAFNMYFQVQNQEAQACDFEGLATITTQNISQGQCNFPIQIGEPSSGHYDYSYGSMVRLCLVMSGLVFLLI

SEQ ID NO: 91759 - protein, 439 aa, Arabidopsis thaliana
  peptide (1)..(439): Ceres Seq. ID no. 12729183
MLKDNNIQKVKLFDADTNTMGALAGSGVEVMVAIPNDLLLAMGNYQRAKDWVQRNVSRFNFNNGVKIKYVAVGNEPFLTAYNGSFINLTYPALFNIQTALNEAGVGDFTKATVPLNADVYNSPPDNQVPSAGRFRSDIIQEMTQIVNFLAQNKAPFTVNIYPFLSLYLSSDFPFEYAFFDGQNTVNDNGVIYTNVFDASFDTLLASLNALNHGNMEVIVGEVGWPTDGDKNANVPNAERFYSGLLPRLANNVGTPMRKGYIEVYLFGFIDEDAKSVAPGNFERHWGIFKFDGQPKFPVDFRGQGQKKFLTGAQNVQYFLNQWCMFNPNGRGNMSRLGDNINYACSHSDCTALGYGSSCGNLDANGNASYAFNMYFQVQNQEAQACDFEGLATITTQNISQGQCNFPIQIGEPSSGHYDYSYGSMVRLCLVMSGLVFLLI

SEQ ID NO: 91760 - protein, 420 aa, Arabidopsis thaliana
  peptide (1)..(420): Ceres Seq. ID no. 12729184
MGALAGSGVEVMVAIPNDLLLAMGNYQRAKDWVQRNVSRFNFNNGVKIKYVAVGNEPFLTAYNGSFINLTYPALFNIQTALNEAGVGDFTKATVPLNADVYNSPPDNQVPSAGRFRSDIIQEMTQIVNFLAQNKAPFTVNIYPFLSLYLSSDFPFEYAFFDGQNTVNDNGVIYTNVFDASFDTLLASLNALNHGNMEVIVGEVGWPTDGDKNANVPNAERFYSGLLPRLANNVGTPMRKGYIEVYLFGFIDEDAKSVAPGNFERHWGIFKFDGQPKFPVDFRGQGQKKFLTGAQNVQYFLNQWCMFNPNGRGNMSRLGDNINYACSHSDCTALGYGSSCGNLDANGNASYAFNMYFQVQNQEAQACDFEGLATITTQNISQGQCNFPIQIGEPSSGHYDYSYGSMVRLCLVMSGLVFLLI

SEQ ID NO: 91761 - DNA, 1328 bp, Arabidopsis thaliana
  misc_feature (1)..(1328): Ceres Seq. ID no. 12729185
  misc_feature (1)..(1328): Ortholog of  Ceres SEQ ID NO 14311981 as cited in SEQ ID NO 55703
  misc_feature (1)..(1328): Ortholog of  Ceres SEQ ID NO 13599003 as cited in SEQ ID NO 0
agaaaaatataaagcacaagtaagcaaaagcagcaaaaacatcttccttagtttttggagtttactctcttggaacttctgagagaagcaaattagatttaaacttacagttgcacagactttatgtattaccaaaaccagcaccaaggaaagaacatcctctcatcttcaagaatgcatataacttctgaaaggcatccattccttagagggaatagtccaggtgattctggacttatcctatcaaccgatgcaaagccacgcctaaaatggactccagatcttcatgagagattcattgaagcagtcaatcaactcggtggagcagataaagctactcctaagacaatcatgaaagtcatggggattccaggccttaccttataccatctcaaaagtcatcttcagaaatacaggctgagcaagaatctcaacggacaagctaacaacagcttcaacaaaataggtataatgaccatgatggaagaaaagactcctgatgcagacgaaattcaaagcgagaatttaagcattggaccacagccaaacaagaattcaccaataggtgaagcactgcaaatgcaaatagaggtccaaagaaggcttcatgagcaacttgagcttaggatagaggctcaagggaagtacctgcaatcggttttggagaaagcacaagagactcttggaagacagaacctcggtgcagctgggatcgaagctgccaaagttcaactctcggaactagtatctaaagtatcagcagagtacccaaactctagtttcctagaaccaaaagaacttcaaaacctatgctcacaacagatgcaaacaaactatccacctgattgctctcttgaaagttgcctgacctcaagcgagggaacgcagaaaaactcgaaaatgctagagaacaacagattaggactaagaacgtatattggtgattcaacatcggagcagaaagagattatggaagaaccattgttccaaagaatggagctcacatggacagaaggtctaagagggaatccatatctttcaacaatggtgagtgaagcagaacaaagaatctcatattcagaaagaagtccaggtagattatcaataggagtaggattgcacggacacaaaagccaacatcaacaaggcaacaatgaggatcataagcttgaaacacgaaaccggaaaggcatggattcaacaacagagctagatctcaacacacatgttgaaaactattgtacaacgcgtacgaaacagttcgacttgaatggtttcagctggaactgagaatagattaaccaaaaagttaaaagagagtttcaatc

SEQ ID NO: 91762 - protein, 388 aa, Arabidopsis thaliana
  peptide (1)..(388): Ceres Seq. ID no. 12729186
MYYQNQHQGKNILSSSRMHITSERHPFLRGNSPGDSGLILSTDAKPRLKWTPDLHERFIEAVNQLGGADKATPKTIMKVMGIPGLTLYHLKSHLQKYRLSKNLNGQANNSFNKIGIMTMMEEKTPDADEIQSENLSIGPQPNKNSPIGEALQMQIEVQRRLHEQLELRIEAQGKYLQSVLEKAQETLGRQNLGAAGIEAAKVQLSELVSKVSAEYPNSSFLEPKELQNLCSQQMQTNYPPDCSLESCLTSSEGTQKNSKMLENNRLGLRTYIGDSTSEQKEIMEEPLFQRMELTWTEGLRGNPYLSTMVSEAEQRISYSERSPGRLSIGVGLHGHKSQHQQGNNEDHKLETRNRKGMDSTTELDLNTHVENYCTTRTKQFDLNGFSWN

SEQ ID NO: 91763 - protein, 371 aa, Arabidopsis thaliana
  peptide (1)..(371): Ceres Seq. ID no. 12729187
MHITSERHPFLRGNSPGDSGLILSTDAKPRLKWTPDLHERFIEAVNQLGGADKATPKTIMKVMGIPGLTLYHLKSHLQKYRLSKNLNGQANNSFNKIGIMTMMEEKTPDADEIQSENLSIGPQPNKNSPIGEALQMQIEVQRRLHEQLELRIEAQGKYLQSVLEKAQETLGRQNLGAAGIEAAKVQLSELVSKVSAEYPNSSFLEPKELQNLCSQQMQTNYPPDCSLESCLTSSEGTQKNSKMLENNRLGLRTYIGDSTSEQKEIMEEPLFQRMELTWTEGLRGNPYLSTMVSEAEQRISYSERSPGRLSIGVGLHGHKSQHQQGNNEDHKLETRNRKGMDSTTELDLNTHVENYCTTRTKQFDLNGFSWN

SEQ ID NO: 91764 - protein, 312 aa, Arabidopsis thaliana
  peptide (1)..(312): Ceres Seq. ID no. 12729188
MKVMGIPGLTLYHLKSHLQKYRLSKNLNGQANNSFNKIGIMTMMEEKTPDADEIQSENLSIGPQPNKNSPIGEALQMQIEVQRRLHEQLELRIEAQGKYLQSVLEKAQETLGRQNLGAAGIEAAKVQLSELVSKVSAEYPNSSFLEPKELQNLCSQQMQTNYPPDCSLESCLTSSEGTQKNSKMLENNRLGLRTYIGDSTSEQKEIMEEPLFQRMELTWTEGLRGNPYLSTMVSEAEQRISYSERSPGRLSIGVGLHGHKSQHQQGNNEDHKLETRNRKGMDSTTELDLNTHVENYCTTRTKQFDLNGFSWN

SEQ ID NO: 91765 - DNA, 348 bp, Arabidopsis thaliana
  misc_feature (1)..(348): Ceres Seq. ID no. 12729337
  misc_feature (1)..(348): Ortholog of  Ceres SEQ ID NO 13496874 as cited in SEQ ID NO 20713
atggcttccaaggctttagttctgtttggtctatttgcagttcttctcgtcgtcacagaagttgccgctgcatccggtacagtgaagtcagagagtggggaaaccgtgcaacctgatcaatataatggcggtcacggcggcaatggaggctacaacggaggaggaggttacaacggaggaggaggtcacaacggaggaggttacaacggaggaggaggatacaatggaggaggacacggaggaagacatggttactgtcgctatggctgttgctacagaggttaccatggctgttcaaggtgttgttcgtatgctggagaagctgttcagactcagcctggtcactaa

SEQ ID NO: 91766 - protein, 115 aa, Arabidopsis thaliana
  peptide (1)..(115): Ceres Seq. ID no. 12729338
MASKALVLFGLFAVLLVVTEVAAASGTVKSESGETVQPDQYNGGHGGNGGYNGGGGYNGGGGHNGGGYNGGGGYNGGGHGGRHGYCRYGCCYRGYHGCSRCCSYAGEAVQTQPGH

SEQ ID NO: 91767 - protein, 74 aa, Arabidopsis thaliana
  peptide (1)..(74): Ceres Seq. ID no. 12729339
MAVTAAMEATTEEEVTTEEEVTTEEVTTEEEDTMEEDTEEDMVTVAMAVATEVTMAVQGVVRMLEKLFRLSLVT

SEQ ID NO: 91768 - protein, 68 aa, Arabidopsis thaliana
  peptide (1)..(68): Ceres Seq. ID no. 12729340
MEATTEEEVTTEEEVTTEEVTTEEEDTMEEDTEEDMVTVAMAVATEVTMAVQGVVRMLEKLFRLSLVT

SEQ ID NO: 91769 - DNA, 1422 bp, Arabidopsis thaliana
  misc_feature (1)..(1422): Ceres Seq. ID no. 12729358
  misc_feature (1)..(1422): Ortholog of  Ceres SEQ ID NO 13596816 as cited in SEQ ID NO 62287
atggatctcctcacaccactcatcttcctcctcctcctcctctcaccattttcactctcagatgctggttccatcggagtaaactacggccgaatctccgacgaactcccctccgcattcaaagtagtccaactactaaaatcccaaggaatcacgcgagtcaaaatcttcgacgcagacccatcagttctcaaagcattatccggatctggaatcaaagtcaccgtagatctccccaacgagttactcttctccgccgccaaaagaacttccttcgccgtctcatgggtcaaacgcaacgtagcagcttatcatccttcaacacagatcgaatcaatagctgttggtaacgaagtcttcgttgatacacacaacactacaagcttcttgatccctgcaatgagaaacattcacaaagctcttatgagtttcaatctccactccgacattaaaatctcttctcctcttgctttaagcgctcttcaaaactcttacccttcttcctccggttctttccgaccagaacttattgactctgttatcaaaccaatgcttgacttcttacgtgaaactggttcaagacttatgatcaatgtctatcctttctttgcttatgaaggaaactctgacgtcattcctttagattatgctttgcttagagagaatccaggaatggttgattctggtaatggtttgagatactttaatctcttcgacgctcaaatcgacgccgttttcgcagcaatgtcggctttaaagtacgatgatatcgaaatcattgtcacggaaactggttggccgtcgaaaggagatgagaatgaagtcggagctactctagctaacgcagcttcttacaacggaaacttaatccgtcggatcttgacacgtggaggtacaccgttacgtcctaaagcagatctaacggtctatcttttcgctctgttcaacgagaacaagaagttaggtccaacgtcggagagaaactatggtctcttcttccctgatgagaagaaagtctacgacattcctttcacaacagaggggttgaaacattaccgtgacggtggtcatactccggtcactggaggagatcaggttacaaagcctccgatgagtggaggcgtgtcgaagagtttgaatggttatacttggtgtgtagctaatggtgatgctggtgaagaaaggttacaaggtggtttagattatgcttgtggtgaaggtggtgctgattgtcgtcctattcaacctggtgctaactgttatagtcctgatacacttgaggctcacgcttcgtttgctttcaatagttattaccagaagaagggtcgtgccggtgggagttgttacttcggcggcgccgcttacgtcgttagccaaccaccgagtaagtataactttttttttgtgtgtggcgcatgttaa

SEQ ID NO: 91770 - protein, 473 aa, Arabidopsis thaliana
  peptide (1)..(473): Ceres Seq. ID no. 12729359
MDLLTPLIFLLLLLSPFSLSDAGSIGVNYGRISDELPSAFKVVQLLKSQGITRVKIFDADPSVLKALSGSGIKVTVDLPNELLFSAAKRTSFAVSWVKRNVAAYHPSTQIESIAVGNEVFVDTHNTTSFLIPAMRNIHKALMSFNLHSDIKISSPLALSALQNSYPSSSGSFRPELIDSVIKPMLDFLRETGSRLMINVYPFFAYEGNSDVIPLDYALLRENPGMVDSGNGLRYFNLFDAQIDAVFAAMSALKYDDIEIIVTETGWPSKGDENEVGATLANAASYNGNLIRRILTRGGTPLRPKADLTVYLFALFNENKKLGPTSERNYGLFFPDEKKVYDIPFTTEGLKHYRDGGHTPVTGGDQVTKPPMSGGVSKSLNGYTWCVANGDAGEERLQGGLDYACGEGGADCRPIQPGANCYSPDTLEAHASFAFNSYYQKKGRAGGSCYFGGAAYVVSQPPSKYNFFFVCGAC

SEQ ID NO: 91771 - protein, 340 aa, Arabidopsis thaliana
  peptide (1)..(340): Ceres Seq. ID no. 12729360
MRNIHKALMSFNLHSDIKISSPLALSALQNSYPSSSGSFRPELIDSVIKPMLDFLRETGSRLMINVYPFFAYEGNSDVIPLDYALLRENPGMVDSGNGLRYFNLFDAQIDAVFAAMSALKYDDIEIIVTETGWPSKGDENEVGATLANAASYNGNLIRRILTRGGTPLRPKADLTVYLFALFNENKKLGPTSERNYGLFFPDEKKVYDIPFTTEGLKHYRDGGHTPVTGGDQVTKPPMSGGVSKSLNGYTWCVANGDAGEERLQGGLDYACGEGGADCRPIQPGANCYSPDTLEAHASFAFNSYYQKKGRAGGSCYFGGAAYVVSQPPSKYNFFFVCGAC

SEQ ID NO: 91772 - protein, 332 aa, Arabidopsis thaliana
  peptide (1)..(332): Ceres Seq. ID no. 12729361
MSFNLHSDIKISSPLALSALQNSYPSSSGSFRPELIDSVIKPMLDFLRETGSRLMINVYPFFAYEGNSDVIPLDYALLRENPGMVDSGNGLRYFNLFDAQIDAVFAAMSALKYDDIEIIVTETGWPSKGDENEVGATLANAASYNGNLIRRILTRGGTPLRPKADLTVYLFALFNENKKLGPTSERNYGLFFPDEKKVYDIPFTTEGLKHYRDGGHTPVTGGDQVTKPPMSGGVSKSLNGYTWCVANGDAGEERLQGGLDYACGEGGADCRPIQPGANCYSPDTLEAHASFAFNSYYQKKGRAGGSCYFGGAAYVVSQPPSKYNFFFVCGAC

SEQ ID NO: 91773 - DNA, 1583 bp, Arabidopsis thaliana
  misc_feature (1)..(1583): Ceres Seq. ID no. 12729365
  misc_feature (1)..(1583): Ortholog of  Ceres SEQ ID NO 14315241 as cited in SEQ ID NO 52516
  misc_feature (1)..(1583): Ortholog of  Ceres SEQ ID NO 13594349 as cited in SEQ ID NO 58161
  misc_feature (1)..(1583): Ortholog of  Ceres SEQ ID NO 13663419 as cited in SEQ ID NO 66561
atctctctcgtactcagaaataatagaatgggaaaacaacaagattggtccgtgaccgcttgtattttcctatcgttgtctctagcatcacaaatccattgtagtagccaaacacattttccaagccacaagggaggagctggtttgtcaggtgacacaagccacttcaattctgttagtcgcgaaaatgtgctttcgcttaaggagaaagatctaatcgagaagctccccggacaaccttccggcattagtttcagacagtacggtggttatgtggccgtaaacgaaccagccactcggtttttgtactattattttgtggaagccatcaaacctagtaaatctactcctcttgtgctctggttcaacggaggaccggggtgctcatctgtaggatttggggcatttgaagagcttggtccatttcgcgtacatagcgatggcaaaacgctttaccgcaatccttattcatggaacaacgaggcgaacatgttgttcttcgaagggccaataagtgtaggattctcgtactcgagtactccttttgattgggagatatttggggaacaagcggataagctaacagcagaggataactacatgttcttggtgaattggcttgaaaggtttccggaatataaaggacgagacgtttacatctccggtcagagttacgctggccactatattccccaactggcccagatcatccttcaccgtaacaaccaaaccttcatcaatctacgaggcatttcgatcggtaatccaggtctcgatttacttatcgaggctgataatgagaataaatttattttaagtcatggtttggtttcccaaaaagattttgaagagtacagtaaagtctgcgattttgccaactatgatatggacgaatgcccaaagataatgcctaaatttagtattgaacataacaaacacttggacgtttacaacatatacgctcccgtgtgcctaaactccacgttaagcagcgaacccaagaaatgcaccacaataatggaggttgatccgtgccgttccaactacgtgaaggcttatcttaacagcgaaaatgttcaagaagcgatgcatgccaacaccacaaaattaccgtacgagtggaaggcttgcaatcactacttgaattccgtatggatcgacgctgataaagatgcctcaatggttcctatccttcacgacctgatgggtgagggtgtccgagtattggtgtatagtggggacgtggatgcggctattccgtttacagctacaatggccgtgctgaagacgatgaatctaacggttgtaaacgaatggcgtccgtggtttaccggaggacaactgggagggttcacagaggattacgaacggaacttaacgtatgcaactgtgaaaggatcaggtcattctgttcctttggaccaacctgtacatgctcttaatctatttaccagtttcatccgtaacactcctctccctcaaacaccctgatttgtaacatgtaccacctctattgactgatcaagatactttggtttatagatggatttgatgtttcgtgtaactaaagtcaatattctact

SEQ ID NO: 91774 - protein, 496 aa, Arabidopsis thaliana
  peptide (1)..(496): Ceres Seq. ID no. 12729366
ISLVLRNNRMGKQQDWSVTACIFLSLSLASQIHCSSQTHFPSHKGGAGLSGDTSHFNSVSRENVLSLKEKDLIEKLPGQPSGISFRQYGGYVAVNEPATRFLYYYFVEAIKPSKSTPLVLWFNGGPGCSSVGFGAFEELGPFRVHSDGKTLYRNPYSWNNEANMLFFEGPISVGFSYSSTPFDWEIFGEQADKLTAEDNYMFLVNWLERFPEYKGRDVYISGQSYAGHYIPQLAQIILHRNNQTFINLRGISIGNPGLDLLIEADNENKFILSHGLVSQKDFEEYSKVCDFANYDMDECPKIMPKFSIEHNKHLDVYNIYAPVCLNSTLSSEPKKCTTIMEVDPCRSNYVKAYLNSENVQEAMHANTTKLPYEWKACNHYLNSVWIDADKDASMVPILHDLMGEGVRVLVYSGDVDAAIPFTATMAVLKTMNLTVVNEWRPWFTGGQLGGFTEDYERNLTYATVKGSGHSVPLDQPVHALNLFTSFIRNTPLPQTP

SEQ ID NO: 91775 - protein, 487 aa, Arabidopsis thaliana
  peptide (1)..(487): Ceres Seq. ID no. 12729367
MGKQQDWSVTACIFLSLSLASQIHCSSQTHFPSHKGGAGLSGDTSHFNSVSRENVLSLKEKDLIEKLPGQPSGISFRQYGGYVAVNEPATRFLYYYFVEAIKPSKSTPLVLWFNGGPGCSSVGFGAFEELGPFRVHSDGKTLYRNPYSWNNEANMLFFEGPISVGFSYSSTPFDWEIFGEQADKLTAEDNYMFLVNWLERFPEYKGRDVYISGQSYAGHYIPQLAQIILHRNNQTFINLRGISIGNPGLDLLIEADNENKFILSHGLVSQKDFEEYSKVCDFANYDMDECPKIMPKFSIEHNKHLDVYNIYAPVCLNSTLSSEPKKCTTIMEVDPCRSNYVKAYLNSENVQEAMHANTTKLPYEWKACNHYLNSVWIDADKDASMVPILHDLMGEGVRVLVYSGDVDAAIPFTATMAVLKTMNLTVVNEWRPWFTGGQLGGFTEDYERNLTYATVKGSGHSVPLDQPVHALNLFTSFIRNTPLPQTP

SEQ ID NO: 91776 - protein, 333 aa, Arabidopsis thaliana
  peptide (1)..(333): Ceres Seq. ID no. 12729368
MLFFEGPISVGFSYSSTPFDWEIFGEQADKLTAEDNYMFLVNWLERFPEYKGRDVYISGQSYAGHYIPQLAQIILHRNNQTFINLRGISIGNPGLDLLIEADNENKFILSHGLVSQKDFEEYSKVCDFANYDMDECPKIMPKFSIEHNKHLDVYNIYAPVCLNSTLSSEPKKCTTIMEVDPCRSNYVKAYLNSENVQEAMHANTTKLPYEWKACNHYLNSVWIDADKDASMVPILHDLMGEGVRVLVYSGDVDAAIPFTATMAVLKTMNLTVVNEWRPWFTGGQLGGFTEDYERNLTYATVKGSGHSVPLDQPVHALNLFTSFIRNTPLPQTP

SEQ ID NO: 91777 - DNA, 1407 bp, Arabidopsis thaliana
  misc_feature (1)..(1407): Ceres Seq. ID no. 12729409
  misc_feature (1)..(1407): Ortholog of  Ceres SEQ ID NO 15176457 as cited in SEQ ID NO 55547
  misc_feature (1)..(1407): Ortholog of  Ceres SEQ ID NO 13594349 as cited in SEQ ID NO 58161
  misc_feature (1)..(1407): Ortholog of  Ceres SEQ ID NO 13663419 as cited in SEQ ID NO 66561
atggtatcgtctcgggccgttgtgatggccattatggtattggtcacagtgcagtggttggtttttgctgaaggttatccggaagaagacttggtggccaggctacctggtcaaccaaacgtcgggttcagacaatttgctggatatgtcgatgtggactcggaaaatggtcgtagtcttttttactactacgtggaggctgtaaaagaacctgacactaagcccttaaccctttggctcaatggaggtccaggttgttcttcagttggtggaggagctttcactgagttaggtccattttatcctacgggcgatggccgtggccttcgcttgaactccatgtcttggaacaaagcttcgaacttgttatttgtggagtcaccagccggagtaggatggtcatactctaacagaagttcggattacaacactggggacaagtctactgtcaatgatatgcttgtgttcttgttgagatggttcaacaagttcccagagttgaagtctcgcgacctctttctcactggcgaaagctacgcagggcattacatacctcaactggctgatgtgatactcagctacaattcacgctcaagtgggttcaaatttaacgtcaaaggcattgcaattgggaatccacttctgaagcttgacagggactttgcagctgcatacgagtacttctggtcacatgggatgatctctgatgaagtaagactcacaatcatgaaccaatgtgactttgccaatccaaagaacatgagcaatgcttgtatatatgcaatcgttgaatccagcgtcctcactgagtatatcaacagctatcacattctcctcgatgtatgttacccttctattgttcagcaagagctaaggctcaagaaaatggttaccaagattagcatggtagttgatgtttgtataacatatgaaagaagtttctatttcaatctccccaaggtacagaatgcgcttcacgctaaccgcactcgcctaccttatgaatggactatgtgcagcaaccggttaaactacagtggcatagacgggtacattgacatgcttccgagtcttaagagaattattcagaaccaaactcctgtttggatcttcagtggagatcaagattctgtaattccacttcaaagttcaagaacactcgtacgagaacttgctgaggatctcaacttcaagaccactattccctatggagcttggttccacaaagaacaggttggtggctgggtcacagagtatgggaatctactgacctttgcaacggtgagaggagcggctcatatggtgccgtatgcggagccctcacgagctctgcacatgttcagtagctttatgaatggccggagattgcccaacaaaccagatttaaagtcttctactgatgattga

SEQ ID NO: 91778 - protein, 468 aa, Arabidopsis thaliana
  peptide (1)..(468): Ceres Seq. ID no. 12729410
MVSSRAVVMAIMVLVTVQWLVFAEGYPEEDLVARLPGQPNVGFRQFAGYVDVDSENGRSLFYYYVEAVKEPDTKPLTLWLNGGPGCSSVGGGAFTELGPFYPTGDGRGLRLNSMSWNKASNLLFVESPAGVGWSYSNRSSDYNTGDKSTVNDMLVFLLRWFNKFPELKSRDLFLTGESYAGHYIPQLADVILSYNSRSSGFKFNVKGIAIGNPLLKLDRDFAAAYEYFWSHGMISDEVRLTIMNQCDFANPKNMSNACIYAIVESSVLTEYINSYHILLDVCYPSIVQQELRLKKMVTKISMVVDVCITYERSFYFNLPKVQNALHANRTRLPYEWTMCSNRLNYSGIDGYIDMLPSLKRIIQNQTPVWIFSGDQDSVIPLQSSRTLVRELAEDLNFKTTIPYGAWFHKEQVGGWVTEYGNLLTFATVRGAAHMVPYAEPSRALHMFSSFMNGRRLPNKPDLKSSTDD

SEQ ID NO: 91779 - protein, 460 aa, Arabidopsis thaliana
  peptide (1)..(460): Ceres Seq. ID no. 12729411
MAIMVLVTVQWLVFAEGYPEEDLVARLPGQPNVGFRQFAGYVDVDSENGRSLFYYYVEAVKEPDTKPLTLWLNGGPGCSSVGGGAFTELGPFYPTGDGRGLRLNSMSWNKASNLLFVESPAGVGWSYSNRSSDYNTGDKSTVNDMLVFLLRWFNKFPELKSRDLFLTGESYAGHYIPQLADVILSYNSRSSGFKFNVKGIAIGNPLLKLDRDFAAAYEYFWSHGMISDEVRLTIMNQCDFANPKNMSNACIYAIVESSVLTEYINSYHILLDVCYPSIVQQELRLKKMVTKISMVVDVCITYERSFYFNLPKVQNALHANRTRLPYEWTMCSNRLNYSGIDGYIDMLPSLKRIIQNQTPVWIFSGDQDSVIPLQSSRTLVRELAEDLNFKTTIPYGAWFHKEQVGGWVTEYGNLLTFATVRGAAHMVPYAEPSRALHMFSSFMNGRRLPNKPDLKSSTDD

SEQ ID NO: 91780 - protein, 457 aa, Arabidopsis thaliana
  peptide (1)..(457): Ceres Seq. ID no. 12729412
MVLVTVQWLVFAEGYPEEDLVARLPGQPNVGFRQFAGYVDVDSENGRSLFYYYVEAVKEPDTKPLTLWLNGGPGCSSVGGGAFTELGPFYPTGDGRGLRLNSMSWNKASNLLFVESPAGVGWSYSNRSSDYNTGDKSTVNDMLVFLLRWFNKFPELKSRDLFLTGESYAGHYIPQLADVILSYNSRSSGFKFNVKGIAIGNPLLKLDRDFAAAYEYFWSHGMISDEVRLTIMNQCDFANPKNMSNACIYAIVESSVLTEYINSYHILLDVCYPSIVQQELRLKKMVTKISMVVDVCITYERSFYFNLPKVQNALHANRTRLPYEWTMCSNRLNYSGIDGYIDMLPSLKRIIQNQTPVWIFSGDQDSVIPLQSSRTLVRELAEDLNFKTTIPYGAWFHKEQVGGWVTEYGNLLTFATVRGAAHMVPYAEPSRALHMFSSFMNGRRLPNKPDLKSSTDD

SEQ ID NO: 91781 - DNA, 1455 bp, Arabidopsis thaliana
  misc_feature (1)..(1455): Ceres Seq. ID no. 12729515
  misc_feature (1)..(1455): Ortholog of  Ceres SEQ ID NO 13655640 as cited in SEQ ID NO 63844
  misc_feature (1)..(1455): Ortholog of  Ceres SEQ ID NO 13584744 as cited in SEQ ID NO 69137
atggaactagtaagcttggacctttttgcaaacaacataagcggtcccatcccttcctctcttggcaaactaggaaaactccgcttcttgcgtctttataacaacagcttatctggagaaattccaaggtctttgactgctctgccgctggatgttcttgatatctcaaacaatcggctcagtggagatattcctgttaatggttccttttcgcagttcacttctatgagttttgccaataataaattaaggccgcgacctgcatctccttcaccatcaccttcaggaacgtctgcagcaatagtagtgggagttgctgcgggtgcagcacttctatttgcgcttgcttggtggctgagaagaaaactgcagggtcactttcttgatgtacctgctgaagaagacccagaggtttatttaggacaatttaaaaggttctccttgcgtgaactgctagttgctacagagaaatttagcaaaagaaatgtattgggcaaaggacgttttggtatattgtataaaggacgtttagctgatgacactctagtggctgtgaaacggctaaatgaagaacgtaccaagggtggggaactgcagtttcaaaccgaagttgagatgatcagtatggccgttcataggaacttgcttcggcttcgtggcttttgcatgactccaactgaaagattacttgtttatccctacatggctaatggaagtgttgcttcttgtttaagagagcgtcctgaaggcaatccagcccttgactggccaaaaagaaagcatattgctctgggatcagcaagggggctcgcatatttacacgatcattgcgaccaaaagatcattcacctggatgtgaaagctgcaaatatactgttagatgaagagtttgaagctgttgttggagattttgggctagcaaaattaatgaattataacgactcccatgtgacaactgctgtacggggtacgattggccatatagcgcccgagtacctctcgacaggaaaatcttctgagaagactgatgtttttgggtacggggtcatgcttctcgagctcatcactggacaaaaggctttcgatcttgctcggcttgcaaatgatgatgatatcatgttactcgactgggtgaaagaggttttgaaagagaagaagttggaaagccttgtggatgcagaactcgaaggaaagtacgtggaaacagaagtggagcagctgatacaaatggctctgctctgcactcaaagttctgcaatggaacgtccaaagatgtcagaagtagtgagaatgctggaaggagatggtttagctgagagatgggaagaatggcaaaaggaggagatgccaatacatgattttaactatcaagcctatcctcatgctggcactgactggctcatcccctattccaattcccttatcgaaaacgattacccctcggggccaagataa

SEQ ID NO: 91782 - protein, 484 aa, Arabidopsis thaliana
  peptide (1)..(484): Ceres Seq. ID no. 12729516
MELVSLDLFANNISGPIPSSLGKLGKLRFLRLYNNSLSGEIPRSLTALPLDVLDISNNRLSGDIPVNGSFSQFTSMSFANNKLRPRPASPSPSPSGTSAAIVVGVAAGAALLFALAWWLRRKLQGHFLDVPAEEDPEVYLGQFKRFSLRELLVATEKFSKRNVLGKGRFGILYKGRLADDTLVAVKRLNEERTKGGELQFQTEVEMISMAVHRNLLRLRGFCMTPTERLLVYPYMANGSVASCLRERPEGNPALDWPKRKHIALGSARGLAYLHDHCDQKIIHLDVKAANILLDEEFEAVVGDFGLAKLMNYNDSHVTTAVRGTIGHIAPEYLSTGKSSEKTDVFGYGVMLLELITGQKAFDLARLANDDDIMLLDWVKEVLKEKKLESLVDAELEGKYVETEVEQLIQMALLCTQSSAMERPKMSEVVRMLEGDGLAERWEEWQKEEMPIHDFNYQAYPHAGTDWLIPYSNSLIENDYPSGPR

SEQ ID NO: 91783 - protein, 409 aa, Arabidopsis thaliana
  peptide (1)..(409): Ceres Seq. ID no. 12729517
MSFANNKLRPRPASPSPSPSGTSAAIVVGVAAGAALLFALAWWLRRKLQGHFLDVPAEEDPEVYLGQFKRFSLRELLVATEKFSKRNVLGKGRFGILYKGRLADDTLVAVKRLNEERTKGGELQFQTEVEMISMAVHRNLLRLRGFCMTPTERLLVYPYMANGSVASCLRERPEGNPALDWPKRKHIALGSARGLAYLHDHCDQKIIHLDVKAANILLDEEFEAVVGDFGLAKLMNYNDSHVTTAVRGTIGHIAPEYLSTGKSSEKTDVFGYGVMLLELITGQKAFDLARLANDDDIMLLDWVKEVLKEKKLESLVDAELEGKYVETEVEQLIQMALLCTQSSAMERPKMSEVVRMLEGDGLAERWEEWQKEEMPIHDFNYQAYPHAGTDWLIPYSNSLIENDYPSGPR

SEQ ID NO: 91784 - protein, 279 aa, Arabidopsis thaliana
  peptide (1)..(279): Ceres Seq. ID no. 12729518
MISMAVHRNLLRLRGFCMTPTERLLVYPYMANGSVASCLRERPEGNPALDWPKRKHIALGSARGLAYLHDHCDQKIIHLDVKAANILLDEEFEAVVGDFGLAKLMNYNDSHVTTAVRGTIGHIAPEYLSTGKSSEKTDVFGYGVMLLELITGQKAFDLARLANDDDIMLLDWVKEVLKEKKLESLVDAELEGKYVETEVEQLIQMALLCTQSSAMERPKMSEVVRMLEGDGLAERWEEWQKEEMPIHDFNYQAYPHAGTDWLIPYSNSLIENDYPSGPR

SEQ ID NO: 91785 - DNA, 1080 bp, Arabidopsis thaliana
  misc_feature (1)..(1080): Ceres Seq. ID no. 12729529
  misc_feature (1)..(1080): Ortholog of  Ceres SEQ ID NO 13658153 as cited in SEQ ID NO 66326
atgaaaggaggaacaggagaccatagttatgctactaattcacattatcagagaagtgttttctatgagatacaacctttggtcatagagaacgtaagagaaatgctactgaaaaatgggtttcctggttgcatcaaagtggcagacttgggttgttctactggacaaaacacggtgttggccatgtccgcaatcgcctacacgatcatggagtcataccaacaaatgagtaaaaacccaccagaaatcgattgttatttgaacgaccttccagagaacgatttcaataccaccttcaagttgtttcattctttccaagagaagctgaaaccggaggttaaaggaaagtggtttgtctcgggagtcccgggttctttttactcaaggctattcccaagaaagtctctccattttgttcattcagcttttagtatccattggctttctagaattccagatggccttgagagcaacactaaaagcattcatattaaatatccatacccttcaaatgtctacaagagttatttaaatcagttcaagatagatttttcgttgttcttaaaaatgcgttcagaagaagtagtgcataatggacatatggttctaacgttcgtgggaagaaaggtttccgacactttatccaaagattgtttccaagtttggtcgttgttatccgattgcctcctcgatctagcctccgaggggtttgtgaacgattcaatggtaaaatcatttaacatgccattctacaatccaaacgaagaagaggtaagagaatttatcttaaaggaaggttccttcgagatcaccaagatcgagaaattcgaccatgttgtcccatacaaaattgaccgtgaggaagaagatgaggagcaatcacttcagttggaagctggtataaagcatgcaagctgggcaagatgcatcaccgaaccattgctcgttgctcatttcggagatgcaattatagaaccggtgttcaacaagtatgcacactatatggccaagtatctaagtgtctcaaaccatcgccgtaatatgacactcgtcatcgtagtttcgttgactaggaaataa

SEQ ID NO: 91786 - protein, 359 aa, Arabidopsis thaliana; identical to SEQ ID NO: 88264
  peptide (1)..(359): Ceres Seq. ID no. 12729530

SEQ ID NO: 91787 - protein, 325 aa, Arabidopsis thaliana; identical to SEQ ID NO: 88265
  peptide (1)..(325): Ceres Seq. ID no. 12729531

SEQ ID NO: 91788 - protein, 298 aa, Arabidopsis thaliana
  peptide (1)..(298): Ceres Seq. ID no. 12729532
MSAIAYTIMESYQQMSKNPPEIDCYLNDLPENDFNTTFKLFHSFQEKLKPEVKGKWFVSGVPGSFYSRLFPRKSLHFVHSAFSIHWLSRIPDGLESNTKSIHIKYPYPSNVYKSYLNQFKIDFSLFLKMRSEEVVHNGHMVLTFVGRKVSDTLSKDCFQVWSLLSDCLLDLASEGFVNDSMVKSFNMPFYNPNEEEVREFILKEGSFEITKIEKFDHVVPYKIDREEEDEEQSLQLEAGIKHASWARCITEPLLVAHFGDAIIEPVFNKYAHYMAKYLSVSNHRRNMTLVIVVSLTRK

SEQ ID NO: 91789 - DNA, 1557 bp, Arabidopsis thaliana
  misc_feature (1)..(1557): Ceres Seq. ID no. 12729533
  misc_feature (1)..(1557): Ortholog of  Ceres SEQ ID NO 13585332 as cited in SEQ ID NO 60654
  misc_feature (1)..(1557): Ortholog of  Ceres SEQ ID NO 13502874 as cited in SEQ ID NO 66298
  misc_feature (1)..(1557): Ortholog of  Ceres SEQ ID NO 12614124 as cited in SEQ ID NO 68392
atggcaacaatcgtcgttgactttcaaaaaattcattttcatcctcagatcctcttatccatattcacagtcatttgcatctttgtattcttcttcaagaagccaaagggctcacgaggctgtgatctgcctccgagccctccttctcttccgataatcggacatcttcaccttttactctttgatctacctcacaaagcctttcagaaactctcctctaagtatggacctcttctctgtctccgcatcttcaatgtccccatagtcctggtctcctctgcctctgtggcctacgagatcttcaagacgcatgacgtgaacatctcatcccacggccaccctccgattgacgagtgtctcttttttgggtcttcaagctttgtaatggctccttatggagattactggaagttcatgaagaagctcatggtcacaaagctgttcggacctcaggcactcgagcagtcacgaggcgcccgtgcagatgaactagaacggtttcacgcaaacctgcttagtaaggaaatgaaaagcgagactgtcgagattgctaaggaagcaataaagctgactaacaatagcatctgcaagatgattatgggtaggggttgtttagaggagaacggtgaggcagagagagttaggggattggtcaccgagacatttgccttgtttaagaaacttttcttgacacaagtgttacgcaggctgtttgagatactcagaatctcaccgttcaaaaaagagacactggatgtttcccgcaaattcgacgagcttcttgaaaggattattgtggaacacgaagagaaaacggactatgatcatggtatggacctgatggatgtgctgttggctgtttatcgagatggaaaggcagagtataagatcactagggaccacctcaagtccttgttcgtggagcttatccttggaggcactgacacctcagcgcaaacaatcgagtggacaatggcaaagatcattaagaagcctaacattcttgagagattgagaaaagaaatcgattctgttgtaggcaaaacaaggttgattcaagagaaggatctaccgaacctcccttatttgcaagcggtcatcaaggaagggctaagattacacccaccagcacctctcttgggaaggaaagtcacagatggatgtacgattggaggctgttacgtaccaaagaacacaacacttgttgttaatgcttatgccgtgatgagagatcccgattcttgggaagatcctgatgagtttaagccagagaggtttctagcttcttcaagaggaaaagaagaggagagagagcaagaacttaagtacattccttttggcagcggaagaagaggatgtcctggagtaaatctaggttatatatttgtaggaaccgcaataggaatgatggtgcattgctttgactggagaaccaatggagataaggtcaacatggaagagactgttgctggaattaccttaaacatggctcatcctcttaggtgtactcctgtttctcgaatgcaactgcagaaatcgcagttcgtgagttcatga

SEQ ID NO: 91790 - protein, 518 aa, Arabidopsis thaliana
  peptide (1)..(518): Ceres Seq. ID no. 12729534
MATIVVDFQKIHFHPQILLSIFTVICIFVFFFKKPKGSRGCDLPPSPPSLPIIGHLHLLLFDLPHKAFQKLSSKYGPLLCLRIFNVPIVLVSSASVAYEIFKTHDVNISSHGHPPIDECLFFGSSSFVMAPYGDYWKFMKKLMVTKLFGPQALEQSRGARADELERFHANLLSKEMKSETVEIAKEAIKLTNNSICKMIMGRGCLEENGEAERVRGLVTETFALFKKLFLTQVLRRLFEILRISPFKKETLDVSRKFDELLERIIVEHEEKTDYDHGMDLMDVLLAVYRDGKAEYKITRDHLKSLFVELILGGTDTSAQTIEWTMAKIIKKPNILERLRKEIDSVVGKTRLIQEKDLPNLPYLQAVIKEGLRLHPPAPLLGRKVTDGCTIGGCYVPKNTTLVVNAYAVMRDPDSWEDPDEFKPERFLASSRGKEEEREQELKYIPFGSGRRGCPGVNLGYIFVGTAIGMMVHCFDWRTNGDKVNMEETVAGITLNMAHPLRCTPVSRMQLQKSQFVSS

SEQ ID NO: 91791 - protein, 390 aa, Arabidopsis thaliana
  peptide (1)..(390): Ceres Seq. ID no. 12729535
MAPYGDYWKFMKKLMVTKLFGPQALEQSRGARADELERFHANLLSKEMKSETVEIAKEAIKLTNNSICKMIMGRGCLEENGEAERVRGLVTETFALFKKLFLTQVLRRLFEILRISPFKKETLDVSRKFDELLERIIVEHEEKTDYDHGMDLMDVLLAVYRDGKAEYKITRDHLKSLFVELILGGTDTSAQTIEWTMAKIIKKPNILERLRKEIDSVVGKTRLIQEKDLPNLPYLQAVIKEGLRLHPPAPLLGRKVTDGCTIGGCYVPKNTTLVVNAYAVMRDPDSWEDPDEFKPERFLASSRGKEEEREQELKYIPFGSGRRGCPGVNLGYIFVGTAIGMMVHCFDWRTNGDKVNMEETVAGITLNMAHPLRCTPVSRMQLQKSQFVSS

SEQ ID NO: 91792 - protein, 380 aa, Arabidopsis thaliana
  peptide (1)..(380): Ceres Seq. ID no. 12729536
MKKLMVTKLFGPQALEQSRGARADELERFHANLLSKEMKSETVEIAKEAIKLTNNSICKMIMGRGCLEENGEAERVRGLVTETFALFKKLFLTQVLRRLFEILRISPFKKETLDVSRKFDELLERIIVEHEEKTDYDHGMDLMDVLLAVYRDGKAEYKITRDHLKSLFVELILGGTDTSAQTIEWTMAKIIKKPNILERLRKEIDSVVGKTRLIQEKDLPNLPYLQAVIKEGLRLHPPAPLLGRKVTDGCTIGGCYVPKNTTLVVNAYAVMRDPDSWEDPDEFKPERFLASSRGKEEEREQELKYIPFGSGRRGCPGVNLGYIFVGTAIGMMVHCFDWRTNGDKVNMEETVAGITLNMAHPLRCTPVSRMQLQKSQFVSS

SEQ ID NO: 91793 - DNA, 1075 bp, Arabidopsis thaliana
  misc_feature (1)..(1075): Ceres Seq. ID no. 12729537
  misc_feature (1)..(1075): Ortholog of  Ceres SEQ ID NO 13581804 as cited in SEQ ID NO 51424
  misc_feature (1)..(1075): Ortholog of  Ceres SEQ ID NO 13663874 as cited in SEQ ID NO 67003
aaaaaaaagaagcttctcctcttcctctgccttcttctttccatttattgcaaaccctgatcaattggttttggtgttagtcttttggggagagagatggggagagggaagatagttatacgaaggatcgataactctacaagtagacaagtgactttctccaagagaaggagtggtttgcttaagaaagctaaagagttatcgatcctttgtgatgcagaagttggtgttatcatattctctagcaccggaaagctctacgactacgcaagcaattcaagtatgaaaacaatcattgagcggtacaacagagtaaaagaggagcagcatcaacttctgaatcatgcctcagagataaagttttggcaaagagaggttgcaagtttgcagcagcagctccaatatctacaagaatgccacaggaaactagtgggagaggaactttctggaatgaatgctaacgacctacaaaaccttgaagaccagctagtaacaagtctaaaaggtgttcgtctcaaaaaggatcaacttatgacaaatgaaatcagagaacttaatcgtaagggacaaatcatccaaaaagagaatcacgagctacaaaatattgtagatataatgcgtaaggaaaatattaaattgcaaaagaaggttcatggaagaacaaatgcgattgaaggcaattcaagtgtagatccaataagcaatggaaccacaacatatgcaccaccgcaacttcaactcatacaactacaaccagctcctagagaaaaatcaatcagactagggctacaactttcctagcaaaacatgtgggacatcgaacaatatacgaaaagagtttgtatgtcatcttcagtaacaaccaagctggatcatttcattcttggttatgtaattctgtttactactttggagtttaatatgtatatgacaagtttctctttgtcaagttacttgtgtatgtacatcataaaataatgatgtgatgtgagtgccgaacatactagacatcattttaccgtgtgtttttttcgggtacattaaatctacaaaatccagtctaattggcattttt

SEQ ID NO: 91794 - protein, 234 aa, Arabidopsis thaliana
  peptide (1)..(234): Ceres Seq. ID no. 12729538
MGRGKIVIRRIDNSTSRQVTFSKRRSGLLKKAKELSILCDAEVGVIIFSSTGKLYDYASNSSMKTIIERYNRVKEEQHQLLNHASEIKFWQREVASLQQQLQYLQECHRKLVGEELSGMNANDLQNLEDQLVTSLKGVRLKKDQLMTNEIRELNRKGQIIQKENHELQNIVDIMRKENIKLQKKVHGRTNAIEGNSSVDPISNGTTTYAPPQLQLIQLQPAPREKSIRLGLQLS

SEQ ID NO: 91795 - protein, 172 aa, Arabidopsis thaliana
  peptide (1)..(172): Ceres Seq. ID no. 12729539
MKTIIERYNRVKEEQHQLLNHASEIKFWQREVASLQQQLQYLQECHRKLVGEELSGMNANDLQNLEDQLVTSLKGVRLKKDQLMTNEIRELNRKGQIIQKENHELQNIVDIMRKENIKLQKKVHGRTNAIEGNSSVDPISNGTTTYAPPQLQLIQLQPAPREKSIRLGLQLS

SEQ ID NO: 91796 - DNA, 1912 bp, Arabidopsis thaliana
  misc_feature (1)..(1912): Ceres Seq. ID no. 12729562
  misc_feature (1)..(1912): Ortholog of  Ceres SEQ ID NO 13597407 as cited in SEQ ID NO 64106
ggaaaactatgaaacagtctgcgtctctccacgcaaaggctcaatttttacaaaccatgaagaattcttaagcaaaacaagtctaacatctttttgaattcacccaaaactcaaatcctacctcaaatttcgtatttttcttcttctgcattttctagtttaggatcgacatttttatcctccgaaagattcgtgcttttttctctctgtagattacgattgttttgtagatttaagaaaaacaaaaagatgagttttagggatgataatacggaagagggaagaaatgatcttcggcgaccgttcttacacacaggaagttggtatcggatgggttcgagacaatctagtatgttggaatcgtctcaagttattcgagacagctcaatttctgtcttagcttgtgttttgattgttgctcttggtcctattcaattcggattcacttgtggttattcctcaccaactcaagctgccattactaaggatcttggtttaactgtatcagagtactctgtgtttgggtctctatccaatgtgggtgctatggttggagcaattgcgagtggtcagattgctgaatacgttggacggaaagggtctctgatgattgctgcaattcccaatattattggatggctttcgatatcatttgcaaaagatacttcttttctttacatgggaagattgttagaaggcttcggagttgggattatctcctatacggttcccgtatatatagctgagatcgctccacagaccatgagaggagccttaggttcagttaaccagctttctgtaacaattgggataatgctggcgtatttactcggtctctttgttccatggagaattcttgcagttttgggagtattgccatgtacattgttgataccgggtctttttttcattcctgaatctcctcggtggttggcaaagatgggtttgacagatgatttcgaaacttcattgcaagttcttcgtggatttgagactgatattaccgttgaggttaatgaaatcaagagatctgtggcatcatctagcaaacgttctgcagttcggtttgtagacctcaagcgcaggagatactatttcccactgatggttggtatagggctgcttgcacttcaacaacttggaggaatcaatggtgtcttgttctattcgagtacaatttttgaatctgcaggggtgacatcaagtaatgtggcgacatttggagttggcgttgttcaggtagtggcgactgggatagcgacatggttggtggataaagcaggtcgtcggcttctactcatgatctcttctatcggaatgacgataagcctcgtgattgtagcagttgcattttaccttaaggaatttgtatcacctgattccaacatgtacaacattctaagcatggtttccgtagttggagttgtggctatggttatttcttgctctctaggaatgggaccaattccatggctgattatgtctgagattctgccagtgaatataaagggtttagccggaagtatagcaactttgttaaactggttcgtgtcatggttagtgacaatgactgcaaatatgctgttagcatggagcagtgggggaactttcactctctacgctttggtttgtggattcactgtggtttttgtgagtctttgggttcctgagactaaaggaaaaacgcttgaagagatccaagctttgttcagatgatcaaaacaagaagaggaagaagaagacaaaattttcactttttgctttctccattacagatcattcttttgtcccttccctgtgtctgtatttcatgctttgttcaatgtatttcttcttgacattgattataatttgtttatcttgtacaagcatatcattatacctttaaatttgattttttgtttttgtgtgt

SEQ ID NO: 91797 - protein, 488 aa, Arabidopsis thaliana
  peptide (1)..(488): Ceres Seq. ID no. 12729563
MSFRDDNTEEGRNDLRRPFLHTGSWYRMGSRQSSMLESSQVIRDSSISVLACVLIVALGPIQFGFTCGYSSPTQAAITKDLGLTVSEYSVFGSLSNVGAMVGAIASGQIAEYVGRKGSLMIAAIPNIIGWLSISFAKDTSFLYMGRLLEGFGVGIISYTVPVYIAEIAPQTMRGALGSVNQLSVTIGIMLAYLLGLFVPWRILAVLGVLPCTLLIPGLFFIPESPRWLAKMGLTDDFETSLQVLRGFETDITVEVNEIKRSVASSSKRSAVRFVDLKRRRYYFPLMVGIGLLALQQLGGINGVLFYSSTIFESAGVTSSNVATFGVGVVQVVATGIATWLVDKAGRRLLLMISSIGMTISLVIVAVAFYLKEFVSPDSNMYNILSMVSVVGVVAMVISCSLGMGPIPWLIMSEILPVNIKGLAGSIATLLNWFVSWLVTMTANMLLAWSSGGTFTLYALVCGFTVVFVSLWVPETKGKTLEEIQALFR

SEQ ID NO: 91798 - protein, 461 aa, Arabidopsis thaliana
  peptide (1)..(461): Ceres Seq. ID no. 12729564
MGSRQSSMLESSQVIRDSSISVLACVLIVALGPIQFGFTCGYSSPTQAAITKDLGLTVSEYSVFGSLSNVGAMVGAIASGQIAEYVGRKGSLMIAAIPNIIGWLSISFAKDTSFLYMGRLLEGFGVGIISYTVPVYIAEIAPQTMRGALGSVNQLSVTIGIMLAYLLGLFVPWRILAVLGVLPCTLLIPGLFFIPESPRWLAKMGLTDDFETSLQVLRGFETDITVEVNEIKRSVASSSKRSAVRFVDLKRRRYYFPLMVGIGLLALQQLGGINGVLFYSSTIFESAGVTSSNVATFGVGVVQVVATGIATWLVDKAGRRLLLMISSIGMTISLVIVAVAFYLKEFVSPDSNMYNILSMVSVVGVVAMVISCSLGMGPIPWLIMSEILPVNIKGLAGSIATLLNWFVSWLVTMTANMLLAWSSGGTFTLYALVCGFTVVFVSLWVPETKGKTLEEIQALFR

SEQ ID NO: 91799 - protein, 454 aa, Arabidopsis thaliana
  peptide (1)..(454): Ceres Seq. ID no. 12729565
MLESSQVIRDSSISVLACVLIVALGPIQFGFTCGYSSPTQAAITKDLGLTVSEYSVFGSLSNVGAMVGAIASGQIAEYVGRKGSLMIAAIPNIIGWLSISFAKDTSFLYMGRLLEGFGVGIISYTVPVYIAEIAPQTMRGALGSVNQLSVTIGIMLAYLLGLFVPWRILAVLGVLPCTLLIPGLFFIPESPRWLAKMGLTDDFETSLQVLRGFETDITVEVNEIKRSVASSSKRSAVRFVDLKRRRYYFPLMVGIGLLALQQLGGINGVLFYSSTIFESAGVTSSNVATFGVGVVQVVATGIATWLVDKAGRRLLLMISSIGMTISLVIVAVAFYLKEFVSPDSNMYNILSMVSVVGVVAMVISCSLGMGPIPWLIMSEILPVNIKGLAGSIATLLNWFVSWLVTMTANMLLAWSSGGTFTLYALVCGFTVVFVSLWVPETKGKTLEEIQALFR

SEQ ID NO: 91800 - DNA, 975 bp, Arabidopsis thaliana
  misc_feature (1)..(975): Ceres Seq. ID no. 12729589
  misc_feature (1)..(975): Ortholog of  Ceres SEQ ID NO 14316324 as cited in SEQ ID NO 55612
  misc_feature (1)..(975): Ortholog of  Ceres SEQ ID NO 14316378 as cited in SEQ ID NO 57746
  misc_feature (1)..(975): Ortholog of  Ceres SEQ ID NO 13596097 as cited in SEQ ID NO 68421
  misc_feature (1)..(975): Ortholog of  Ceres SEQ ID NO 13598439 as cited in SEQ ID NO 69016
  misc_feature (1)..(975): Ortholog of  Ceres SEQ ID NO 13599524 as cited in SEQ ID NO 0
actctcacttcagacttctcttcaacgaaactagccagagagatgacgagcaagattctagttatcggagctacaggtctcatcggaaaagtcctcgtagaggaaagcgccaagtctggccacgccactttcgctctggttagagaagcctctctctccgatcccgttaaggcccaactcgttgagagattcaaagatctcggcgttaccatactctacggaagtttaagtgataaagagagcttagtgaaggcgattaaacaagtcgatgtcgtgatatcagctgttggtcggtttcaaactgaaattcttaatcaaaccaatatcatcgatgccatcaaagaatctggaaatgttaagagattcttaccgtcggaatttggtaatgacgtggatcgtacggtagccattgagccaacgctatcagagttcatcactaaagctcagataaggcgtgccattgaagctgcaaagataccttatacgtatgtcgtctcaggttgctttgcaggtctttttgttccttgtttgggtcaatgccacttgcgactcagatctcctcctagagacaaagtttcaatctatgatactggcaatggcaaagccattgtcaacactgaagaagacatcgttgcatatacattgaaagctgttgatgatccgagaacacttaacaagattctctacattcacccgcccaattacattgtatcgcagaacgatatggttggtttgtgggaggaaaagatcggtaagactctcgaaaagacttatgtttcagaggaagaactcctcaaaaccatccaagagagtaagcctccaatggattttttggtgggtctgatccatacaatccttgtgaagagtgactttacctccttcactatagatccttcttttggagttgaggcttccgagctttaccctgaagtcaagtacactagtgttgatgagtttcttaaccggtttatctga

SEQ ID NO: 91801 - protein, 324 aa, Arabidopsis thaliana
  peptide (1)..(324): Ceres Seq. ID no. 12729590
TLTSDFSSTKLAREMTSKILVIGATGLIGKVLVEESAKSGHATFALVREASLSDPVKAQLVERFKDLGVTILYGSLSDKESLVKAIKQVDVVISAVGRFQTEILNQTNIIDAIKESGNVKRFLPSEFGNDVDRTVAIEPTLSEFITKAQIRRAIEAAKIPYTYVVSGCFAGLFVPCLGQCHLRLRSPPRDKVSIYDTGNGKAIVNTEEDIVAYTLKAVDDPRTLNKILYIHPPNYIVSQNDMVGLWEEKIGKTLEKTYVSEEELLKTIQESKPPMDFLVGLIHTILVKSDFTSFTIDPSFGVEASELYPEVKYTSVDEFLNRFI

SEQ ID NO: 91802 - protein, 310 aa, Arabidopsis thaliana
  peptide (1)..(310): Ceres Seq. ID no. 12729591
MTSKILVIGATGLIGKVLVEESAKSGHATFALVREASLSDPVKAQLVERFKDLGVTILYGSLSDKESLVKAIKQVDVVISAVGRFQTEILNQTNIIDAIKESGNVKRFLPSEFGNDVDRTVAIEPTLSEFITKAQIRRAIEAAKIPYTYVVSGCFAGLFVPCLGQCHLRLRSPPRDKVSIYDTGNGKAIVNTEEDIVAYTLKAVDDPRTLNKILYIHPPNYIVSQNDMVGLWEEKIGKTLEKTYVSEEELLKTIQESKPPMDFLVGLIHTILVKSDFTSFTIDPSFGVEASELYPEVKYTSVDEFLNRFI

SEQ ID NO: 91803 - DNA, 4474 bp, Arabidopsis thaliana
  misc_feature (1)..(4474): Ceres Seq. ID no. 12729600
  misc_feature (1)..(4474): Ortholog of  Ceres SEQ ID NO 13660894 as cited in SEQ ID NO 67475
atggaaaagctcttcgtaccatcatttcccaaaacttttttgaattatcagactccagctaaagtagagaattcgcctgaacttcatccaaaatccagaaagaaaaacctatcattcaccaagaagaaagaacccaatatcattcccgacgagcaattcgattacttgtgtagaaacggaagtttgctcgaagctgagaaagctctggactcgttgtttcaacaaggttccaaggtaaaacgaagcacttacctcaaattgttggaatcgtgtattgattctggttctatccatttgggtcgtatccttcatgctcggtttggtttgtttactgaacctgacgtctttgtggagacgaagctgttgagcatgtatgctaaatgtgggtgtattgctgatgcacgtaaggtgtttgattcaatgcgtgagagaaatctgtttacatggtctgctatgattggtgcttactcgagggagaatcggtggagagaggtggcgaagctctttcgtttgatgatgaaagatggtgttttgcctgatgatttcttgtttcctaagatattacagggatgtgctaattgtggagatgttgaggctgggaaggtgattcattcggtggttataaaactcgggatgagttcgtgtcttcgtgttagtaactcgattttagctgtgtatgcgaaatgtggtgaattggatttcgctaccaagttttttagacgtatgagggagagagatgtgattgcttggaactcagtactgttagcttactgccaaaatggtaaacatgaagaagctgtagaattggttaaagagatggaaaaggaaggaatttctcctgggttagttacttggaacatactgattgggggttataaccagctagggaaatgtgatgctgcaatggatttgatgcagaagatggagacttttggtataactgctgatgtgtttacgtggacagctatgatttcgggtttgattcataatgggatgagatatcaggcattagatatgtttaggaagatgtttttagcgggtgtagtgccaaatgcagtcactattatgagtgctgtgtctgcttgttcatgtttgaaagttataaaccagggctcagaagttcattctattgctgtgaagatgggatttatcgatgatgtgcttgtgggcaattctctggttgatatgtattcaaagtgtggaaaactggaagatgcaaggaaagtttttgattcggtaaagaataaggatgtatatacttggaactcaatgataacagggtattgccaagcaggctattgtgggaaggcttatgagttgtttacgaggatgcaagatgcaaatttaagaccaaatattatcacatggaacacaatgatctcaggatatattaagaatggagacgagggtgaggctatggacttatttcagaggatggaaaaagatggaaaagttcagcggaatactgcaacatggaatctaattattgcaggttacatacaaaacggaaaaaaagacgaggccttggaactttttcgaaaaatgcagttttctcgcttcatgccaaattcagttaccattctaagtctcttaccagcgtgtgctaatcttcttggggcaaaaatggtaagagagatacacggttgcgtattgcggagaaatcttgatgctattcatgccgttaaaaacgctttaacagatacttatgctaagtcaggggatatagaatactcaagaaccatcttcctgggtatggaaacgaaagacatcataacttggaactcgctgattggaggttatgttttacatggtagctatggtccagctcttgctctttttaatcaaatgaagacacaggggattacgccgaacaggggaacgctttcgagtattattcttgcgcacggtctaatgggaaatgtagacgaaggaaagaaagttttctacagcattgcgaatgattaccatattattcctgctctggaacattgttctgctatggtatatttgtatggacgagccaacagacttgaagaagctctgcagtttatccaggagatgaatattcaatcagagacacccatctgggaaagcttcttaactggctgcaggattcatggtgatattgacatggcaatccatgccgcagagaacttattctccttggaacctgaaaatacagccactgaaagtattgtttcgcagatctatgcattaggtgcaaaacttgggagatcattagaaggaaataaaccgaggagagataacctgttgaagaaacctctcgggcagagctggattgaagtcagaaatttaattcacacattcacgacaggtgatcagtcgaaattatgtactgatgtgctgtatcccttggtggaaaaaatgagtaggctggataatagaagtgaccaatataatggagaactttggattgaggaagaaggaagggaagaaacttgtggaatccacagtgaaaaatttgccatggcgtttggtctcatttcgtcatccggtgcatctaagacgacgataaggatcttgaaaaatcttaggatgtgccgagactgccatgatactgcaaagacacaagatgcttgcaccactttaagaatggagattgttcctagtgttgaaggcaagcctgcatcacttggcccatggggaggccagagtggtcatgcctgggatgatggaatgtacaccacagtaaagcaaataattatagcccatggttctggaatagactccatacaaattgagtatgacaaaaacggtagctcggtttggtctgaaaaacgtggaggaaagggaggcaagaagtttgataaggtcaaatttgattacccacatgagtatctgatttcagtaaatggaacctacggtagctttgacgtctggggaactatatgtgtccgatcacttactttcgagagtaaccgcagaaaatatggaccgtttggtgttgattcaggtacattctttgcattgccaaaatcaggatcgaagattattgggttccatgggaaggctggttggtatttggatgctattggtgttcacactcaaccaattcctaaagagaataatccttcgtcgaaaatccttttgcactcgcatcaaagtttttctcagggtgataagaaacatgagtactcagtgctacaaggaagtgtagggcaaaactttgatatagttgttaccctcagaaagaaagatccaactttgccttcttttgagtcccgagattccgcaggagccgaggtcaccaaacataagttggtgacagatactgagaagtcacagtcaaaaattgaaggtggcgcgaaaacatatggaccatggggcggaaccggtggaatcatgtttgacgatgggatttataccggtattcgacaaatcaatttgtcacgcaatgtcgggattgtgtcgatgaaggtctgttatgattttagaggacaagctgtgtggggaagcaaacatggtggcgtgggaggattcaaacatgataagattgtatttgactacccttcagaggttttaacacatgtaacgggaacatatgggccgctgatgtatatgggacctaatgtgataaagtcactgactttccgcaccaacagaggaaagcatggaccttatggagaagaacaaggaccgtcttttacacatcaaatggacgagggtaaagttgttggattccttggaagagagggtttatttcttgattccataggtgttcatgttatggaatgcaaaataagttcccttaagccatcatctcctcacaatgcaattgttcctcataataactccggcactgcgcaaatagaaaattccccatgggctaataagctagtccttgcagcaaacggccatggcgaagaggttgatcgtggagtcgtcaaagaaccaacaccgagcgggcctggaccgtggggaggtgacggaggtcaagcttgggacgatggagtattttcagggatcaagcagatatttgtgacaagaggaaatgatgctatcacttcaatacaaattgagtacgataggaatggacaatctgtttggtccattaaacatggtggtgacagcaatggagtcgctacacacagaattaaatttgagtatccagatgaatcgatcacctgcatttcagggtattacggacctctgaacaattcagaccgatataatgttgtcaagtctctgagtttctacacgagccgtgggaggtacgggccatacggtgaagaaaccgggacgtttttcacttcgactacaacacaaggaaaagttttggggttccatggaaggagtagctttcacttggacgccattggagtgcatatgcagcattggcttggcaacaataagtcttattacagcagggctagttgtttcaagctcttctgataatcttctctgcgcaacaagaaaacatctaacctggttccaccgacgcttacagttatcc

SEQ ID NO: 91804 - protein, 1470 aa, Arabidopsis thaliana
  peptide (1)..(1470): Ceres Seq. ID no. 12729601
MEKLFVPSFPKTFLNYQTPAKVENSPELHPKSRKKNLSFTKKKEPNIIPDEQFDYLCRNGSLLEAEKALDSLFQQGSKVKRSTYLKLLESCIDSGSIHLGRILHARFGLFTEPDVFVETKLLSMYAKCGCIADARKVFDSMRERNLFTWSAMIGAYSRENRWREVAKLFRLMMKDGVLPDDFLFPKILQGCANCGDVEAGKVIHSVVIKLGMSSCLRVSNSILAVYAKCGELDFATKFFRRMRERDVIAWNSVLLAYCQNGKHEEAVELVKEMEKEGISPGLVTWNILIGGYNQLGKCDAAMDLMQKMETFGITADVFTWTAMISGLIHNGMRYQALDMFRKMFLAGVVPNAVTIMSAVSACSCLKVINQGSEVHSIAVKMGFIDDVLVGNSLVDMYSKCGKLEDARKVFDSVKNKDVYTWNSMITGYCQAGYCGKAYELFTRMQDANLRPNIITWNTMISGYIKNGDEGEAMDLFQRMEKDGKVQRNTATWNLIIAGYIQNGKKDEALELFRKMQFSRFMPNSVTILSLLPACANLLGAKMVREIHGCVLRRNLDAIHAVKNALTDTYAKSGDIEYSRTIFLGMETKDIITWNSLIGGYVLHGSYGPALALFNQMKTQGITPNRGTLSSIILAHGLMGNVDEGKKVFYSIANDYHIIPALEHCSAMVYLYGRANRLEEALQFIQEMNIQSETPIWESFLTGCRIHGDIDMAIHAAENLFSLEPENTATESIVSQIYALGAKLGRSLEGNKPRRDNLLKKPLGQSWIEVRNLIHTFTTGDQSKLCTDVLYPLVEKMSRLDNRSDQYNGELWIEEEGREETCGIHSEKFAMAFGLISSSGASKTTIRILKNLRMCRDCHDTAKTQDACTTLRMEIVPSVEGKPASLGPWGGQSGHAWDDGMYTTVKQIIIAHGSGIDSIQIEYDKNGSSVWSEKRGGKGGKKFDKVKFDYPHEYLISVNGTYGSFDVWGTICVRSLTFESNRRKYGPFGVDSGTFFALPKSGSKIIGFHGKAGWYLDAIGVHTQPIPKENNPSSKILLHSHQSFSQGDKKHEYSVLQGSVGQNFDIVVTLRKKDPTLPSFESRDSAGAEVTKHKLVTDTEKSQSKIEGGAKTYGPWGGTGGIMFDDGIYTGIRQINLSRNVGIVSMKVCYDFRGQAVWGSKHGGVGGFKHDKIVFDYPSEVLTHVTGTYGPLMYMGPNVIKSLTFRTNRGKHGPYGEEQGPSFTHQMDEGKVVGFLGREGLFLDSIGVHVMECKISSLKPSSPHNAIVPHNNSGTAQIENSPWANKLVLAANGHGEEVDRGVVKEPTPSGPGPWGGDGGQAWDDGVFSGIKQIFVTRGNDAITSIQIEYDRNGQSVWSIKHGGDSNGVATHRIKFEYPDESITCISGYYGPLNNSDRYNVVKSLSFYTSRGRYGPYGEETGTFFTSTTTQGKVLGFHGRSSFHLDAIGVHMQHWLGNNKSYYSRASCFKLF

SEQ ID NO: 91805 - protein, 1347 aa, Arabidopsis thaliana
  peptide (1)..(1347): Ceres Seq. ID no. 12729602
MYAKCGCIADARKVFDSMRERNLFTWSAMIGAYSRENRWREVAKLFRLMMKDGVLPDDFLFPKILQGCANCGDVEAGKVIHSVVIKLGMSSCLRVSNSILAVYAKCGELDFATKFFRRMRERDVIAWNSVLLAYCQNGKHEEAVELVKEMEKEGISPGLVTWNILIGGYNQLGKCDAAMDLMQKMETFGITADVFTWTAMISGLIHNGMRYQALDMFRKMFLAGVVPNAVTIMSAVSACSCLKVINQGSEVHSIAVKMGFIDDVLVGNSLVDMYSKCGKLEDARKVFDSVKNKDVYTWNSMITGYCQAGYCGKAYELFTRMQDANLRPNIITWNTMISGYIKNGDEGEAMDLFQRMEKDGKVQRNTATWNLIIAGYIQNGKKDEALELFRKMQFSRFMPNSVTILSLLPACANLLGAKMVREIHGCVLRRNLDAIHAVKNALTDTYAKSGDIEYSRTIFLGMETKDIITWNSLIGGYVLHGSYGPALALFNQMKTQGITPNRGTLSSIILAHGLMGNVDEGKKVFYSIANDYHIIPALEHCSAMVYLYGRANRLEEALQFIQEMNIQSETPIWESFLTGCRIHGDIDMAIHAAENLFSLEPENTATESIVSQIYALGAKLGRSLEGNKPRRDNLLKKPLGQSWIEVRNLIHTFTTGDQSKLCTDVLYPLVEKMSRLDNRSDQYNGELWIEEEGREETCGIHSEKFAMAFGLISSSGASKTTIRILKNLRMCRDCHDTAKTQDACTTLRMEIVPSVEGKPASLGPWGGQSGHAWDDGMYTTVKQIIIAHGSGIDSIQIEYDKNGSSVWSEKRGGKGGKKFDKVKFDYPHEYLISVNGTYGSFDVWGTICVRSLTFESNRRKYGPFGVDSGTFFALPKSGSKIIGFHGKAGWYLDAIGVHTQPIPKENNPSSKILLHSHQSFSQGDKKHEYSVLQGSVGQNFDIVVTLRKKDPTLPSFESRDSAGAEVTKHKLVTDTEKSQSKIEGGAKTYGPWGGTGGIMFDDGIYTGIRQINLSRNVGIVSMKVCYDFRGQAVWGSKHGGVGGFKHDKIVFDYPSEVLTHVTGTYGPLMYMGPNVIKSLTFRTNRGKHGPYGEEQGPSFTHQMDEGKVVGFLGREGLFLDSIGVHVMECKISSLKPSSPHNAIVPHNNSGTAQIENSPWANKLVLAANGHGEEVDRGVVKEPTPSGPGPWGGDGGQAWDDGVFSGIKQIFVTRGNDAITSIQIEYDRNGQSVWSIKHGGDSNGVATHRIKFEYPDESITCISGYYGPLNNSDRYNVVKSLSFYTSRGRYGPYGEETGTFFTSTTTQGKVLGFHGRSSFHLDAIGVHMQHWLGNNKSYYSRASCFKLF

SEQ ID NO: 91806 - protein, 1330 aa, Arabidopsis thaliana
  peptide (1)..(1330): Ceres Seq. ID no. 12729603
MRERNLFTWSAMIGAYSRENRWREVAKLFRLMMKDGVLPDDFLFPKILQGCANCGDVEAGKVIHSVVIKLGMSSCLRVSNSILAVYAKCGELDFATKFFRRMRERDVIAWNSVLLAYCQNGKHEEAVELVKEMEKEGISPGLVTWNILIGGYNQLGKCDAAMDLMQKMETFGITADVFTWTAMISGLIHNGMRYQALDMFRKMFLAGVVPNAVTIMSAVSACSCLKVINQGSEVHSIAVKMGFIDDVLVGNSLVDMYSKCGKLEDARKVFDSVKNKDVYTWNSMITGYCQAGYCGKAYELFTRMQDANLRPNIITWNTMISGYIKNGDEGEAMDLFQRMEKDGKVQRNTATWNLIIAGYIQNGKKDEALELFRKMQFSRFMPNSVTILSLLPACANLLGAKMVREIHGCVLRRNLDAIHAVKNALTDTYAKSGDIEYSRTIFLGMETKDIITWNSLIGGYVLHGSYGPALALFNQMKTQGITPNRGTLSSIILAHGLMGNVDEGKKVFYSIANDYHIIPALEHCSAMVYLYGRANRLEEALQFIQEMNIQSETPIWESFLTGCRIHGDIDMAIHAAENLFSLEPENTATESIVSQIYALGAKLGRSLEGNKPRRDNLLKKPLGQSWIEVRNLIHTFTTGDQSKLCTDVLYPLVEKMSRLDNRSDQYNGELWIEEEGREETCGIHSEKFAMAFGLISSSGASKTTIRILKNLRMCRDCHDTAKTQDACTTLRMEIVPSVEGKPASLGPWGGQSGHAWDDGMYTTVKQIIIAHGSGIDSIQIEYDKNGSSVWSEKRGGKGGKKFDKVKFDYPHEYLISVNGTYGSFDVWGTICVRSLTFESNRRKYGPFGVDSGTFFALPKSGSKIIGFHGKAGWYLDAIGVHTQPIPKENNPSSKILLHSHQSFSQGDKKHEYSVLQGSVGQNFDIVVTLRKKDPTLPSFESRDSAGAEVTKHKLVTDTEKSQSKIEGGAKTYGPWGGTGGIMFDDGIYTGIRQINLSRNVGIVSMKVCYDFRGQAVWGSKHGGVGGFKHDKIVFDYPSEVLTHVTGTYGPLMYMGPNVIKSLTFRTNRGKHGPYGEEQGPSFTHQMDEGKVVGFLGREGLFLDSIGVHVMECKISSLKPSSPHNAIVPHNNSGTAQIENSPWANKLVLAANGHGEEVDRGVVKEPTPSGPGPWGGDGGQAWDDGVFSGIKQIFVTRGNDAITSIQIEYDRNGQSVWSIKHGGDSNGVATHRIKFEYPDESITCISGYYGPLNNSDRYNVVKSLSFYTSRGRYGPYGEETGTFFTSTTTQGKVLGFHGRSSFHLDAIGVHMQHWLGNNKSYYSRASCFKLF

SEQ ID NO: 91807 - DNA, 1038 bp, Arabidopsis thaliana
  misc_feature (1)..(1038): Ceres Seq. ID no. 12729604
  misc_feature (1)..(1038): Ortholog of  Ceres SEQ ID NO 14315162 as cited in SEQ ID NO 60005
  misc_feature (1)..(1038): Ortholog of  Ceres SEQ ID NO 13659881 as cited in SEQ ID NO 66938
atggctggattgttctatctaggagggagagatcacaacaaacaagatcatcatcaagaaaaggatcataatgaagacaagagcaacaattatctctatctatacaaagacgagatctacaacaacaacaagggttttgagattttccctcctcaatattttcaacaacaacagcaacaaaatcatgcggctgctccaacaaatctctactcttttggtatggtcccgagtggtggtaacataaacaataaccggagtactaatcggagtttgtacttcaacgtcgtctccgatcatgagccggtgagatcctcaacgggagggtttacggtaacgagacaagggaacatgaattgccaagactgtgggaatcaagccaagaaagattgtcctcatatgagatgtcgtacttgttgtaagagccgagggtttgattgccaaacacacgtgaagagcacgtgggtctcggctgctaaacgccgtgagagacaggctcagttagctgttttgccagctaagcgtataagagacgctaactcaaggggtggtggggatgacgatgatgatgacaaagaggacgagaaaaatgacagttgtggtggtggctcggctcttgcttgcacccgtgtggttaatgctagttcttcagggttagagactagtcacttaccaccggagataagttccccggctgttttccggtgtatgagagtcagctcaatcgacgatgaagacgaagagtatgcttatcaaacggctgttagcattggaggacacgtgttcaaaggcattctctacgaccaaggtccatcgtcagatcaccaccgttacagctcaagcctcaatggcgaaacctctcatcaacaccatcttaacctcatggactcaactccttcagccgcaactacaaacgccgtgaccgccgttaacactaacaacggatctattgacccttcttccctttacactgcggtggcaactccgttcaacgcctttgtcgccggtggtacgcctttctttgcatcttctaggtgttga

SEQ ID NO: 91808 - protein, 345 aa, Arabidopsis thaliana
  peptide (1)..(345): Ceres Seq. ID no. 12729605
MAGLFYLGGRDHNKQDHHQEKDHNEDKSNNYLYLYKDEIYNNNKGFEIFPPQYFQQQQQQNHAAAPTNLYSFGMVPSGGNINNNRSTNRSLYFNVVSDHEPVRSSTGGFTVTRQGNMNCQDCGNQAKKDCPHMRCRTCCKSRGFDCQTHVKSTWVSAAKRRERQAQLAVLPAKRIRDANSRGGGDDDDDDKEDEKNDSCGGGSALACTRVVNASSSGLETSHLPPEISSPAVFRCMRVSSIDDEDEEYAYQTAVSIGGHVFKGILYDQGPSSDHHRYSSSLNGETSHQHHLNLMDSTPSAATTNAVTAVNTNNGSIDPSSLYTAVATPFNAFVAGGTPFFASSRC

SEQ ID NO: 91809 - protein, 272 aa, Arabidopsis thaliana
  peptide (1)..(272): Ceres Seq. ID no. 12729606
MVPSGGNINNNRSTNRSLYFNVVSDHEPVRSSTGGFTVTRQGNMNCQDCGNQAKKDCPHMRCRTCCKSRGFDCQTHVKSTWVSAAKRRERQAQLAVLPAKRIRDANSRGGGDDDDDDKEDEKNDSCGGGSALACTRVVNASSSGLETSHLPPEISSPAVFRCMRVSSIDDEDEEYAYQTAVSIGGHVFKGILYDQGPSSDHHRYSSSLNGETSHQHHLNLMDSTPSAATTNAVTAVNTNNGSIDPSSLYTAVATPFNAFVAGGTPFFASSRC

SEQ ID NO: 91810 - protein, 229 aa, Arabidopsis thaliana
  peptide (1)..(229): Ceres Seq. ID no. 12729607
MNCQDCGNQAKKDCPHMRCRTCCKSRGFDCQTHVKSTWVSAAKRRERQAQLAVLPAKRIRDANSRGGGDDDDDDKEDEKNDSCGGGSALACTRVVNASSSGLETSHLPPEISSPAVFRCMRVSSIDDEDEEYAYQTAVSIGGHVFKGILYDQGPSSDHHRYSSSLNGETSHQHHLNLMDSTPSAATTNAVTAVNTNNGSIDPSSLYTAVATPFNAFVAGGTPFFASSRC

SEQ ID NO: 91811 - DNA, 414 bp, Arabidopsis thaliana
  misc_feature (1)..(414): Ceres Seq. ID no. 12729622
  misc_feature (1)..(414): Ortholog of  Ceres SEQ ID NO 13581889 as cited in SEQ ID NO 50900
atggcacgtacgaagcaaactgcgaggaaatctactggtggaaaaggtccaaggaaggaactcgctaccaaggcggcgaggaaaactagacgaccgtaccgtggtggagtcaagagggctcaccgtttccgtcctggaaccgtcgctcttcgtgagatccgcaaataccagaagagtaccgacttgttgatccgcaaattgcctttccaacgacttgttcgtgaaatcgcccaagattttaaggtggatttaaggttccaaagccatgcggtgctcgcacttcaagaggcagccgaagcatacttggtggggttgttcgaagacacgaatttgtgtgcgattcacgccaaaagggttacgatcatgtccaaggacattcagttggccagacgcattcgtggggaacgtgcttga

SEQ ID NO: 91812 - protein, 137 aa, Arabidopsis thaliana
  peptide (1)..(137): Ceres Seq. ID no. 12729623
MARTKQTARKSTGGKGPRKELATKAARKTRRPYRGGVKRAHRFRPGTVALREIRKYQKSTDLLIRKLPFQRLVREIAQDFKVDLRFQSHAVLALQEAAEAYLVGLFEDTNLCAIHAKRVTIMSKDIQLARRIRGERA

SEQ ID NO: 91813 - DNA, 1843 bp, Arabidopsis thaliana
  misc_feature (1)..(1843): Ceres Seq. ID no. 12729624
  misc_feature (1)..(1843): Ortholog of  Ceres SEQ ID NO 15174947 as cited in SEQ ID NO 236
acataccacaaaatatctcataaagatcaaataaacactaaacctgaaagcaaaaaaatggcagcacgagcaacattcatattctatgctctcttcctaaccacactccaattccttctaacacaccatgtgtcatccgccgcccgaggattatggaaatacatcgcccccaacgtcggaatctccgcgatgcatatgcaacttctccataacgaccgtgtcgtaatgtacgaccgaaccaacttcggaccatcaaacatctctctacctaacggtaactgccgtgacaacccccaagacgccgtctccaaaatcgactgcacagctcactcgatcgaatacgacgtcgcaacgaacaccatccgacctttaacggtacaatccaacacatggtgctcatccggttcggttcgaccggacggtgttcttgtccaaaccggtggagaccgagacggagaacttaagacaagaaccttttctccttgtaataacaatcaatgtgattgggtcgaaatgaacaacggtttaaaaaagagaagatggtacgcttccaaccatattcttcccgacggtaaacaaatcgtcatgggaggtcaaggacaattcaactacgagttctttcccaaaacgacaaaccctaacgtagtcgcgttaccgtttttggccgagactcatgatcaaggacaagagaataatctttatccttttgtgtttatgaataccgatgggaatctatttatgttcgctaataacagagcgatattactcgactatgttaagaacacggtggtgaaaacttttccggcgattcccggtggtgatccgagaaactatccgagcactggctcagccgtgttattaccgttaaagaatcttgaagcggataatgtcgagacggaggttctagtgtgtggaggtgcaccaaaaggatcatacaacctcgctagaaagaaaactttcgtgaaagcgcttgacacgtgtgcaaggatcaagattaacgatgccaaacctgaatgggcggttgagaagatgccacatgctagagttatgggagatatgattcctttgccaaacggagatgttttgctaatcaacggtggatcttttggtactgctgcatgggagcttggtcgtacaccggttttagcaccagacctataccatcccgagaatccggttggctctaggtttgaatcgctaaggccgactacaatcccgagaatgtatcactccgcggctattcttctacgtgacggtagggttttagtcggaggaagcaatcctcatgcgttttataactacaccggagtgcttttcccgacggagttgagcttagaagctttctctccggtttacctacaacgggagttttcgaatcttcgtcccaagattatatctcctgaacctcagtcgatgattaaatatgggacgaatttgaagttgaaattttcggtcaccggagaagttacgactccggcgaaagtgactatggtatttccgacgttcacgacgcatagcttcgcgatgaatcagagggttttggttttggacaatgttaagtttacgaggaaaggcaaatcgccgatgtatgaggttcaagtgaggactccgaggtcggcgaatattgcatggcctggttattatatgatttttgtggtgaatcaagacataccaagcgaaggtgtttgggtaaagttagaatgattcattgacttttatttaatatctttatttttgtgtgtaattgtgttatattactgatatcaattgtatatgaatgtaataagaatatgtcttctcaacttgatgataataaattaattaactactctttttctatgtc

SEQ ID NO: 91814 - protein, 567 aa, Arabidopsis thaliana
  peptide (1)..(567): Ceres Seq. ID no. 12729625
TYHKISHKDQINTKPESKKMAARATFIFYALFLTTLQFLLTHHVSSAARGLWKYIAPNVGISAMHMQLLHNDRVVMYDRTNFGPSNISLPNGNCRDNPQDAVSKIDCTAHSIEYDVATNTIRPLTVQSNTWCSSGSVRPDGVLVQTGGDRDGELKTRTFSPCNNNQCDWVEMNNGLKKRRWYASNHILPDGKQIVMGGQGQFNYEFFPKTTNPNVVALPFLAETHDQGQENNLYPFVFMNTDGNLFMFANNRAILLDYVKNTVVKTFPAIPGGDPRNYPSTGSAVLLPLKNLEADNVETEVLVCGGAPKGSYNLARKKTFVKALDTCARIKINDAKPEWAVEKMPHARVMGDMIPLPNGDVLLINGGSFGTAAWELGRTPVLAPDLYHPENPVGSRFESLRPTTIPRMYHSAAILLRDGRVLVGGSNPHAFYNYTGVLFPTELSLEAFSPVYLQREFSNLRPKIISPEPQSMIKYGTNLKLKFSVTGEVTTPAKVTMVFPTFTTHSFAMNQRVLVLDNVKFTRKGKSPMYEVQVRTPRSANIAWPGYYMIFVVNQDIPSEGVWVKLE

SEQ ID NO: 91815 - protein, 548 aa, Arabidopsis thaliana
  peptide (1)..(548): Ceres Seq. ID no. 12729626
MAARATFIFYALFLTTLQFLLTHHVSSAARGLWKYIAPNVGISAMHMQLLHNDRVVMYDRTNFGPSNISLPNGNCRDNPQDAVSKIDCTAHSIEYDVATNTIRPLTVQSNTWCSSGSVRPDGVLVQTGGDRDGELKTRTFSPCNNNQCDWVEMNNGLKKRRWYASNHILPDGKQIVMGGQGQFNYEFFPKTTNPNVVALPFLAETHDQGQENNLYPFVFMNTDGNLFMFANNRAILLDYVKNTVVKTFPAIPGGDPRNYPSTGSAVLLPLKNLEADNVETEVLVCGGAPKGSYNLARKKTFVKALDTCARIKINDAKPEWAVEKMPHARVMGDMIPLPNGDVLLINGGSFGTAAWELGRTPVLAPDLYHPENPVGSRFESLRPTTIPRMYHSAAILLRDGRVLVGGSNPHAFYNYTGVLFPTELSLEAFSPVYLQREFSNLRPKIISPEPQSMIKYGTNLKLKFSVTGEVTTPAKVTMVFPTFTTHSFAMNQRVLVLDNVKFTRKGKSPMYEVQVRTPRSANIAWPGYYMIFVVNQDIPSEGVWVKLE

SEQ ID NO: 91816 - protein, 504 aa, Arabidopsis thaliana
  peptide (1)..(504): Ceres Seq. ID no. 12729627
MHMQLLHNDRVVMYDRTNFGPSNISLPNGNCRDNPQDAVSKIDCTAHSIEYDVATNTIRPLTVQSNTWCSSGSVRPDGVLVQTGGDRDGELKTRTFSPCNNNQCDWVEMNNGLKKRRWYASNHILPDGKQIVMGGQGQFNYEFFPKTTNPNVVALPFLAETHDQGQENNLYPFVFMNTDGNLFMFANNRAILLDYVKNTVVKTFPAIPGGDPRNYPSTGSAVLLPLKNLEADNVETEVLVCGGAPKGSYNLARKKTFVKALDTCARIKINDAKPEWAVEKMPHARVMGDMIPLPNGDVLLINGGSFGTAAWELGRTPVLAPDLYHPENPVGSRFESLRPTTIPRMYHSAAILLRDGRVLVGGSNPHAFYNYTGVLFPTELSLEAFSPVYLQREFSNLRPKIISPEPQSMIKYGTNLKLKFSVTGEVTTPAKVTMVFPTFTTHSFAMNQRVLVLDNVKFTRKGKSPMYEVQVRTPRSANIAWPGYYMIFVVNQDIPSEGVWVKLE

SEQ ID NO: 91817 - DNA, 1366 bp, Arabidopsis thaliana
  misc_feature (1)..(1366): Ceres Seq. ID no. 12729653
  misc_feature (1)..(1366): Ortholog of  Ceres SEQ ID NO 13597715 as cited in SEQ ID NO 65577
  misc_feature (1)..(1366): Ortholog of  Ceres SEQ ID NO 15178668 as cited in SEQ ID NO 68301
agggcagttcactggtgcatgggtttgtggaagagaagttgtgcggctgttatatatatcagagaagcgccttcaacaaccgcctcttagggcgtataaaatcagaaacagaaacgagacaagaattaattctctcgtccaaatttcttctgggcagaaaccaacatttatccttatccgattcttctagggtttcggaagatctaaccagaaccttcgcaacaagatggataagtatcagagagttgagaagccgaaggcggatacgccgattgctgagaatgagattcgtatcaccagtatgggtagggcacggaactacatcacctatgcgatggctcttcttcaggaaaacaaatcgaatgaagttatcttcaaggctatgggaagagctatcaacaagagtgtgaccatagttgagctgattaagagaaggattcctggtcttcatcagatcacatctattggatcaacggacattacagatacctgggaacctacagaggaaggccttcaaacaattgagaccacgaggcatgtgtcgatgataaccataacactttccaaggagcagttgaacacatcctcagttgggtaccagtgtccgattcctattgagatggtgaagccattggctgagattgactacgaagggcaagacggatctcctagaggcagaggaggaagaagaggtagaggaggaagaggaaggggaaggggaagaggtggtagaggaaatggacctgcgaatgttgagtatgatgatggaggaaggggaagaggtggcagaggaaacggatatgtgaacaatgagtatgatgatggaggaaggggaagaggcggcagaggaagtggatatgtgaacaatgagtataatgatggaggtatggagcaggaccggtcatatggcagaggacgcgggcgtgggagaggaggtggacgtggtggtcgaggaagaggaggttacaatggccccccaccaccttactatgaagctcaacaagatggaggagactatggatacaacaatgttgctcctccagcagaccatggatatgatggtcctccgcctcagggacgtggacgtggccgtggaaggggaggtcgtggaagaggaggaggccgtggtggattcaacagatcaaatggagcacctatccaggctgctgcatgagcgaccagggtcattgaatgaagttggatctttcttacattctcatgtttttgtctctgttcttcaaagcaacttgttgccgtagaataatctttcgttcatgtcgctttaggttatatatatcctcatttattttatcatggatcttggattttcaagtttttattccttcaagagttttctagttttgtc

SEQ ID NO: 91818 - protein, 315 aa, Arabidopsis thaliana
  peptide (1)..(315): Ceres Seq. ID no. 12729654
MDKYQRVEKPKADTPIAENEIRITSMGRARNYITYAMALLQENKSNEVIFKAMGRAINKSVTIVELIKRRIPGLHQITSIGSTDITDTWEPTEEGLQTIETTRHVSMITITLSKEQLNTSSVGYQCPIPIEMVKPLAEIDYEGQDGSPRGRGGRRGRGGRGRGRGRGGRGNGPANVEYDDGGRGRGGRGNGYVNNEYDDGGRGRGGRGSGYVNNEYNDGGMEQDRSYGRGRGRGRGGGRGGRGRGGYNGPPPPYYEAQQDGGDYGYNNVAPPADHGYDGPPPQGRGRGRGRGGRGRGGGRGGFNRSNGAPIQAAA

SEQ ID NO: 91819 - protein, 290 aa, Arabidopsis thaliana
  peptide (1)..(290): Ceres Seq. ID no. 12729655
MGRARNYITYAMALLQENKSNEVIFKAMGRAINKSVTIVELIKRRIPGLHQITSIGSTDITDTWEPTEEGLQTIETTRHVSMITITLSKEQLNTSSVGYQCPIPIEMVKPLAEIDYEGQDGSPRGRGGRRGRGGRGRGRGRGGRGNGPANVEYDDGGRGRGGRGNGYVNNEYDDGGRGRGGRGSGYVNNEYNDGGMEQDRSYGRGRGRGRGGGRGGRGRGGYNGPPPPYYEAQQDGGDYGYNNVAPPADHGYDGPPPQGRGRGRGRGGRGRGGGRGGFNRSNGAPIQAAA

SEQ ID NO: 91820 - protein, 279 aa, Arabidopsis thaliana
  peptide (1)..(279): Ceres Seq. ID no. 12729656
MALLQENKSNEVIFKAMGRAINKSVTIVELIKRRIPGLHQITSIGSTDITDTWEPTEEGLQTIETTRHVSMITITLSKEQLNTSSVGYQCPIPIEMVKPLAEIDYEGQDGSPRGRGGRRGRGGRGRGRGRGGRGNGPANVEYDDGGRGRGGRGNGYVNNEYDDGGRGRGGRGSGYVNNEYNDGGMEQDRSYGRGRGRGRGGGRGGRGRGGYNGPPPPYYEAQQDGGDYGYNNVAPPADHGYDGPPPQGRGRGRGRGGRGRGGGRGGFNRSNGAPIQAAA

SEQ ID NO: 91821 - DNA, 2283 bp, Arabidopsis thaliana
  misc_feature (1)..(2283): Ceres Seq. ID no. 12729657
  misc_feature (1)..(2283): Ortholog of  Ceres SEQ ID NO 12586556 as cited in SEQ ID NO 64667
  misc_feature (1)..(2283): Ortholog of  Ceres SEQ ID NO 13660894 as cited in SEQ ID NO 67475
atgacaaaacaagttcttccactgatagagaaaattcctcaatcgatcgttggattcttagaatcttcatcatatcattggtcttcttcgttgtcgaagacaacacaagctcatgctcgtatactcaaatccggagctcaaaacgatggctatatctccgctaaactcattgcttcatactcgaactataattgtttcaacgatgctgatctcgtcttgcaatcgattccggatcctactatttactctttctcttctcttatatacgctttaacaaaggctaagctttttacgcaatcgattggtgtgttttctcggatgttctctcatgggttgattccagatagtcatgttcttccgaatttgttcaaggtttgtgctgaattatcggcttttaaagtgggtaaacagatacattgtgtgtcgtgtgtttccgggttggatatggatgcgtttgttcaggggtctatgtttcatatgtacatgaggtgtggtaggatgggtgatgcacgcaaagtgttcgatagaatgtctgacaaagatgttgtcacttgcagtgctttgctttgtgcctatgcgcgaaagggttgcttagaagaggtggttcgtatcctctctgagatggaaagttcaggtattgaggcgaatattgtgtcttggaatggtattcttagtgggtttaatcggagtgggtatcacaaggaagcagtggtgatgttccagaagattcaccatttggggttttgtcctgatcaagttacagtttcaagtgttcttccttcagttggagattcagagatgctgaatatggggaggctgattcatggatatgtgattaaacagggtttgcttaaggataaatgtgtcattagtgcaatgattgatatgtatgggaaatctgggcatgtttatggaatcataagtcttttcaatcaatttgagatgatggaggcaggggtttgcaatgcctacattacagggctatcgcgaaatggtcttgttgacaaggcacttgaaatgtttgagctattcaaggagcaaacgatggagcttaatgttgtgtcatggacttcaatcatagctgggtgtgctcagaacgggaaagatatcgaagctttggaattgttcagagaaatgcaggttgcaggggtgaagccaaaccatgtaacaatcccttcaatgcttccagcttgcggaaatatagcagctttgggtcatgggagatccactcatggatttgcagtaagggtccaccttttggataatgttcatgtagggagtgctctgattgacatgtatgccaaatgtggaagaatcaacttgtctcagattgtctttaatatgatgcctacaaaaaacttagtctgctggaactctttaatgaatggattttcgatgcatgggaaggccaaggaagtcatgagcatatttgaatctcttatgagaaccaggttgaaacccgatttcatcagctttaccagtttattatcagcatgtggccaagtaggtttaacagatgaagggtggaaatatttcaaaatgatgtcagaggaatatgggataaaaccgaggttggaacactattcttgcatggtaaaccttcttggacgcgcaggcaagttgcaagaagcatatgatctgataaaagagatgccttttgagccagactcctgcgtctggggagctttgttaaattcttgcaggcttcaaaacaatgtagatttagctgaaatcgcagcagaaaagcttttccatttagaacccgaaaacccagggacttacgttctcttgtccaatatatatgccgctaaaggcatgtggacagaagtagacagtattagaaacaagatggagagtctgggactgaagaagaacccgggatgcagctggattcaagtgaagaacagagtgtacacgcttctggctggtgacaagtcgcatccgcagatagatcaaataacagagaagatggatgagattagcaaagagatgaggaaatcaggtcaccgcccaaatttagattttgctctgcatgatgtggaggagcaagagcaagagcagatgttatggggacacagtgagaaactagcagtagttttcggtcttcttaacacaccagacggcacacctcttcaggtcataaagaaccttaggatatgcggcgattgccatgcagtcattaaatttatatcaagttacgcaggtagagagattttcattagagatacaaataggtttcatcattttaaagacggaatttgttcctgtggagatttctggtga

SEQ ID NO: 91822 - protein, 760 aa, Arabidopsis thaliana
  peptide (1)..(760): Ceres Seq. ID no. 12729658
MTKQVLPLIEKIPQSIVGFLESSSYHWSSSLSKTTQAHARILKSGAQNDGYISAKLIASYSNYNCFNDADLVLQSIPDPTIYSFSSLIYALTKAKLFTQSIGVFSRMFSHGLIPDSHVLPNLFKVCAELSAFKVGKQIHCVSCVSGLDMDAFVQGSMFHMYMRCGRMGDARKVFDRMSDKDVVTCSALLCAYARKGCLEEVVRILSEMESSGIEANIVSWNGILSGFNRSGYHKEAVVMFQKIHHLGFCPDQVTVSSVLPSVGDSEMLNMGRLIHGYVIKQGLLKDKCVISAMIDMYGKSGHVYGIISLFNQFEMMEAGVCNAYITGLSRNGLVDKALEMFELFKEQTMELNVVSWTSIIAGCAQNGKDIEALELFREMQVAGVKPNHVTIPSMLPACGNIAALGHGRSTHGFAVRVHLLDNVHVGSALIDMYAKCGRINLSQIVFNMMPTKNLVCWNSLMNGFSMHGKAKEVMSIFESLMRTRLKPDFISFTSLLSACGQVGLTDEGWKYFKMMSEEYGIKPRLEHYSCMVNLLGRAGKLQEAYDLIKEMPFEPDSCVWGALLNSCRLQNNVDLAEIAAEKLFHLEPENPGTYVLLSNIYAAKGMWTEVDSIRNKMESLGLKKNPGCSWIQVKNRVYTLLAGDKSHPQIDQITEKMDEISKEMRKSGHRPNLDFALHDVEEQEQEQMLWGHSEKLAVVFGLLNTPDGTPLQVIKNLRICGDCHAVIKFISSYAGREIFIRDTNRFHHFKDGICSCGDFW

SEQ ID NO: 91823 - protein, 654 aa, Arabidopsis thaliana
  peptide (1)..(654): Ceres Seq. ID no. 12729659
MFSHGLIPDSHVLPNLFKVCAELSAFKVGKQIHCVSCVSGLDMDAFVQGSMFHMYMRCGRMGDARKVFDRMSDKDVVTCSALLCAYARKGCLEEVVRILSEMESSGIEANIVSWNGILSGFNRSGYHKEAVVMFQKIHHLGFCPDQVTVSSVLPSVGDSEMLNMGRLIHGYVIKQGLLKDKCVISAMIDMYGKSGHVYGIISLFNQFEMMEAGVCNAYITGLSRNGLVDKALEMFELFKEQTMELNVVSWTSIIAGCAQNGKDIEALELFREMQVAGVKPNHVTIPSMLPACGNIAALGHGRSTHGFAVRVHLLDNVHVGSALIDMYAKCGRINLSQIVFNMMPTKNLVCWNSLMNGFSMHGKAKEVMSIFESLMRTRLKPDFISFTSLLSACGQVGLTDEGWKYFKMMSEEYGIKPRLEHYSCMVNLLGRAGKLQEAYDLIKEMPFEPDSCVWGALLNSCRLQNNVDLAEIAAEKLFHLEPENPGTYVLLSNIYAAKGMWTEVDSIRNKMESLGLKKNPGCSWIQVKNRVYTLLAGDKSHPQIDQITEKMDEISKEMRKSGHRPNLDFALHDVEEQEQEQMLWGHSEKLAVVFGLLNTPDGTPLQVIKNLRICGDCHAVIKFISSYAGREIFIRDTNRFHHFKDGICSCGDFW

SEQ ID NO: 91824 - protein, 612 aa, Arabidopsis thaliana
  peptide (1)..(612): Ceres Seq. ID no. 12729660
MDAFVQGSMFHMYMRCGRMGDARKVFDRMSDKDVVTCSALLCAYARKGCLEEVVRILSEMESSGIEANIVSWNGILSGFNRSGYHKEAVVMFQKIHHLGFCPDQVTVSSVLPSVGDSEMLNMGRLIHGYVIKQGLLKDKCVISAMIDMYGKSGHVYGIISLFNQFEMMEAGVCNAYITGLSRNGLVDKALEMFELFKEQTMELNVVSWTSIIAGCAQNGKDIEALELFREMQVAGVKPNHVTIPSMLPACGNIAALGHGRSTHGFAVRVHLLDNVHVGSALIDMYAKCGRINLSQIVFNMMPTKNLVCWNSLMNGFSMHGKAKEVMSIFESLMRTRLKPDFISFTSLLSACGQVGLTDEGWKYFKMMSEEYGIKPRLEHYSCMVNLLGRAGKLQEAYDLIKEMPFEPDSCVWGALLNSCRLQNNVDLAEIAAEKLFHLEPENPGTYVLLSNIYAAKGMWTEVDSIRNKMESLGLKKNPGCSWIQVKNRVYTLLAGDKSHPQIDQITEKMDEISKEMRKSGHRPNLDFALHDVEEQEQEQMLWGHSEKLAVVFGLLNTPDGTPLQVIKNLRICGDCHAVIKFISSYAGREIFIRDTNRFHHFKDGICSCGDFW

SEQ ID NO: 91825 - DNA, 1828 bp, Arabidopsis thaliana
  misc_feature (1)..(1828): Ceres Seq. ID no. 12729665
  misc_feature (1)..(1828): Ortholog of  Ceres SEQ ID NO 13594216 as cited in SEQ ID NO 57054
  misc_feature (1)..(1828): Ortholog of  Ceres SEQ ID NO 13657677 as cited in SEQ ID NO 66119
atcgccactctgctccgttctacatttagaagagactgaccaaaatctcccattaatggcgttactccgatcaaaactccatctttctcgaaccctttccttcatctctcctcttctacccaaaaccttctccacctcggcaacttctctactcagtgaccatgaaaacgacgaatccgccgccaccataaccgccgccgtctctgtcccaatctcacctctgttaactccggaagacacacaaaccgtagaaaagttccattcaatcatcaaagaccactatcgcaaaaaccctacaagccccaacgacgccatcttaaaccctagcttaactctccatgctctctccctcgatttctcccaaattgaaacttcccaagtctctccctccgtcgtccgatgcgtgatagagaagtgcggcagtgtccgccacggaatccctcttcaccaatctctagctttcttcaattgggcaacttcacgagacgattacgaccacaaatcacctcatccttacaacgaaatgatcgatctttcaggaaaggttagacaattcgacttagcttggcatttgattgatctaatgaaatccagaaacgtagagatttcgattgaaaccttcacgattttgattagacgttatgttagagctggattagcttcagaggctgtacattgctttaatcgtatggaagattacggttgcgtacctgataaaatcgcgttttccatagttattagtaacctttctaggaagaggagagctagtgaagctcagtcgtttttcgatagtttgaaagatagattcgagcctgatgttatagtttacaccaatttggttcgtggttggtgtagagctggtgaaatctctgaggcagagaaagtgttcaaggagatgaagttggctgggattgaacctaatgtgtatacttacagtattgtgatcgatgcgttgtgtagatgcgggcaaatcagccgtgcgcatgatgtgtttgcggatatgttagattcaggttgtgcgccgaatgcgattacttttaacaacttgatgagggttcatgtgaaagcaggaagaacagagaaggttttgcaggtttataaccagatgaagaagctaggatgtgagcctgatactattacttataacttccttattgaggctcattgcagagacgagaatctggaaaacgcggtcaaggttttgaacacgatgatcaagaagaagtgtgaagtgaatgcttcgactttcaatacgatatttaggtacattgagaagaagagagacgtgaatggcgctcataggatgtattcgaagatgatggaagcgaaatgtgagccgaatacggtgacttataatatactgatgaggatgtttgtcgggtcaaaatctactgatatggttctgaagatgaagaaagagatggatgataaagaagttgagccgaatgtgaatacttataggcttttggttacgatgttttgtgggatgggacattggaataatgcttataagttgtttaaagaaatggttgaagagaagtgtttgacaccgagcttgtctttatatgagatggttcttgctcagttaagaagagctgggcaattgaagaagcatgaagagctggtggagaagatgattcagaagggactcgttgctcggccattgtaggaacccttccaagtatcaaagaagaagcttttttttctcaggagtttttaaggatattttcaagcaattttcttgtaactttgttttggtacaacatttggttatcaagaagtattattgtaccatgtactctttttttaactctcattttctactatg

SEQ ID NO: 91826 - protein, 555 aa, Arabidopsis thaliana
  peptide (1)..(555): Ceres Seq. ID no. 12729666
SPLCSVLHLEETDQNLPLMALLRSKLHLSRTLSFISPLLPKTFSTSATSLLSDHENDESAATITAAVSVPISPLLTPEDTQTVEKFHSIIKDHYRKNPTSPNDAILNPSLTLHALSLDFSQIETSQVSPSVVRCVIEKCGSVRHGIPLHQSLAFFNWATSRDDYDHKSPHPYNEMIDLSGKVRQFDLAWHLIDLMKSRNVEISIETFTILIRRYVRAGLASEAVHCFNRMEDYGCVPDKIAFSIVISNLSRKRRASEAQSFFDSLKDRFEPDVIVYTNLVRGWCRAGEISEAEKVFKEMKLAGIEPNVYTYSIVIDALCRCGQISRAHDVFADMLDSGCAPNAITFNNLMRVHVKAGRTEKVLQVYNQMKKLGCEPDTITYNFLIEAHCRDENLENAVKVLNTMIKKKCEVNASTFNTIFRYIEKKRDVNGAHRMYSKMMEAKCEPNTVTYNILMRMFVGSKSTDMVLKMKKEMDDKEVEPNVNTYRLLVTMFCGMGHWNNAYKLFKEMVEEKCLTPSLSLYEMVLAQLRRAGQLKKHEELVEKMIQKGLVARPL

SEQ ID NO: 91827 - protein, 537 aa, Arabidopsis thaliana
  peptide (1)..(537): Ceres Seq. ID no. 12729667
MALLRSKLHLSRTLSFISPLLPKTFSTSATSLLSDHENDESAATITAAVSVPISPLLTPEDTQTVEKFHSIIKDHYRKNPTSPNDAILNPSLTLHALSLDFSQIETSQVSPSVVRCVIEKCGSVRHGIPLHQSLAFFNWATSRDDYDHKSPHPYNEMIDLSGKVRQFDLAWHLIDLMKSRNVEISIETFTILIRRYVRAGLASEAVHCFNRMEDYGCVPDKIAFSIVISNLSRKRRASEAQSFFDSLKDRFEPDVIVYTNLVRGWCRAGEISEAEKVFKEMKLAGIEPNVYTYSIVIDALCRCGQISRAHDVFADMLDSGCAPNAITFNNLMRVHVKAGRTEKVLQVYNQMKKLGCEPDTITYNFLIEAHCRDENLENAVKVLNTMIKKKCEVNASTFNTIFRYIEKKRDVNGAHRMYSKMMEAKCEPNTVTYNILMRMFVGSKSTDMVLKMKKEMDDKEVEPNVNTYRLLVTMFCGMGHWNNAYKLFKEMVEEKCLTPSLSLYEMVLAQLRRAGQLKKHEELVEKMIQKGLVARPL

SEQ ID NO: 91828 - protein, 381 aa, Arabidopsis thaliana
  peptide (1)..(381): Ceres Seq. ID no. 12729668
MIDLSGKVRQFDLAWHLIDLMKSRNVEISIETFTILIRRYVRAGLASEAVHCFNRMEDYGCVPDKIAFSIVISNLSRKRRASEAQSFFDSLKDRFEPDVIVYTNLVRGWCRAGEISEAEKVFKEMKLAGIEPNVYTYSIVIDALCRCGQISRAHDVFADMLDSGCAPNAITFNNLMRVHVKAGRTEKVLQVYNQMKKLGCEPDTITYNFLIEAHCRDENLENAVKVLNTMIKKKCEVNASTFNTIFRYIEKKRDVNGAHRMYSKMMEAKCEPNTVTYNILMRMFVGSKSTDMVLKMKKEMDDKEVEPNVNTYRLLVTMFCGMGHWNNAYKLFKEMVEEKCLTPSLSLYEMVLAQLRRAGQLKKHEELVEKMIQKGLVARPL

SEQ ID NO: 91829 - DNA, 1837 bp, Arabidopsis thaliana
  misc_feature (1)..(1837): Ceres Seq. ID no. 12729691
  misc_feature (1)..(1837): Ortholog of  Ceres SEQ ID NO 13648571 as cited in SEQ ID NO 197
agaaacaaaatccatggcttcagtgaattctcgaagtggtttctgcaactcaaactcaacattctacagcaaacgaacaccaatcccactcccgccaaatccatcactcgacgtcactactttcatttcttcacaagctcatcgtggccgtatcgccttcatcgacgcttccacaggtcaaaacctcaccttcaccgagctatggcgtgccgtggaatccgtcgccgattgtctctccgagatagggattcgcaaaggccacgtcgtcctcctcctctccccaaactcaattttattccccgtcgtttgtctctccgtcatgtcactaggcgcaatcatcaccaccacgaatccactcaacacttcaaacgagatcgctaaacagattaaggattcaaatccagtcctcgccttcaccacatcgcagcttctcccgaaaatctccgccgccgcaaagaagctcccgatcgtgcttatggacgaggaacgagttgactcagtgggtgatgtgagaagattggtggagatgatgaagaaggaaccgagtgggaaccgagtcaaggagcgagttgaccaggatgatacggcgactttgctttactcttcaggaaccacgggaatgagcaaaggagtgatctcgtctcaccgtaacttaatcgcgatggttcaaaccatcgtgaatcgatttggatctgatgatggagagcaacgattcatctgcactgttcctatgtttcacatctacggtttagctgcgttcgctactggattactcgcttacggatctacgatcatcgttctctctaaattcgagatgcacgagatgatgtcagcgattggcaagtatcaagccacgtctttgcctctcgtgcctccgattcttgtggcgatggttaacggtgcagatcagattaaggctaagtatgatttgagctctatgcatactgttttatgcggcggagctccgttgagtaaggaagtgactgaaggattcgcggagaagtatccgacggttaagattttacaaggttatgggttgactgagtcaacgggtataggagcttctacggatactgttgaggaaagtcggagatacggtaccgctgggaaattgtcggcaagtatggaagggaggattgttgatccggttactggtcagattcttggaccgaaacaaaccggtgagctttggctcaagggtccttccataatgaaaggttatttcagcaatgaggaagctacgagttcgactcttgattctgaaggatggttaagaactggagatctttgctatatcgatgaagatggattcatattcgtggttgatcggttaaaggaactgatcaagtacaagggttatcaggttgctccagctgagctagaggctttgttgcttactcatcctgaaatcactgatgctgcagtgatcccgtttccggacaaagaagtggggcaatttccaatggcatacgtcgtaaggaaaactgggagcagcttatcagagaagacaataatggagtttgtagcgaaacaagtagcaccatacaagaggatacgaaaagttgctttcgtatcttcaataccaaagaacccttcaggcaagattctacgcaaagatctcatcaagatagcaacttccaactccaagctttgaaattattatgagagtcaatctccatgtattatttattgtttgtgctgtagacctgtagaaaaatctgatactatgcatccatgttgaaatatgaccatgtggtcccaaaacacagaagattacacacataaatggccactatatggtttatgtaatagagtatatgttcaaaacatgtttctg

SEQ ID NO: 91830 - protein, 550 aa, Arabidopsis thaliana
  peptide (1)..(550): Ceres Seq. ID no. 12729692
ETKSMASVNSRSGFCNSNSTFYSKRTPIPLPPNPSLDVTTFISSQAHRGRIAFIDASTGQNLTFTELWRAVESVADCLSEIGIRKGHVVLLLSPNSILFPVVCLSVMSLGAIITTTNPLNTSNEIAKQIKDSNPVLAFTTSQLLPKISAAAKKLPIVLMDEERVDSVGDVRRLVEMMKKEPSGNRVKERVDQDDTATLLYSSGTTGMSKGVISSHRNLIAMVQTIVNRFGSDDGEQRFICTVPMFHIYGLAAFATGLLAYGSTIIVLSKFEMHEMMSAIGKYQATSLPLVPPILVAMVNGADQIKAKYDLSSMHTVLCGGAPLSKEVTEGFAEKYPTVKILQGYGLTESTGIGASTDTVEESRRYGTAGKLSASMEGRIVDPVTGQILGPKQTGELWLKGPSIMKGYFSNEEATSSTLDSEGWLRTGDLCYIDEDGFIFVVDRLKELIKYKGYQVAPAELEALLLTHPEITDAAVIPFPDKEVGQFPMAYVVRKTGSSLSEKTIMEFVAKQVAPYKRIRKVAFVSSIPKNPSGKILRKDLIKIATSNSKL

SEQ ID NO: 91831 - protein, 546 aa, Arabidopsis thaliana
  peptide (1)..(546): Ceres Seq. ID no. 12729693
MASVNSRSGFCNSNSTFYSKRTPIPLPPNPSLDVTTFISSQAHRGRIAFIDASTGQNLTFTELWRAVESVADCLSEIGIRKGHVVLLLSPNSILFPVVCLSVMSLGAIITTTNPLNTSNEIAKQIKDSNPVLAFTTSQLLPKISAAAKKLPIVLMDEERVDSVGDVRRLVEMMKKEPSGNRVKERVDQDDTATLLYSSGTTGMSKGVISSHRNLIAMVQTIVNRFGSDDGEQRFICTVPMFHIYGLAAFATGLLAYGSTIIVLSKFEMHEMMSAIGKYQATSLPLVPPILVAMVNGADQIKAKYDLSSMHTVLCGGAPLSKEVTEGFAEKYPTVKILQGYGLTESTGIGASTDTVEESRRYGTAGKLSASMEGRIVDPVTGQILGPKQTGELWLKGPSIMKGYFSNEEATSSTLDSEGWLRTGDLCYIDEDGFIFVVDRLKELIKYKGYQVAPAELEALLLTHPEITDAAVIPFPDKEVGQFPMAYVVRKTGSSLSEKTIMEFVAKQVAPYKRIRKVAFVSSIPKNPSGKILRKDLIKIATSNSKL

SEQ ID NO: 91832 - protein, 444 aa, Arabidopsis thaliana
  peptide (1)..(444): Ceres Seq. ID no. 12729694
MSLGAIITTTNPLNTSNEIAKQIKDSNPVLAFTTSQLLPKISAAAKKLPIVLMDEERVDSVGDVRRLVEMMKKEPSGNRVKERVDQDDTATLLYSSGTTGMSKGVISSHRNLIAMVQTIVNRFGSDDGEQRFICTVPMFHIYGLAAFATGLLAYGSTIIVLSKFEMHEMMSAIGKYQATSLPLVPPILVAMVNGADQIKAKYDLSSMHTVLCGGAPLSKEVTEGFAEKYPTVKILQGYGLTESTGIGASTDTVEESRRYGTAGKLSASMEGRIVDPVTGQILGPKQTGELWLKGPSIMKGYFSNEEATSSTLDSEGWLRTGDLCYIDEDGFIFVVDRLKELIKYKGYQVAPAELEALLLTHPEITDAAVIPFPDKEVGQFPMAYVVRKTGSSLSEKTIMEFVAKQVAPYKRIRKVAFVSSIPKNPSGKILRKDLIKIATSNSKL

SEQ ID NO: 91833 - DNA, 3068 bp, Arabidopsis thaliana
  misc_feature (1)..(3068): Ceres Seq. ID no. 12729703
  misc_feature (1)..(3068): Ortholog of  Ceres SEQ ID NO 15170741 as cited in SEQ ID NO 58530
gccatgtcccgatgcataaatgagataacgatccacaaaattttcattttaaaaatttcatctttttttgttttcatcttccgtgaagaagtagtaccacataacccccatcagacatctttaaagctttcttcttttccttgtttcttttggttttgagatttgggtttcttttcatatctgttccttctatctcagacaacaaattgcaacagaggaaatttaaaaacccacttgaggaaggaatctttgagaatctctctctgacttatgttgcttcattgattttggagatatatccatggaagatagtttccttcaatctgagaacgtggttatggacgctgacttcatggatggattgttactagatggttgttggttagagactacagatggatctgagtttcttaacatagctccttcaacttcttctgttagcccttttgatccaacttccttcatgtggtctccaactcaagatacatcagctctttgcacatcaggagttgtatctcagatgtatggtcaggattgtgtagaaagatctagtcttgatgagtttcaatggaacaaacgatggtggattggaccaggaggtggtggttcttcggttactgagaggttggttcaagcagttgaacacattaaagattacacaacagcgagaggctcacttattcagttatgggttccggttaatagaggcggtaagcgagttttgaccacaaaggaacaaccttttagccatgatccgttgtgtcaaagacttgcaaactatagagagatctctgtgaattatcacttctctgctgagcaagatgattccaaggctttagctggtttgcctgggagggttttcttggggaagcttcctgaatggactcctgatgttaggtttttcaagagcgaggagtatccgagagtacaccatgctcaggactgcgatgtccgtggaacgctggcgattccggtgtttgaacaaggtagtaagatttgcttgggtgttattgaggttgtaatgaccactgagatggttaaactaagacctgagcttgaaagcatttgcagagcacttcaggcagttgatcttaggagcaccgagcttccgattccaccttctctaaagggatgtgacttatcctacaaagctgccttacctgaaatccgaaacctcttgagatgtgcttgtgagactcataaactacctttagctcagacatgggtttcttgtcaacagcaaaacaaaagcgggtgccgtcacaacgatgagaactacatccattgcgtatcaaccattgatgatgcttgctacgttggtgatccaacagttcgtgagttccatgaagcttgctctgagcatcacctcttgaaaggccaaggagttgcaggtcaagccttcttgaccaatggaccttgcttttcatctgatgtatctaactacaagaaatcagagtaccctctctctcaccatgctaatatgtacggtttacatggcgcggttgcaattcgcctgcggtgcatccacacgggctctgctgatttcgtcttagagttctttttgcctaaagactgcgatgatctggaggaacagaggaaaatgttgaatgctctttcaactattatggctcatgtgcctagaagcttaaggactgttacagacaaagaactagaagaagagagtgaagtgatagagagggaagagatagtaacgccaaagatagaaaacgcatctgaactccacggaaattccccatggaatgcctctcttgaagaaatccagcggagtaataatactagtaatcctcagaatcttggactggtatttgatggaggagacaaaccaaatgatggttttggcttaaaaagaggttttgactacaccatggattctaatgtcaatgagagcagcactttctctagtggtggtttcagtatgatggccgagaaaaagcgtacaaaagcagataaaaccatcactttggatgttcttcgacagtatttcgctgggagcttgaaagatgcagccaagaatatcggtgtttgtccaacgaccttgaagagaatatgcagacagcatggtatacaaagatggccttcaagaaagataaaaaaagtgggacattctctgcagaagatccaacgagtgattgattcggttcaaggtgtttctggtcctcttcccataggctcattctatgcaaatttccccaatttagtctcacagtcacaagaaccatcacaacaagccaagaccacgcctcctcctccgccgccagtgcagcttgcaaagtcccctgtatcctcgtatagtcacagttcaaactctagccaatgttgctccagtgaaacccaactaaacagcggtgcaacaaccgatcctccttcaactgatgtaggaggtgcattgaagaagacgagcagcgaaatcgagcttcaaagctcgagtcttgacgagacaattttgactctctccagtttagaaaacatccctcaaggcaccaacttgttatcatctcaagatgatgactttctgaggattaaagttagctacggagaagagaagatcagattacggatgcggaattcgcgcaggttaagagatctattgtgggagattgggaagcggtttagcatagaggatatgagcaggtatgatctaaagtacttagacgaagacaatgaatgggttttgttgacttgcgacgaagatgtagaagagtgtgtagatgtctgcagaactacaccgagtcataccattaagcttttgcttcaggcttcttctcatcatttccctgaacgttcttcagctactgaatacagtttatggcactgaccttaaatcagagaaagaagaaagaaaaagaagcgttttaggacatgacacaaaagatagtaatacctttgtgttctgttataattgttcataattttatctttggtttttttgaaagattactaggagaggtgctttgggttttgtttttaaaaacgcaccagagacaagaagagaagaacatgtaaagatcctatcttcctgagaaattgaagttgttgtttttttcttc

SEQ ID NO: 91834 - protein, 844 aa, Arabidopsis thaliana
  peptide (1)..(844): Ceres Seq. ID no. 12729704
MEDSFLQSENVVMDADFMDGLLLDGCWLETTDGSEFLNIAPSTSSVSPFDPTSFMWSPTQDTSALCTSGVVSQMYGQDCVERSSLDEFQWNKRWWIGPGGGGSSVTERLVQAVEHIKDYTTARGSLIQLWVPVNRGGKRVLTTKEQPFSHDPLCQRLANYREISVNYHFSAEQDDSKALAGLPGRVFLGKLPEWTPDVRFFKSEEYPRVHHAQDCDVRGTLAIPVFEQGSKICLGVIEVVMTTEMVKLRPELESICRALQAVDLRSTELPIPPSLKGCDLSYKAALPEIRNLLRCACETHKLPLAQTWVSCQQQNKSGCRHNDENYIHCVSTIDDACYVGDPTVREFHEACSEHHLLKGQGVAGQAFLTNGPCFSSDVSNYKKSEYPLSHHANMYGLHGAVAIRLRCIHTGSADFVLEFFLPKDCDDLEEQRKMLNALSTIMAHVPRSLRTVTDKELEEESEVIEREEIVTPKIENASELHGNSPWNASLEEIQRSNNTSNPQNLGLVFDGGDKPNDGFGLKRGFDYTMDSNVNESSTFSSGGFSMMAEKKRTKADKTITLDVLRQYFAGSLKDAAKNIGVCPTTLKRICRQHGIQRWPSRKIKKVGHSLQKIQRVIDSVQGVSGPLPIGSFYANFPNLVSQSQEPSQQAKTTPPPPPPVQLAKSPVSSYSHSSNSSQCCSSETQLNSGATTDPPSTDVGGALKKTSSEIELQSSSLDETILTLSSLENIPQGTNLLSSQDDDFLRIKVSYGEEKIRLRMRNSRRLRDLLWEIGKRFSIEDMSRYDLKYLDEDNEWVLLTCDEDVEECVDVCRTTPSHTIKLLLQASSHHFPERSSATEYSLWH

SEQ ID NO: 91835 - protein, 832 aa, Arabidopsis thaliana
  peptide (1)..(832): Ceres Seq. ID no. 12729705
MDADFMDGLLLDGCWLETTDGSEFLNIAPSTSSVSPFDPTSFMWSPTQDTSALCTSGVVSQMYGQDCVERSSLDEFQWNKRWWIGPGGGGSSVTERLVQAVEHIKDYTTARGSLIQLWVPVNRGGKRVLTTKEQPFSHDPLCQRLANYREISVNYHFSAEQDDSKALAGLPGRVFLGKLPEWTPDVRFFKSEEYPRVHHAQDCDVRGTLAIPVFEQGSKICLGVIEVVMTTEMVKLRPELESICRALQAVDLRSTELPIPPSLKGCDLSYKAALPEIRNLLRCACETHKLPLAQTWVSCQQQNKSGCRHNDENYIHCVSTIDDACYVGDPTVREFHEACSEHHLLKGQGVAGQAFLTNGPCFSSDVSNYKKSEYPLSHHANMYGLHGAVAIRLRCIHTGSADFVLEFFLPKDCDDLEEQRKMLNALSTIMAHVPRSLRTVTDKELEEESEVIEREEIVTPKIENASELHGNSPWNASLEEIQRSNNTSNPQNLGLVFDGGDKPNDGFGLKRGFDYTMDSNVNESSTFSSGGFSMMAEKKRTKADKTITLDVLRQYFAGSLKDAAKNIGVCPTTLKRICRQHGIQRWPSRKIKKVGHSLQKIQRVIDSVQGVSGPLPIGSFYANFPNLVSQSQEPSQQAKTTPPPPPPVQLAKSPVSSYSHSSNSSQCCSSETQLNSGATTDPPSTDVGGALKKTSSEIELQSSSLDETILTLSSLENIPQGTNLLSSQDDDFLRIKVSYGEEKIRLRMRNSRRLRDLLWEIGKRFSIEDMSRYDLKYLDEDNEWVLLTCDEDVEECVDVCRTTPSHTIKLLLQASSHHFPERSSATEYSLWH

SEQ ID NO: 91836 - protein, 827 aa, Arabidopsis thaliana
  peptide (1)..(827): Ceres Seq. ID no. 12729706
MDGLLLDGCWLETTDGSEFLNIAPSTSSVSPFDPTSFMWSPTQDTSALCTSGVVSQMYGQDCVERSSLDEFQWNKRWWIGPGGGGSSVTERLVQAVEHIKDYTTARGSLIQLWVPVNRGGKRVLTTKEQPFSHDPLCQRLANYREISVNYHFSAEQDDSKALAGLPGRVFLGKLPEWTPDVRFFKSEEYPRVHHAQDCDVRGTLAIPVFEQGSKICLGVIEVVMTTEMVKLRPELESICRALQAVDLRSTELPIPPSLKGCDLSYKAALPEIRNLLRCACETHKLPLAQTWVSCQQQNKSGCRHNDENYIHCVSTIDDACYVGDPTVREFHEACSEHHLLKGQGVAGQAFLTNGPCFSSDVSNYKKSEYPLSHHANMYGLHGAVAIRLRCIHTGSADFVLEFFLPKDCDDLEEQRKMLNALSTIMAHVPRSLRTVTDKELEEESEVIEREEIVTPKIENASELHGNSPWNASLEEIQRSNNTSNPQNLGLVFDGGDKPNDGFGLKRGFDYTMDSNVNESSTFSSGGFSMMAEKKRTKADKTITLDVLRQYFAGSLKDAAKNIGVCPTTLKRICRQHGIQRWPSRKIKKVGHSLQKIQRVIDSVQGVSGPLPIGSFYANFPNLVSQSQEPSQQAKTTPPPPPPVQLAKSPVSSYSHSSNSSQCCSSETQLNSGATTDPPSTDVGGALKKTSSEIELQSSSLDETILTLSSLENIPQGTNLLSSQDDDFLRIKVSYGEEKIRLRMRNSRRLRDLLWEIGKRFSIEDMSRYDLKYLDEDNEWVLLTCDEDVEECVDVCRTTPSHTIKLLLQASSHHFPERSSATEYSLWH

SEQ ID NO: 91837 - DNA, 636 bp, Arabidopsis thaliana
  misc_feature (1)..(636): Ceres Seq. ID no. 12729711
  misc_feature (1)..(636): Ortholog of  Ceres SEQ ID NO 15179562 as cited in SEQ ID NO 0
  misc_feature (1)..(636): Ortholog of  Ceres SEQ ID NO 15179680 as cited in SEQ ID NO 0
atggtaaaaaaaaaaaaggaaaaggagaaaagcaaagaaatagaggagatggatagagagatccaaaacggtgcgtatagtgggagagtgatgactgaggagcagatggagattctccgtaagcagatcgccgtttacgccgttatttgtgaccaactcgtcctcctccacaactccctctcttcttaccatccactctcatcaggagtgaggccaatggttggcggatactttgatccgatgggggcatcgtcaagttctcataggatatcgactaggcatcggtggactccgacttcaacacagcttcagatacttgagagcatttacgacgaaggaagtggaacaccgaatcgacggaggattagagagatcgcgacggagctgtctgaacatggacagatcacggagacaaatgtctacaattggtttcaaaaccggcgagctcggtccaaacgaaagcagcctcaaacgacgacagctaatggtcaggctgacgatgtggcggtgacaacggaggaaaggaggagttgtggagattcagggggattagagtcttatgagcatatactcttcccaagtcctgacttagggattgagcatttgttgagtatagggaaatttatggagacttaa

SEQ ID NO: 91838 - protein, 211 aa, Arabidopsis thaliana
  peptide (1)..(211): Ceres Seq. ID no. 12729712
MVKKKKEKEKSKEIEEMDREIQNGAYSGRVMTEEQMEILRKQIAVYAVICDQLVLLHNSLSSYHPLSSGVRPMVGGYFDPMGASSSSHRISTRHRWTPTSTQLQILESIYDEGSGTPNRRRIREIATELSEHGQITETNVYNWFQNRRARSKRKQPQTTTANGQADDVAVTTEERRSCGDSGGLESYEHILFPSPDLGIEHLLSIGKFMET

SEQ ID NO: 91839 - protein, 195 aa, Arabidopsis thaliana
  peptide (1)..(195): Ceres Seq. ID no. 12729713
MDREIQNGAYSGRVMTEEQMEILRKQIAVYAVICDQLVLLHNSLSSYHPLSSGVRPMVGGYFDPMGASSSSHRISTRHRWTPTSTQLQILESIYDEGSGTPNRRRIREIATELSEHGQITETNVYNWFQNRRARSKRKQPQTTTANGQADDVAVTTEERRSCGDSGGLESYEHILFPSPDLGIEHLLSIGKFMET

SEQ ID NO: 91840 - protein, 181 aa, Arabidopsis thaliana
  peptide (1)..(181): Ceres Seq. ID no. 12729714
MTEEQMEILRKQIAVYAVICDQLVLLHNSLSSYHPLSSGVRPMVGGYFDPMGASSSSHRISTRHRWTPTSTQLQILESIYDEGSGTPNRRRIREIATELSEHGQITETNVYNWFQNRRARSKRKQPQTTTANGQADDVAVTTEERRSCGDSGGLESYEHILFPSPDLGIEHLLSIGKFMET

SEQ ID NO: 91841 - DNA, 594 bp, Arabidopsis thaliana
  misc_feature (1)..(594): Ceres Seq. ID no. 12729715
  misc_feature (1)..(594): Ortholog of  Ceres SEQ ID NO 15179562 as cited in SEQ ID NO 0
  misc_feature (1)..(594): Ortholog of  Ceres SEQ ID NO 15179680 as cited in SEQ ID NO 0
atggagcaagagagcctaaacggtaggtatggtagtagagtaatgacggatgaacaaatggagactcttcgtaagcaaatcgccatttacgccgttctttgcgaccagctcgtcttcctccacaactctctctcttctgtccctcttctttcatcaggaatgaatccaatgagaggtgagtattttgatccaatggtggcatcgtcaagcgctcatggaatgtcgactcggcctcgatggactcctacgacaacgcaacttcagattcttgagaacatttacaaggaaggcagtggaacaccaaatccgcggaggattaaagagatcacgatggaactgtctgaacatggacaaatcatggagaaaaatgtataccattggtttcaaaaccgacgagctcggtccaaacgaaagcaacctccgacaacgacaattacctcgagtcaggcggatgatgcggccgtgacaacaactgaggagagagggaggtgtggagatgattctggagggtttgagtcttatgagcatatactgttcccgagtcctgatttagggattgagcatttgttgaatagggacaagtttatagactga

SEQ ID NO: 91842 - protein, 197 aa, Arabidopsis thaliana
  peptide (1)..(197): Ceres Seq. ID no. 12729716
MEQESLNGRYGSRVMTDEQMETLRKQIAIYAVLCDQLVFLHNSLSSVPLLSSGMNPMRGEYFDPMVASSSAHGMSTRPRWTPTTTQLQILENIYKEGSGTPNPRRIKEITMELSEHGQIMEKNVYHWFQNRRARSKRKQPPTTTITSSQADDAAVTTTEERGRCGDDSGGFESYEHILFPSPDLGIEHLLNRDKFID

SEQ ID NO: 91843 - protein, 183 aa, Arabidopsis thaliana
  peptide (1)..(183): Ceres Seq. ID no. 12729717
MTDEQMETLRKQIAIYAVLCDQLVFLHNSLSSVPLLSSGMNPMRGEYFDPMVASSSAHGMSTRPRWTPTTTQLQILENIYKEGSGTPNPRRIKEITMELSEHGQIMEKNVYHWFQNRRARSKRKQPPTTTITSSQADDAAVTTTEERGRCGDDSGGFESYEHILFPSPDLGIEHLLNRDKFID

SEQ ID NO: 91844 - protein, 178 aa, Arabidopsis thaliana
  peptide (1)..(178): Ceres Seq. ID no. 12729718
METLRKQIAIYAVLCDQLVFLHNSLSSVPLLSSGMNPMRGEYFDPMVASSSAHGMSTRPRWTPTTTQLQILENIYKEGSGTPNPRRIKEITMELSEHGQIMEKNVYHWFQNRRARSKRKQPPTTTITSSQADDAAVTTTEERGRCGDDSGGFESYEHILFPSPDLGIEHLLNRDKFID

SEQ ID NO: 91845 - DNA, 862 bp, Arabidopsis thaliana
  misc_feature (1)..(862): Ceres Seq. ID no. 12729727
  misc_feature (1)..(862): Ortholog of  Ceres SEQ ID NO 14306406 as cited in SEQ ID NO 1412
  misc_feature (1)..(862): Ortholog of  Ceres SEQ ID NO 14309488 as cited in SEQ ID NO 52755
  misc_feature (1)..(862): Ortholog of  Ceres SEQ ID NO 15178824 as cited in SEQ ID NO 0
ctctcaaactcaaatcaaccttcttccatttttcaaattacaaacatacacaacaacaacaaaacctcttactcactccaatggctcgccttctctttcgtcttctcgtagaatccaacactccgtctccggcgattgataactccaccgccgcgttgaattctgatctcgtcgtcatcctcgctgctctcctctgcgccttgatttgcgttctcggcttaatcgccgtttctcgatgtgtctggctccgtcgtctcgcagccggaaacagaacagtctccggatctcaaactcaatctcctcaacctccggtggcagcggcgaacaaaggcctgaagaagaaagtccttcaatctctcccgaagcttacgttctcgccagagtcacctgagtcggagaaattcgcagagtgcgcgatctgtctagctgaattctctgccggcgacgagctccgagttttaccgcagtgtggtcacgggttccacgtggcttgcattgacacgtggctaggatctcactcgtcttgcccttcttgccgtcagatcttggttgttgccaggtgtcacaagtgtggaggtttacccggtagctctagctccggacttgaatccgaacccgaaatcgagatccgaatcaagcaaggcgaagatgaccccaactccttcttgccataatcattttagtttcccatttatttattagaaaactctataatttaatgcagatcattttagtgggatagtgtttagtctcttgatgtacatggtttattgtaatttgtaaatgttgtatgaattggaaaatttaacgatttgtgtatttgaaccttttattactttgtgtttatcaaaaacaattgctg

SEQ ID NO: 91846 - protein, 223 aa, Arabidopsis thaliana
  peptide (1)..(223): Ceres Seq. ID no. 12729728
LKLKSTFFHFSNYKHTQQQQNLLLTPMARLLFRLLVESNTPSPAIDNSTAALNSDLVVILAALLCALICVLGLIAVSRCVWLRRLAAGNRTVSGSQTQSPQPPVAAANKGLKKKVLQSLPKLTFSPESPESEKFAECAICLAEFSAGDELRVLPQCGHGFHVACIDTWLGSHSSCPSCRQILVVARCHKCGGLPGSSSSGLESEPEIEIRIKQGEDDPNSFLP

SEQ ID NO: 91847 - protein, 197 aa, Arabidopsis thaliana
  peptide (1)..(197): Ceres Seq. ID no. 12729729
MARLLFRLLVESNTPSPAIDNSTAALNSDLVVILAALLCALICVLGLIAVSRCVWLRRLAAGNRTVSGSQTQSPQPPVAAANKGLKKKVLQSLPKLTFSPESPESEKFAECAICLAEFSAGDELRVLPQCGHGFHVACIDTWLGSHSSCPSCRQILVVARCHKCGGLPGSSSSGLESEPEIEIRIKQGEDDPNSFLP

SEQ ID NO: 91848 - DNA, 1323 bp, Arabidopsis thaliana
  misc_feature (1)..(1323): Ceres Seq. ID no. 12729734
  misc_feature (1)..(1323): Ortholog of  Ceres SEQ ID NO 13584646 as cited in SEQ ID NO 60715
tttttatatcttttgcttcgtctttaatttagttctgttcttggtctgtttctatattttgtcggcttgcgtaaccgatcacaccttaatgctttagctattgtttcctcaaaatcatgagttttgacttctcgatctgagttttctttttctctctttacgctcttcttcacctagctaccaatatatgaacgagcaggatcaagaatcgagaaattgatttgagctggcgaataagcagtggtgggatagggaattagtagatgcggcggcgatggaaggcggttacgagcaaggcggtggagcttctagatacttccataacctctttagaccggagattcaccaccaacagcttcaaccgcagggcgggatcaatcttatcgaccagcatcatcatcagcaccagcaacatcaacaacaacaacaaccgtcggatgattcaagagaatctgaccattcaaacaaagatcatcatcaacagggtcgacccgattcagacccgaatacatcaagctcagcaccgggaaaacgtccacgtggacgtccaccaggatctaagaacaaagccaagccaccgatcatagtaactcgtgatagccccaacgcgcttagatctcacgttcttgaagtatctcctggagctgacatagttgagagtgtttccacgtacgctaggaggagagggagaggcgtctccgttttaggaggaaacggcaccgtatctaacgtcactctccgtcagccagtcactcctggaaatggcggtggtgtgtccggaggaggaggagttgtgactttacatggaaggtttgagattctttcgctaacggggactgttttgccacctcctgcaccgcctggtgccggtggtttgtctatatttttagccggagggcaaggtcaggtggtcggaggaagcgttgtggctccccttattgcatcagctccggttatactaatggcggcttcgttctcaaatgcggttttcgagagactaccgattgaggaggaggaagaagaaggtggtggtggcggaggaggaggaggaggagggccaccgcagatgcaacaagctccatcagcatctccgccgtctggagtgaccggtcagggacagttaggaggtaatgtgggtggttatgggttttctggtgatcctcatttgcttggatggggagctggaacaccttcaagaccacctttttaattgaattttaatgtccggaaatttatgtgtttttatcatcttgtggagtcgtctttcctttgggatatttggtgtttaatgtttagttgatatgcatattttggtttctcgtg

SEQ ID NO: 91849 - protein, 311 aa, Arabidopsis thaliana
  peptide (1)..(311): Ceres Seq. ID no. 12729735
MEGGYEQGGGASRYFHNLFRPEIHHQQLQPQGGINLIDQHHHQHQQHQQQQQPSDDSRESDHSNKDHHQQGRPDSDPNTSSSAPGKRPRGRPPGSKNKAKPPIIVTRDSPNALRSHVLEVSPGADIVESVSTYARRRGRGVSVLGGNGTVSNVTLRQPVTPGNGGGVSGGGGVVTLHGRFEILSLTGTVLPPPAPPGAGGLSIFLAGGQGQVVGGSVVAPLIASAPVILMAASFSNAVFERLPIEEEEEEGGGGGGGGGGGPPQMQQAPSASPPSGVTGQGQLGGNVGGYGFSGDPHLLGWGAGTPSRPPF

SEQ ID NO: 91850 - DNA, 2202 bp, Arabidopsis thaliana
  misc_feature (1)..(2202): Ceres Seq. ID no. 12729755
  misc_feature (1)..(2202): Ortholog of  Ceres SEQ ID NO 13584744 as cited in SEQ ID NO 69137
atgaaggtgcatagtctgttcttgatggctattttcttctacctagcatatacgcagctggtcaaggcgcaacctcgcgatgattgccaaactagatgtggtgacgtcccaattgattacccttttggtatttctacaggttgttactaccccggagatgatagcttcaatattacctgtgaggaagataaaccaaatgtcttaagcaacattgaagtgctaaactttaatcatagcggccagctacgcggtctgattcctcgatccactgtttgctacgaccagcaaacaaataatgatttcgagtccctctggtttcggttggataatttatctttctcccccaataacaagtttactttagtaggctgtaacgcttgggcacttctaagcacttttggaatacaaaactactcaactggatgtatgtcattatgcgatactcccccgccgccaaatagtaaatgtaatggtgttggttgctgcagaacagaggtatctatccccttggatagccatagaattgaaactcaaccatctcgcttcgaaaacatgacttccgtggagcactttaatccttgcagctacgcttttttcgttgaagatggtatgtttaacttcagttctttagaagatcttaaggatctgcgaaatgtcacgaggttccctgtgttactagattggtctattggaaaccagacatgtgagcaagttgtaggtagaaacatatgtggtgggaacagcacatgttttgattctactcgtggaaagggttataactgcaagtgtttacaaggttttgatgggaatccatacctttcggacggttgccaagacatcaatgagtgtactacccgtatacataactgttcggataccagcacatgtgaaaacacacttggaagcttccattgtcagtgcccatctggttctgatttaaataccactactatgagctgcattgacacacctaaagaagagcctaagtacttaggatggactactgttcttcttggaaccaccatcggattcttaatcatcttgcttaccattagctatatacaacaaaaaatgaggcaccgaaaaaacaccgagctgcgacaacaattcttcgagcaaaatggtggtggcatgttgatacagcgactctcaggagcagggccatcaaatgtggatgtcaaaatctttactgaagaaggcatgaaggaagcaactgatggttataatgagagcagaatcctaggccagggaggacaaggaacagtctacaaagggatattgcaagataactccattgttgctataaagaaagctcgacttggagaccgtagccaagtagagcagttcatcaacgaagtgctagtgctttcacaaataaaccacaggaacgtggtcaaactcttgggctgttgtctagagactgaagttcccttgttggtctatgagttcatttccagtggcactctttttgatcacttgcacggttctatgtttgattcttcgcttacatgggaacaccgtctgaggatagccatagaagttgctggaactcttgcatatcttcactcctatgcttctattccaatcatccaccgagatgtcaagactgctaacattctcctcgatgaaaacttaactgcaaaagtagctgattttggtgcatcaaggctgataccgatggaccaagagcagctcacaactatggttcaaggaactcttggctatttagaccctgaatactacaatacagggcttctgaacgaaaagagcgatgtttatagctttggggtagtcctcatggaactgctctcaggtgaaaaggcattatgctttgaacggccacaaagctcaaaacatctagtgagttactttgtttctgccatgaaagaaaataggttgcatgagattattgacggtcaagttatgaacgagtataatcagagggagatccaggaatctgcaagaattgctgttgagtgtacaagaattatgggagaggaaaggccaagtatgaaagaagtagctgcagagttagaggccttgagagtcaaaacaaccaaacatcagtggtcagatcaatatcccaaggaggttgagcatttgcttggtgttcaaatcttatcgacgcaaggtgataccagtagcattggctatgacagcatccagaatgtaacaaggttggacattgaaactggccgctga

SEQ ID NO: 91851 - protein, 733 aa, Arabidopsis thaliana
  peptide (1)..(733): Ceres Seq. ID no. 12729756
MKVHSLFLMAIFFYLAYTQLVKAQPRDDCQTRCGDVPIDYPFGISTGCYYPGDDSFNITCEEDKPNVLSNIEVLNFNHSGQLRGLIPRSTVCYDQQTNNDFESLWFRLDNLSFSPNNKFTLVGCNAWALLSTFGIQNYSTGCMSLCDTPPPPNSKCNGVGCCRTEVSIPLDSHRIETQPSRFENMTSVEHFNPCSYAFFVEDGMFNFSSLEDLKDLRNVTRFPVLLDWSIGNQTCEQVVGRNICGGNSTCFDSTRGKGYNCKCLQGFDGNPYLSDGCQDINECTTRIHNCSDTSTCENTLGSFHCQCPSGSDLNTTTMSCIDTPKEEPKYLGWTTVLLGTTIGFLIILLTISYIQQKMRHRKNTELRQQFFEQNGGGMLIQRLSGAGPSNVDVKIFTEEGMKEATDGYNESRILGQGGQGTVYKGILQDNSIVAIKKARLGDRSQVEQFINEVLVLSQINHRNVVKLLGCCLETEVPLLVYEFISSGTLFDHLHGSMFDSSLTWEHRLRIAIEVAGTLAYLHSYASIPIIHRDVKTANILLDENLTAKVADFGASRLIPMDQEQLTTMVQGTLGYLDPEYYNTGLLNEKSDVYSFGVVLMELLSGEKALCFERPQSSKHLVSYFVSAMKENRLHEIIDGQVMNEYNQREIQESARIAVECTRIMGEERPSMKEVAAELEALRVKTTKHQWSDQYPKEVEHLLGVQILSTQGDTSSIGYDSIQNVTRLDIETGR

SEQ ID NO: 91852 - protein, 725 aa, Arabidopsis thaliana
  peptide (1)..(725): Ceres Seq. ID no. 12729757
MAIFFYLAYTQLVKAQPRDDCQTRCGDVPIDYPFGISTGCYYPGDDSFNITCEEDKPNVLSNIEVLNFNHSGQLRGLIPRSTVCYDQQTNNDFESLWFRLDNLSFSPNNKFTLVGCNAWALLSTFGIQNYSTGCMSLCDTPPPPNSKCNGVGCCRTEVSIPLDSHRIETQPSRFENMTSVEHFNPCSYAFFVEDGMFNFSSLEDLKDLRNVTRFPVLLDWSIGNQTCEQVVGRNICGGNSTCFDSTRGKGYNCKCLQGFDGNPYLSDGCQDINECTTRIHNCSDTSTCENTLGSFHCQCPSGSDLNTTTMSCIDTPKEEPKYLGWTTVLLGTTIGFLIILLTISYIQQKMRHRKNTELRQQFFEQNGGGMLIQRLSGAGPSNVDVKIFTEEGMKEATDGYNESRILGQGGQGTVYKGILQDNSIVAIKKARLGDRSQVEQFINEVLVLSQINHRNVVKLLGCCLETEVPLLVYEFISSGTLFDHLHGSMFDSSLTWEHRLRIAIEVAGTLAYLHSYASIPIIHRDVKTANILLDENLTAKVADFGASRLIPMDQEQLTTMVQGTLGYLDPEYYNTGLLNEKSDVYSFGVVLMELLSGEKALCFERPQSSKHLVSYFVSAMKENRLHEIIDGQVMNEYNQREIQESARIAVECTRIMGEERPSMKEVAAELEALRVKTTKHQWSDQYPKEVEHLLGVQILSTQGDTSSIGYDSIQNVTRLDIETGR

SEQ ID NO: 91853 - protein, 591 aa, Arabidopsis thaliana
  peptide (1)..(591): Ceres Seq. ID no. 12729758
MSLCDTPPPPNSKCNGVGCCRTEVSIPLDSHRIETQPSRFENMTSVEHFNPCSYAFFVEDGMFNFSSLEDLKDLRNVTRFPVLLDWSIGNQTCEQVVGRNICGGNSTCFDSTRGKGYNCKCLQGFDGNPYLSDGCQDINECTTRIHNCSDTSTCENTLGSFHCQCPSGSDLNTTTMSCIDTPKEEPKYLGWTTVLLGTTIGFLIILLTISYIQQKMRHRKNTELRQQFFEQNGGGMLIQRLSGAGPSNVDVKIFTEEGMKEATDGYNESRILGQGGQGTVYKGILQDNSIVAIKKARLGDRSQVEQFINEVLVLSQINHRNVVKLLGCCLETEVPLLVYEFISSGTLFDHLHGSMFDSSLTWEHRLRIAIEVAGTLAYLHSYASIPIIHRDVKTANILLDENLTAKVADFGASRLIPMDQEQLTTMVQGTLGYLDPEYYNTGLLNEKSDVYSFGVVLMELLSGEKALCFERPQSSKHLVSYFVSAMKENRLHEIIDGQVMNEYNQREIQESARIAVECTRIMGEERPSMKEVAAELEALRVKTTKHQWSDQYPKEVEHLLGVQILSTQGDTSSIGYDSIQNVTRLDIETGR

SEQ ID NO: 91854 - DNA, 2226 bp, Arabidopsis thaliana
  misc_feature (1)..(2226): Ceres Seq. ID no. 12729759
  misc_feature (1)..(2226): Ortholog of  Ceres SEQ ID NO 13654989 as cited in SEQ ID NO 63117
  misc_feature (1)..(2226): Ortholog of  Ceres SEQ ID NO 13584744 as cited in SEQ ID NO 69137
atgaagttccaggagggtgtgttcttggtggttattttcttccttgcatatactcagcttgtgaaggggcaacatcaacctcgcgaagattgtaaacttaaatgtggaaacgtcacaatagagtacccttttggtatttctacaggttgttactatcccggagatgataatttcaatctcacctgtgtcgtggaagagaagctactactctttggcatcattcaagtgaccaatatttctcacagtggccatgtaagtgtactgtttgaacgattctctgaatgctacgagcagaaaaatgagactaatggaactgccctcgggtatcagctgggtagtagtttctctctctcctccaacaacaagtttactttagtaggatgtaacgctttatcacttttgagcacttttggaaagcaaaactactcaactggatgcttgtcattatgcaattctcaaccagaggcaaatggaagatgtaatggtgtaggttgctgcacaacagaggacttctctgtcccgttcgatagcgatacattccaatttggctcagttcgcttgagaaaccaagttaataattccttagatctatttaatacttcggtatatcagtttaatccttgcacctacgcttttctcgttgaagatggtaagtttaacttcgattcttcaaaagatcttaagaatctgaggaatgtcacgaggttccctgtggcactagattggtctattggaaaccagacatgtgagcaagctggaagcacaagaatatgcggtaagaacagctcatgttacaattctactactagaaacgggtatatctgcaaatgtaatgaaggttatgatgggaatccataccgttcagagggttgcaaagacatcgatgagtgtattagtgatacacataactgttcggatccaaaaacctgtagaaacagggatggaggcttcgattgtaagtgtccatctggttacgacttaaactccagtatgagctgcacgaggcccgaatacaaacggactcgaatttttcttgtaatcataatcggcgtcttggtcctcctgcttgctgcgatctgtatacaacatgcaacgaagcaaaggaagtataccaagctccgacgacaattctttgagcaaaatggtggtggcatgttgatacagcgactttcaggagcagggttgtcaaacattgatttcaaaatctttactgaggaaggcatgaaagaggcaactaatggctatgatgagagcagaatcttgggccagggaggtcaaggaacagtctacaaagggatattgccggacaacactatcgttgctataaagaaagctcggcttgcagacagtagacaagtagatcagttcatccacgaagtgctcgtgctttcacaaattaaccacaggaacgtggtcaagatcttgggttgctgtctagagactgaagtccccttgttggtctatgaattcattaccaatggcacccttttcgatcacttgcacggttccatttttgattcttctcttacatgggaacaccgcctcagaatagcgatagaagtcgctggaactcttgcttatcttcactcctctgcttctattccaatcatccatcgcgatatcaaaactgcaaatattctcttggatgaaaacttaactgcaaaagtagccgactttggcgcttctaagcttataccaatggataaagagcagctcacaactatggtgcaaggcactctaggctatttagacccagaatactataccacagggcttctgaacgagaagagcgatgtgtatagctttggggtagtcctcatggaactgctctcaggtcaaaaggcattgtgctttgaacggccacaggcttcaaaacatttggtgagttactttgtttctgccacggaagagaataggttgcatgagattattgacgaccaagtgttgaacgaggataatctgaaggagatccaggaagctgcaagaattgctgcagagtgtacaaggctaatgggagaggaaaggccaaggatgaaagaagtagctgcaaagctagaagccttgagggtcgagaaaaccaaacataagtggtcggatcagtatcctgaggagaatgaacacttgattggtggtcacatcttgtctgcacaaggcgaaaccagtagcagcattggctatgatagcatcaaaaatgtagcaatattggacattgaaactggccgctga

SEQ ID NO: 91855 - protein, 741 aa, Arabidopsis thaliana
  peptide (1)..(741): Ceres Seq. ID no. 12729760
MKFQEGVFLVVIFFLAYTQLVKGQHQPREDCKLKCGNVTIEYPFGISTGCYYPGDDNFNLTCVVEEKLLLFGIIQVTNISHSGHVSVLFERFSECYEQKNETNGTALGYQLGSSFSLSSNNKFTLVGCNALSLLSTFGKQNYSTGCLSLCNSQPEANGRCNGVGCCTTEDFSVPFDSDTFQFGSVRLRNQVNNSLDLFNTSVYQFNPCTYAFLVEDGKFNFDSSKDLKNLRNVTRFPVALDWSIGNQTCEQAGSTRICGKNSSCYNSTTRNGYICKCNEGYDGNPYRSEGCKDIDECISDTHNCSDPKTCRNRDGGFDCKCPSGYDLNSSMSCTRPEYKRTRIFLVIIIGVLVLLLAAICIQHATKQRKYTKLRRQFFEQNGGGMLIQRLSGAGLSNIDFKIFTEEGMKEATNGYDESRILGQGGQGTVYKGILPDNTIVAIKKARLADSRQVDQFIHEVLVLSQINHRNVVKILGCCLETEVPLLVYEFITNGTLFDHLHGSIFDSSLTWEHRLRIAIEVAGTLAYLHSSASIPIIHRDIKTANILLDENLTAKVADFGASKLIPMDKEQLTTMVQGTLGYLDPEYYTTGLLNEKSDVYSFGVVLMELLSGQKALCFERPQASKHLVSYFVSATEENRLHEIIDDQVLNEDNLKEIQEAARIAAECTRLMGEERPRMKEVAAKLEALRVEKTKHKWSDQYPEENEHLIGGHILSAQGETSSSIGYDSIKNVAILDIETGR

SEQ ID NO: 91856 - protein, 411 aa, Arabidopsis thaliana
  peptide (1)..(411): Ceres Seq. ID no. 12729761
MSCTRPEYKRTRIFLVIIIGVLVLLLAAICIQHATKQRKYTKLRRQFFEQNGGGMLIQRLSGAGLSNIDFKIFTEEGMKEATNGYDESRILGQGGQGTVYKGILPDNTIVAIKKARLADSRQVDQFIHEVLVLSQINHRNVVKILGCCLETEVPLLVYEFITNGTLFDHLHGSIFDSSLTWEHRLRIAIEVAGTLAYLHSSASIPIIHRDIKTANILLDENLTAKVADFGASKLIPMDKEQLTTMVQGTLGYLDPEYYTTGLLNEKSDVYSFGVVLMELLSGQKALCFERPQASKHLVSYFVSATEENRLHEIIDDQVLNEDNLKEIQEAARIAAECTRLMGEERPRMKEVAAKLEALRVEKTKHKWSDQYPEENEHLIGGHILSAQGETSSSIGYDSIKNVAILDIETGR

SEQ ID NO: 91857 - DNA, 2552 bp, Arabidopsis thaliana
  misc_feature (1)..(2552): Ceres Seq. ID no. 12729762
  misc_feature (1)..(2552): Ortholog of  Ceres SEQ ID NO 13654989 as cited in SEQ ID NO 63117
  misc_feature (1)..(2552): Ortholog of  Ceres SEQ ID NO 13584744 as cited in SEQ ID NO 69137
atacaggaataagcagcagcgtacttaaacgtcctcttcactggttacgttggttgtgtagttgaattttagtcttcttgcaatttctgggaaaatgggaaggggcctgcgaaaatgagtgagagagaacatctcgtatacagttgtttcttataagaacaaggagattagcgaaaaaaactcaaaagaggaacagagttagagagagagagagagagagaaataaagagagaagagaggtagaagatgaaggtgcaggagggtttgttcttggtggctattttcttctcccttgcgtgtacgcagctggtgaaggggcaacatcaacctggtgagaattgccaaaataaatgtggcaacatcacaatagagtacccttttggcatttcttcaggttgttactatcccggaaatgaaagtttcagtatcacctgtaaggaagataggccacatgtcttaagcgacattgaagtggcaaactttaatcacagcggccagctacaagttctgcttaatcgatcctctacttgctacgacgagcaaggaaaaaaaactgaggaggacagttcttttacactggaaaatttatctctttccgccaacaacaagttaactgcagtaggctgtaacgctttatcacttctggacacttttggaatgcaaaactactcaactgcatgcttgtcattatgcgattctcccccagaggctgatggagaatgtaatggtagaggttgctgcagagtcgacgtttctgccccgttggatagctatacattcgaaactacatcaggtcgcatcaagcacatgacttcttttcacgactttagtccttgcacctacgcttttctcgttgaagatgataagttcaacttcagttctacagaagatcttctgaatctgcgaaatgtcatgaggttccctgtgttactagattggtctgttggaaatcagacatgcgagcaagttggaagcacaagcatatgcggtgggaacagcacttgtctcgattctactcctagaaacgggtatatctgcagatgcaatgaaggctttgatgggaatccatacctttcagctggttgccaagacgtcaatgagtgtactactagtagtactatccatagacataactgttcggatcccaaaacctgtagaaacaaggttggaggcttctattgtaagtgtcaatctggttaccgcttagataccaccactatgagctgcaagcgtaaagagtttgcatggactacaattcttcttgtaaccaccatcggcttcttggtcattctgcttggcgttgcctgtatacaacagagaatgaagcacctgaaggacaccaagctccgagaacaattcttcgagcaaaatggtggcggcatgttgacacaacgactctcaggagcagggccgtcaaatgttgatgtcaaaatctttactgaggatggcatgaagaaagcaacaaatggttatgctgagagcaggatcctgggtcagggtggccaaggaacagtgtacaaagggatattgccggacaactccatagttgctataaagaaagcccgacttggagacagtagccaagtagagcagttcatcaatgaagtgctcgtgctttcacaaatcaaccataggaacgtagtcaagctcttgggctgctgtctagagactgaagttcccttgttggtctatgagttcatcaccaatggcacccttttcgatcacttgcatggttccatgattgattcttcgcttacatgggaacaccgtctgaagatagcaatagaagtcgctggaactcttgcatatcttcactcctctgcttctattccaatcatccatcgggatatcaaaactgcaaatattcttctggatgtaaacttaactgcaaaagtagctgactttggtgcttcaaggctgataccaatggataaagaagagctcgaaactatggtgcaaggcactctaggttacctagacccagaatattacaacacagggttgttaaacgaaaagagcgatgtttatagttttggggtcgtcctaatggaactgctctcaggtcaaaaggcattgtgctttaaacggccacagtcctcaaaacatctggtgagttactttgcgactgccacaaaagagaataggttggatgagattattggcggcgaagtgatgaacgaggataatctgaaggagatccaggaagctgcaagaattgctgcagagtgtacaaggctaatgggagaggaaaggccaaggatgaaagaagtagctgcaaagctagaagccttgagggtcgaaaaaaccaaacataagtggtcggatcagtaccctgaggagaatgaacacttgattggtggtcacatcttgtcagcacaaggcgaaaccagtagcagcattggctatgacagcatcaagaatgtagcaatattggacattgaaactggccgctgatattacaaattcacatgtatttcttttgtttgtaagaaaaaaaaaactacctctttgttgcttcatcaataatgctttgcttcattaataatgatttg

SEQ ID NO: 91858 - protein, 735 aa, Arabidopsis thaliana
  peptide (1)..(735): Ceres Seq. ID no. 12729763
MKVQEGLFLVAIFFSLACTQLVKGQHQPGENCQNKCGNITIEYPFGISSGCYYPGNESFSITCKEDRPHVLSDIEVANFNHSGQLQVLLNRSSTCYDEQGKKTEEDSSFTLENLSLSANNKLTAVGCNALSLLDTFGMQNYSTACLSLCDSPPEADGECNGRGCCRVDVSAPLDSYTFETTSGRIKHMTSFHDFSPCTYAFLVEDDKFNFSSTEDLLNLRNVMRFPVLLDWSVGNQTCEQVGSTSICGGNSTCLDSTPRNGYICRCNEGFDGNPYLSAGCQDVNECTTSSTIHRHNCSDPKTCRNKVGGFYCKCQSGYRLDTTTMSCKRKEFAWTTILLVTTIGFLVILLGVACIQQRMKHLKDTKLREQFFEQNGGGMLTQRLSGAGPSNVDVKIFTEDGMKKATNGYAESRILGQGGQGTVYKGILPDNSIVAIKKARLGDSSQVEQFINEVLVLSQINHRNVVKLLGCCLETEVPLLVYEFITNGTLFDHLHGSMIDSSLTWEHRLKIAIEVAGTLAYLHSSASIPIIHRDIKTANILLDVNLTAKVADFGASRLIPMDKEELETMVQGTLGYLDPEYYNTGLLNEKSDVYSFGVVLMELLSGQKALCFKRPQSSKHLVSYFATATKENRLDEIIGGEVMNEDNLKEIQEAARIAAECTRLMGEERPRMKEVAAKLEALRVEKTKHKWSDQYPEENEHLIGGHILSAQGETSSSIGYDSIKNVAILDIETGR

SEQ ID NO: 91859 - protein, 598 aa, Arabidopsis thaliana
  peptide (1)..(598): Ceres Seq. ID no. 12729764
MQNYSTACLSLCDSPPEADGECNGRGCCRVDVSAPLDSYTFETTSGRIKHMTSFHDFSPCTYAFLVEDDKFNFSSTEDLLNLRNVMRFPVLLDWSVGNQTCEQVGSTSICGGNSTCLDSTPRNGYICRCNEGFDGNPYLSAGCQDVNECTTSSTIHRHNCSDPKTCRNKVGGFYCKCQSGYRLDTTTMSCKRKEFAWTTILLVTTIGFLVILLGVACIQQRMKHLKDTKLREQFFEQNGGGMLTQRLSGAGPSNVDVKIFTEDGMKKATNGYAESRILGQGGQGTVYKGILPDNSIVAIKKARLGDSSQVEQFINEVLVLSQINHRNVVKLLGCCLETEVPLLVYEFITNGTLFDHLHGSMIDSSLTWEHRLKIAIEVAGTLAYLHSSASIPIIHRDIKTANILLDVNLTAKVADFGASRLIPMDKEELETMVQGTLGYLDPEYYNTGLLNEKSDVYSFGVVLMELLSGQKALCFKRPQSSKHLVSYFATATKENRLDEIIGGEVMNEDNLKEIQEAARIAAECTRLMGEERPRMKEVAAKLEALRVEKTKHKWSDQYPEENEHLIGGHILSAQGETSSSIGYDSIKNVAILDIETGR

SEQ ID NO: 91860 - protein, 548 aa, Arabidopsis thaliana
  peptide (1)..(548): Ceres Seq. ID no. 12729765
MTSFHDFSPCTYAFLVEDDKFNFSSTEDLLNLRNVMRFPVLLDWSVGNQTCEQVGSTSICGGNSTCLDSTPRNGYICRCNEGFDGNPYLSAGCQDVNECTTSSTIHRHNCSDPKTCRNKVGGFYCKCQSGYRLDTTTMSCKRKEFAWTTILLVTTIGFLVILLGVACIQQRMKHLKDTKLREQFFEQNGGGMLTQRLSGAGPSNVDVKIFTEDGMKKATNGYAESRILGQGGQGTVYKGILPDNSIVAIKKARLGDSSQVEQFINEVLVLSQINHRNVVKLLGCCLETEVPLLVYEFITNGTLFDHLHGSMIDSSLTWEHRLKIAIEVAGTLAYLHSSASIPIIHRDIKTANILLDVNLTAKVADFGASRLIPMDKEELETMVQGTLGYLDPEYYNTGLLNEKSDVYSFGVVLMELLSGQKALCFKRPQSSKHLVSYFATATKENRLDEIIGGEVMNEDNLKEIQEAARIAAECTRLMGEERPRMKEVAAKLEALRVEKTKHKWSDQYPEENEHLIGGHILSAQGETSSSIGYDSIKNVAILDIETGR

SEQ ID NO: 91861 - DNA, 2614 bp, Arabidopsis thaliana
  misc_feature (1)..(2614): Ceres Seq. ID no. 12729802
  misc_feature (1)..(2614): Ortholog of  Ceres SEQ ID NO 13654989 as cited in SEQ ID NO 63117
  misc_feature (1)..(2614): Ortholog of  Ceres SEQ ID NO 13657138 as cited in SEQ ID NO 65923
  misc_feature (1)..(2614): Ortholog of  Ceres SEQ ID NO 13584744 as cited in SEQ ID NO 69137
atgtctgctcctccattcttactcttctctctttctcagaagctgcaaaaccagagagtgagagagaatagagattcacttttgtgagcgttgcgatgattttgtgcctcgtggaatcatcacactacaacgtattcacctgaaattcagacaaaacagtttgaggaaactgggaagtgataagataagagagtgatagagagagagatgacggaaaacggcgtcgttacaggaggaggccatactgttatggtgggcgtaaagttcgatgagtcgagcaatgagctacttgattgggctttggttaaggttgctgaaccgggtgatactgtaatcgctcttcatgtactcggcaatgagatcgttgaccgagcagacaactcttctctcgtctccattgttaaaaactttgattctgttcttgaagtttatgaaggtttctgcaaattgaaacagttggaattgaagctaaaattatcccggggttcttctactcgaaagattctagttaaagaagcaaaaatgtgttctgcgtccaaagttgtagttgggatctccagacgtttccatacaattcattcatctgtctccgtggctaagtacttagctaggaaagtagcaaaagattgctgggttctggctgttgacaatggaaaagtcatgtttcagaaagatggttcctcatcgatcattcatcactctaaaggtaaaagtgatgctcgtaggaacactttgtctagtttctttcagatgcctgtcacattgagaaagaataccaaagtagtaaaccattctgaggtggaagaggaagaggcagaggaagatcattccaatggtcagagtcttcggcggtctttagtgtatgcatgccttgggaattgctcggttcgtgatatgaattccttgcctacgcctggaaatttatctcgatcgtctagctgtaatggtgatcaagatgataatgctgatttgcacaaggcaatggcacttgttcctgcaaaatttccagaagatttgaccccattcattacaatgctggtaaaagaactgcctgaatttagaccaggttggcctttgctttgtcgtgtagcttcttcagatgtattagcttctgctccgagaagttcttcgttccgaaagataccagttgtgcagtgggtgctgaagctgcccgctaggaccaattctgttgttggaagctcagacacaaagcagattggttttgattcttctgaatctgaagaaaatgataagttgtctagctcaaacgttgaaaggcaagcaattgttcctgatgaatctatgatcgtgaaatgttctcttgatcatagctcaggtagatttccagagaatgtagagggtcttcaggcaaggatctccacatcttgccagttttttacgtataaggaacttgtgtcggtgacatccaatttctgtgctgataatttcatcggaaaaggaggcagcagccgggtttttagaggttatctgccaaatggaagagaggttgcagtgaaaattctcaaacgaaccgaatgtgtcttgaaggattttgtggcagagattgacattatcacaaccttacaccataagaacgttatttcccttttaggttattgctttgaaaacaataacctgttactagtatataattatctctcaagaggaagccttgaagagaatcttcacggcaacaaaaaagacctggttgcatttcgttggaacgagagatataaggtggccgtgggaatagctgaagcgttggactatctgcataacgatgctccacaacctgttattcacagagatgttaagtcatctaacatattattgtctgatgattttgaaccacaactttctgactttgggcttgcaaagtgggcgtcggaatccacaactcagataatctgctccgatgtcgcaggcacctttggctacttagctccagagtactttatgtatggtaagatgaacaataagatagatgtctatgcttacggcgttgtactcctcgaacttctttctggaagaaaaccggttaatagcgaatctccaaaggctcaagacagtcttgttatgtgggcgaagccaattctggatgataaagaatattcacagctattggactcgagtttgcaagatgacaacaatagtgaccagatggagaagatggcgttagcagccactctttgtataagacataaccctcaaactaggccaacgatgggaatggtcttagagcttcttaaaggtgacgtagagatgctaaaatgggcaaagctacaagttagtaacccgttagaggattcaatgctactcaaggacgagaaattgcggaggtctaatctgcagtcacatctaaacctagcattccttgacatggaagatgactctctttccatgggaagcatggagcaaggcatctccgtggaggagtatcttaaaggcaggacaagccgttcatcaagcttcaactgagccattatttttgttcactacaacaaatcacaattgcaatactcaacaatgtgagatggtgaaaaaaaagagttctcctgtgtgtgagtgagtgtaaagtgtatatttaagaaaatgtgtttcttttcattgtcat

SEQ ID NO: 91862 - protein, 756 aa, Arabidopsis thaliana
  peptide (1)..(756): Ceres Seq. ID no. 12729803
MTENGVVTGGGHTVMVGVKFDESSNELLDWALVKVAEPGDTVIALHVLGNEIVDRADNSSLVSIVKNFDSVLEVYEGFCKLKQLELKLKLSRGSSTRKILVKEAKMCSASKVVVGISRRFHTIHSSVSVAKYLARKVAKDCWVLAVDNGKVMFQKDGSSSIIHHSKGKSDARRNTLSSFFQMPVTLRKNTKVVNHSEVEEEEAEEDHSNGQSLRRSLVYACLGNCSVRDMNSLPTPGNLSRSSSCNGDQDDNADLHKAMALVPAKFPEDLTPFITMLVKELPEFRPGWPLLCRVASSDVLASAPRSSSFRKIPVVQWVLKLPARTNSVVGSSDTKQIGFDSSESEENDKLSSSNVERQAIVPDESMIVKCSLDHSSGRFPENVEGLQARISTSCQFFTYKELVSVTSNFCADNFIGKGGSSRVFRGYLPNGREVAVKILKRTECVLKDFVAEIDIITTLHHKNVISLLGYCFENNNLLLVYNYLSRGSLEENLHGNKKDLVAFRWNERYKVAVGIAEALDYLHNDAPQPVIHRDVKSSNILLSDDFEPQLSDFGLAKWASESTTQIICSDVAGTFGYLAPEYFMYGKMNNKIDVYAYGVVLLELLSGRKPVNSESPKAQDSLVMWAKPILDDKEYSQLLDSSLQDDNNSDQMEKMALAATLCIRHNPQTRPTMGMVLELLKGDVEMLKWAKLQVSNPLEDSMLLKDEKLRRSNLQSHLNLAFLDMEDDSLSMGSMEQGISVEEYLKGRTSRSSSFN

SEQ ID NO: 91863 - protein, 742 aa, Arabidopsis thaliana
  peptide (1)..(742): Ceres Seq. ID no. 12729804
MVGVKFDESSNELLDWALVKVAEPGDTVIALHVLGNEIVDRADNSSLVSIVKNFDSVLEVYEGFCKLKQLELKLKLSRGSSTRKILVKEAKMCSASKVVVGISRRFHTIHSSVSVAKYLARKVAKDCWVLAVDNGKVMFQKDGSSSIIHHSKGKSDARRNTLSSFFQMPVTLRKNTKVVNHSEVEEEEAEEDHSNGQSLRRSLVYACLGNCSVRDMNSLPTPGNLSRSSSCNGDQDDNADLHKAMALVPAKFPEDLTPFITMLVKELPEFRPGWPLLCRVASSDVLASAPRSSSFRKIPVVQWVLKLPARTNSVVGSSDTKQIGFDSSESEENDKLSSSNVERQAIVPDESMIVKCSLDHSSGRFPENVEGLQARISTSCQFFTYKELVSVTSNFCADNFIGKGGSSRVFRGYLPNGREVAVKILKRTECVLKDFVAEIDIITTLHHKNVISLLGYCFENNNLLLVYNYLSRGSLEENLHGNKKDLVAFRWNERYKVAVGIAEALDYLHNDAPQPVIHRDVKSSNILLSDDFEPQLSDFGLAKWASESTTQIICSDVAGTFGYLAPEYFMYGKMNNKIDVYAYGVVLLELLSGRKPVNSESPKAQDSLVMWAKPILDDKEYSQLLDSSLQDDNNSDQMEKMALAATLCIRHNPQTRPTMGMVLELLKGDVEMLKWAKLQVSNPLEDSMLLKDEKLRRSNLQSHLNLAFLDMEDDSLSMGSMEQGISVEEYLKGRTSRSSSFN

SEQ ID NO: 91864 - protein, 651 aa, Arabidopsis thaliana
  peptide (1)..(651): Ceres Seq. ID no. 12729805
MCSASKVVVGISRRFHTIHSSVSVAKYLARKVAKDCWVLAVDNGKVMFQKDGSSSIIHHSKGKSDARRNTLSSFFQMPVTLRKNTKVVNHSEVEEEEAEEDHSNGQSLRRSLVYACLGNCSVRDMNSLPTPGNLSRSSSCNGDQDDNADLHKAMALVPAKFPEDLTPFITMLVKELPEFRPGWPLLCRVASSDVLASAPRSSSFRKIPVVQWVLKLPARTNSVVGSSDTKQIGFDSSESEENDKLSSSNVERQAIVPDESMIVKCSLDHSSGRFPENVEGLQARISTSCQFFTYKELVSVTSNFCADNFIGKGGSSRVFRGYLPNGREVAVKILKRTECVLKDFVAEIDIITTLHHKNVISLLGYCFENNNLLLVYNYLSRGSLEENLHGNKKDLVAFRWNERYKVAVGIAEALDYLHNDAPQPVIHRDVKSSNILLSDDFEPQLSDFGLAKWASESTTQIICSDVAGTFGYLAPEYFMYGKMNNKIDVYAYGVVLLELLSGRKPVNSESPKAQDSLVMWAKPILDDKEYSQLLDSSLQDDNNSDQMEKMALAATLCIRHNPQTRPTMGMVLELLKGDVEMLKWAKLQVSNPLEDSMLLKDEKLRRSNLQSHLNLAFLDMEDDSLSMGSMEQGISVEEYLKGRTSRSSSFN

SEQ ID NO: 91865 - DNA, 3260 bp, Arabidopsis thaliana
  misc_feature (1)..(3260): Ceres Seq. ID no. 12729806
  misc_feature (1)..(3260): Ortholog of  Ceres SEQ ID NO 12581696 as cited in SEQ ID NO 55411
aaattcctgcaaacttccaaaacaccatctcaaatatccacattctccgccattaccctgaaccgtttctcgagttgtttctctcatgttcctatgcttttgcccttgccacgtacctatcatgagtcgcctttctccggccaccggaatctcttcccgcctccgcttctccattggtttgagttccgatggacgattaattcccttcggattccggtttcggagaaacgatgtcccgtttaaacgccgcttgagatttgtgatcagagcgcagctctctgaagctttttctcccgatttaggtttggattctcaggctgtgaaatcccgcgatacatcaaacttgccttggattggtccagttccaggggacattgctgaggttgaggcgtattgtagaatttttagatcagctgagcgactacatggagcgttgatggagacactatgcaaccctgtgactggtgaatgtcgagtaccgtatgatttctcaccggaggaaaaaccattgttggaggacaaaatagtatcagtgcttggttgtatattatctcttttaaacaaaggaaggaaagaaattctctctgggaggtcatcttctatgaattcatttaatttggatgatgttggggttgcagaggagtcgcttccaccacttgctgttttcaggggtgaaatgaaacggtgttgtgaaagcttacacattgctcttgagaattatctgacgccggatgatgagagaagtggaattgtttggaggaaattacagaagcttaaaaatgtctgctacgacgctggttttccacgcagtgataactatccttgtcaaacactttttgcgaattgggaccctatttactcgtcaaatacgaaagaggatattgattcctacgagtctgagattgcattttggaggggaggacaggtaacccaagaaggattgaagtggttgatagaaaacggatttaaaacaattgttgacctgagagctgaaatcgttaaggatacattctaccagacggcacttgatgatgcaatttcccttgggaaaattacagtggtgcaaattccaattgatgtcaggatggctcctaaagctgagcaggtcgagctgtttgcttctattgtatcagatagcagcaaaagaccgatatatgttcacagtaaagaaggtgtttggagaacttctgcgatggtttctaggtggaagcagtacatgacacgaccgatcacgaaagaaattccagtttcagaagagtcaaagcgtcgggaggtttctgaaactaagcttggatcaaatgctgtagtatctggtaagggtgtacctgatgagcagactgataaagtctctgaaatcaatgaggttgatagtagatctgcttcaagccagagcaaggaatctggaaggtttgagggagatacatctgcatcagaatttaatatggtgagcgatcctcttaaatctcaagttccaccaggcaatattttttcaagaaaagaaatgtctaaattcctgaagagcaaaagtattgctcctgctggttatcttactaatccgtccaaaatattgggaacagtgccaactccacaattttcatatactggtgtgacaaacggaaatcagattgttgataaagattcgataagaagacttgcggagacaggaaactccaatgggacccttctacctacaagttctcaaagtttagattttggcaacgggaagttttcaaatggaaatgtgcatgcgtctgataacaccaacaaaagtatatcggacaacaggggaaatggcttctctgcagcccctattgctgtgcctcctagtgataacttaagtcgcgctgtaggatcccattcggttcgagagtctcagactcagagaaataatagtggttcctcctcggattccagtgatgatgaagctggagctattgagggaaatatgtgtgcttctgccactggtgtagtaagggtgcagtcgagaaagaaagcagagatgttcttagtccgaactgatggagtgtcttgtacaagggaaaaggtgacagaatcctctctggccttcacacatccaagtactcaacagcagatgcttctttggaaaactaccccaaaaactgtcttactgctgaagaagctcgggcaagaactgatggaggaagctaaagaggctgcctctttcttgtatcaccaagagaatatgaatgttctggttgaacctgaggtgcatgatgtatttgccaggattccagggtttggctttgtccagaccttctacattcaggacacgagcgatctccatgaaagggttgattttgtggcatgcttagggggggatggggtgatattacatgcatcaaacttgttcaaaggagccgtccctcccgttgtttcatttaatctggggtctcttggatttctcacttcacatccatttgaggacttcaggcaagacctcaaacgagtcatccatgggaataacacgctagatggggtttatataactcttcgaatgcgtcttcgttgcgaaatctatcgtaaaggcaaagcaatgcctggtaaagtgtttgatgttctgaacgagattgttgttgatcgaggatccaacccatacctttctaagatcgaatgttatgagcacgaccgtcttatcacgaaggtacaaggcgatggagttatagtagccactcctacaggaagtactgcttattctacagcagcaggaggttccatggtgcatccaaacgttccttgcatgctgttcactccaatctgcccacattccctgtcgttcagaccagttatacttccagattctgcaaaactcgagttaaagattccagatgatgctcgaagcaatgcatgggtttcgtttgatggaaagagaagacaacaactttcaaggggagattcggtgagaatatacatgagccaacatccactcccaactgtcaacaaatctgatcaaaccggtgattggtttagaagcttaatccgttgcttaaactggaacgagcgtcttgatcaaaaggctctctgatgattgattggttcattttagtaaaaagcatcaacaaatacataaacatagggtcacaggtctgtttgtagtatccagccctccctctttactgtacagattcataatctctataattcactacaaagggaaaccattactgaagaaaatattcatctttttcttccttttatcagtttttcccctcaggtaataaaattgattacagtgtgtatac

SEQ ID NO: 91866 - protein, 985 aa, Arabidopsis thaliana
  peptide (1)..(985): Ceres Seq. ID no. 12729807
MFLCFCPCHVPIMSRLSPATGISSRLRFSIGLSSDGRLIPFGFRFRRNDVPFKRRLRFVIRAQLSEAFSPDLGLDSQAVKSRDTSNLPWIGPVPGDIAEVEAYCRIFRSAERLHGALMETLCNPVTGECRVPYDFSPEEKPLLEDKIVSVLGCILSLLNKGRKEILSGRSSSMNSFNLDDVGVAEESLPPLAVFRGEMKRCCESLHIALENYLTPDDERSGIVWRKLQKLKNVCYDAGFPRSDNYPCQTLFANWDPIYSSNTKEDIDSYESEIAFWRGGQVTQEGLKWLIENGFKTIVDLRAEIVKDTFYQTALDDAISLGKITVVQIPIDVRMAPKAEQVELFASIVSDSSKRPIYVHSKEGVWRTSAMVSRWKQYMTRPITKEIPVSEESKRREVSETKLGSNAVVSGKGVPDEQTDKVSEINEVDSRSASSQSKESGRFEGDTSASEFNMVSDPLKSQVPPGNIFSRKEMSKFLKSKSIAPAGYLTNPSKILGTVPTPQFSYTGVTNGNQIVDKDSIRRLAETGNSNGTLLPTSSQSLDFGNGKFSNGNVHASDNTNKSISDNRGNGFSAAPIAVPPSDNLSRAVGSHSVRESQTQRNNSGSSSDSSDDEAGAIEGNMCASATGVVRVQSRKKAEMFLVRTDGVSCTREKVTESSLAFTHPSTQQQMLLWKTTPKTVLLLKKLGQELMEEAKEAASFLYHQENMNVLVEPEVHDVFARIPGFGFVQTFYIQDTSDLHERVDFVACLGGDGVILHASNLFKGAVPPVVSFNLGSLGFLTSHPFEDFRQDLKRVIHGNNTLDGVYITLRMRLRCEIYRKGKAMPGKVFDVLNEIVVDRGSNPYLSKIECYEHDRLITKVQGDGVIVATPTGSTAYSTAAGGSMVHPNVPCMLFTPICPHSLSFRPVILPDSAKLELKIPDDARSNAWVSFDGKRRQQLSRGDSVRIYMSQHPLPTVNKSDQTGDWFRSLIRCLNWNERLDQKAL

SEQ ID NO: 91867 - protein, 973 aa, Arabidopsis thaliana
  peptide (1)..(973): Ceres Seq. ID no. 12729808
MSRLSPATGISSRLRFSIGLSSDGRLIPFGFRFRRNDVPFKRRLRFVIRAQLSEAFSPDLGLDSQAVKSRDTSNLPWIGPVPGDIAEVEAYCRIFRSAERLHGALMETLCNPVTGECRVPYDFSPEEKPLLEDKIVSVLGCILSLLNKGRKEILSGRSSSMNSFNLDDVGVAEESLPPLAVFRGEMKRCCESLHIALENYLTPDDERSGIVWRKLQKLKNVCYDAGFPRSDNYPCQTLFANWDPIYSSNTKEDIDSYESEIAFWRGGQVTQEGLKWLIENGFKTIVDLRAEIVKDTFYQTALDDAISLGKITVVQIPIDVRMAPKAEQVELFASIVSDSSKRPIYVHSKEGVWRTSAMVSRWKQYMTRPITKEIPVSEESKRREVSETKLGSNAVVSGKGVPDEQTDKVSEINEVDSRSASSQSKESGRFEGDTSASEFNMVSDPLKSQVPPGNIFSRKEMSKFLKSKSIAPAGYLTNPSKILGTVPTPQFSYTGVTNGNQIVDKDSIRRLAETGNSNGTLLPTSSQSLDFGNGKFSNGNVHASDNTNKSISDNRGNGFSAAPIAVPPSDNLSRAVGSHSVRESQTQRNNSGSSSDSSDDEAGAIEGNMCASATGVVRVQSRKKAEMFLVRTDGVSCTREKVTESSLAFTHPSTQQQMLLWKTTPKTVLLLKKLGQELMEEAKEAASFLYHQENMNVLVEPEVHDVFARIPGFGFVQTFYIQDTSDLHERVDFVACLGGDGVILHASNLFKGAVPPVVSFNLGSLGFLTSHPFEDFRQDLKRVIHGNNTLDGVYITLRMRLRCEIYRKGKAMPGKVFDVLNEIVVDRGSNPYLSKIECYEHDRLITKVQGDGVIVATPTGSTAYSTAAGGSMVHPNVPCMLFTPICPHSLSFRPVILPDSAKLELKIPDDARSNAWVSFDGKRRQQLSRGDSVRIYMSQHPLPTVNKSDQTGDWFRSLIRCLNWNERLDQKAL

SEQ ID NO: 91868 - protein, 868 aa, Arabidopsis thaliana
  peptide (1)..(868): Ceres Seq. ID no. 12729809
METLCNPVTGECRVPYDFSPEEKPLLEDKIVSVLGCILSLLNKGRKEILSGRSSSMNSFNLDDVGVAEESLPPLAVFRGEMKRCCESLHIALENYLTPDDERSGIVWRKLQKLKNVCYDAGFPRSDNYPCQTLFANWDPIYSSNTKEDIDSYESEIAFWRGGQVTQEGLKWLIENGFKTIVDLRAEIVKDTFYQTALDDAISLGKITVVQIPIDVRMAPKAEQVELFASIVSDSSKRPIYVHSKEGVWRTSAMVSRWKQYMTRPITKEIPVSEESKRREVSETKLGSNAVVSGKGVPDEQTDKVSEINEVDSRSASSQSKESGRFEGDTSASEFNMVSDPLKSQVPPGNIFSRKEMSKFLKSKSIAPAGYLTNPSKILGTVPTPQFSYTGVTNGNQIVDKDSIRRLAETGNSNGTLLPTSSQSLDFGNGKFSNGNVHASDNTNKSISDNRGNGFSAAPIAVPPSDNLSRAVGSHSVRESQTQRNNSGSSSDSSDDEAGAIEGNMCASATGVVRVQSRKKAEMFLVRTDGVSCTREKVTESSLAFTHPSTQQQMLLWKTTPKTVLLLKKLGQELMEEAKEAASFLYHQENMNVLVEPEVHDVFARIPGFGFVQTFYIQDTSDLHERVDFVACLGGDGVILHASNLFKGAVPPVVSFNLGSLGFLTSHPFEDFRQDLKRVIHGNNTLDGVYITLRMRLRCEIYRKGKAMPGKVFDVLNEIVVDRGSNPYLSKIECYEHDRLITKVQGDGVIVATPTGSTAYSTAAGGSMVHPNVPCMLFTPICPHSLSFRPVILPDSAKLELKIPDDARSNAWVSFDGKRRQQLSRGDSVRIYMSQHPLPTVNKSDQTGDWFRSLIRCLNWNERLDQKAL

SEQ ID NO: 91869 - DNA, 792 bp, Arabidopsis thaliana
  misc_feature (1)..(792): Ceres Seq. ID no. 12729830
  misc_feature (1)..(792): Ortholog of  Ceres SEQ ID NO 14312328 as cited in SEQ ID NO 59022
atgtttgggtttttcaaatctccggggaacaataaacttcccaatgaatcatcaaacaacaaaggaggaacaatcactgcaggaagaaggacttcttcagaaccaatcctgataacaccagatttcgacgatgacgacaaatacaagaacggtttcaacgattctggtggtctgcagagccaaacgacagaagaattagaaaaatatgcagtttataaagctgaagaaacaaccaaaggtgttaataattgtcttaagatcgctgaagatataagatcagatggtgcaagaacgctcgaaatgttgcatcagcaaggtgaacaaatcaacaggactcatgaaatggctgttgatatggataaagatctcagtcggggggagaagcttttgaacaacttaggaggaatgttttcaaagccatggaaaccaaagaagactaaaaatatcacaggacctatgatcacaccagataaaccgtcgaagaagagcgagaatcacaaggaagagcgggagaaacttggtttgggtgcaaaaggacgatcgagcagtcaaccagcattagatcaaccaacaaatgcgttgcagaaagttgagcaagagaaggcaaagcaagacgatggactttcagatttaagtgacatattgggtgatcttaagagcatggccgttgatatgggatctgagatcgacaagcaaaacaaagctcttgatcatctcggcgacgatgttgatgagcttaactctcgtgttcaaggagctaatcaacgggcacgtcacttgctttccaaataa

SEQ ID NO: 91870 - protein, 263 aa, Arabidopsis thaliana
  peptide (1)..(263): Ceres Seq. ID no. 12729831
MFGFFKSPGNNKLPNESSNNKGGTITAGRRTSSEPILITPDFDDDDKYKNGFNDSGGLQSQTTEELEKYAVYKAEETTKGVNNCLKIAEDIRSDGARTLEMLHQQGEQINRTHEMAVDMDKDLSRGEKLLNNLGGMFSKPWKPKKTKNITGPMITPDKPSKKSENHKEEREKLGLGAKGRSSSQPALDQPTNALQKVEQEKAKQDDGLSDLSDILGDLKSMAVDMGSEIDKQNKALDHLGDDVDELNSRVQGANQRARHLLSK

SEQ ID NO: 91871 - protein, 163 aa, Arabidopsis thaliana
  peptide (1)..(163): Ceres Seq. ID no. 12729832
MLHQQGEQINRTHEMAVDMDKDLSRGEKLLNNLGGMFSKPWKPKKTKNITGPMITPDKPSKKSENHKEEREKLGLGAKGRSSSQPALDQPTNALQKVEQEKAKQDDGLSDLSDILGDLKSMAVDMGSEIDKQNKALDHLGDDVDELNSRVQGANQRARHLLSK

SEQ ID NO: 91872 - protein, 149 aa, Arabidopsis thaliana
  peptide (1)..(149): Ceres Seq. ID no. 12729833
MAVDMDKDLSRGEKLLNNLGGMFSKPWKPKKTKNITGPMITPDKPSKKSENHKEEREKLGLGAKGRSSSQPALDQPTNALQKVEQEKAKQDDGLSDLSDILGDLKSMAVDMGSEIDKQNKALDHLGDDVDELNSRVQGANQRARHLLSK

SEQ ID NO: 91873 - DNA, 705 bp, Arabidopsis thaliana
  misc_feature (1)..(705): Ceres Seq. ID no. 12729850
  misc_feature (1)..(705): Ortholog of  Ceres SEQ ID NO 15173263 as cited in SEQ ID NO 64606
ctgttaccaaaaaatctgtaccgcaaaatcctcgtcgaagctcgctgctgcaaccatgtccgacgaggagcatcactttgagtccagtgacgccggagcgtccaaaacctaccctcaacaagctggaaccatccgtaagaatggttacatcgtcatcaaaaatcgtccctgcaaggttgttgaggtttcaacctcgaagactggcaagcatggtcatgctaaatgtcattttgtagctattgatatcttcaccagcaagaaactcgaagatattgttccttcttcccacaattgtgatgttcctcatgtcaaccgtactgattatcagctgattgacatttctgaagatggatatgtcagtttgttgactgataacggtagtaccaaggatgaccttaagctccctaatgatgacactctgctccaacagatcaagagtgggtttgatgatggaaaagatctagtggtgagtgtgatgtcagctatgggagaggaacagatcaatgctcttaaggacatcggtcccaagtgagactaacaaagcctcccctttgttatgagattcttcttcttcttctgtaggcttccattactcatcggagattatcttgtttttgggtgactcctattttggatatttaaacttttgttaataatgccatcttcttcaaccttttccttctagatggtttttatacttcttct

SEQ ID NO: 91874 - protein, 176 aa, Arabidopsis thaliana
  peptide (1)..(176): Ceres Seq. ID no. 12729851
CYQKICTAKSSSKLAAATMSDEEHHFESSDAGASKTYPQQAGTIRKNGYIVIKNRPCKVVEVSTSKTGKHGHAKCHFVAIDIFTSKKLEDIVPSSHNCDVPHVNRTDYQLIDISEDGYVSLLTDNGSTKDDLKLPNDDTLLQQIKSGFDDGKDLVVSVMSAMGEEQINALKDIGPK

SEQ ID NO: 91875 - protein, 158 aa, Arabidopsis thaliana
  peptide (1)..(158): Ceres Seq. ID no. 12729852
MSDEEHHFESSDAGASKTYPQQAGTIRKNGYIVIKNRPCKVVEVSTSKTGKHGHAKCHFVAIDIFTSKKLEDIVPSSHNCDVPHVNRTDYQLIDISEDGYVSLLTDNGSTKDDLKLPNDDTLLQQIKSGFDDGKDLVVSVMSAMGEEQINALKDIGPK

SEQ ID NO: 91876 - DNA, 1467 bp, Arabidopsis thaliana
  misc_feature (1)..(1467): Ceres Seq. ID no. 12729861
  misc_feature (1)..(1467): Ortholog of  Ceres SEQ ID NO 14310907 as cited in SEQ ID NO 54338
atgcggaggatagctgccggaatccaccggctcgggatccgccacggagacgtcgtaatgcttctcctcccgaactcgccggagtttgctctgtcttttcttgccgttgcttaccttggagccgtttccactaccgcgaatccgttctacactcagccggagatcgctaaacaggctaaagcctccgccgcgaagatgatcatcacgaagaaatgtttagtcgataaactaacaaacctcaaaaacgacggcgttttgatcgtttgcctagacgatgacggtgacaacggcgttgtttcgtcgagtgatgatggttgcgtgagtttcacggaactgactcaagcggacgaaacagaacttctaaaacctaaaatatcgccggaagacacggtggcgatgccgtactcttccggaacaacgggacttccaaagggagtgatgattactcacaagggtttagttacaagcatcgctcagaaagtcgacggagaaaaccctaaccttaacttcacggccaatgacgtcatcctctgttttctcccaatgtttcacatttacgctctcgacgcgttgatgctttcggcgatgagaaccggtgcagcgttactgatcgtgccgaggttcgagttgaatctggtgatggagctgattcaaaggtacaaagtcacggttgtgccggtggctcctccggtggttttagcattcattaaatcccctgagacggagagatacgacttgagctcggtgagaattatgctatcaggtgcagctacactaaagaaggagcttgaagacgccgtgcgactcaagtttcctaatgccatttttggtcagggttatggaatgaccgagtccggaacggtagctaagtcattagcgtttgcaaagaacccatttaaaaccaagtccggtgcatgtgggactgtgatcagaaacgccgagatgaaagtggtcgataccgaaaccggaatctccttgccgcgcaacaaatctggcgagatctgcgtccgaggtcatcagctcatgaaaggttatttgaatgatccggaagctactgcacgaaccatagacaaagacgggtggttacatacaggagatattgggtttgtggatgatgatgatgagatcttcattgttgatcggttgaaggaactgatcaaattcaaaggctaccaagtggctccagctgagcttgaagcattgcttatttctcatccttctatcgatgatgccgcagttgttgcaatgaaggatgaagtagctgatgaggttccagtagcatttgtagcaagatctcaagggtctcagttaactgaagatgatgtcaagagttacgtaaacaaacaggtggttcactacaagcggattaagatggtgtttttcatagaagttataccaaaagcagtttcgggcaagattctgaggaaggatctgcgagctaaattggaaaccatgtgctctaaatag

SEQ ID NO: 91877 - protein, 488 aa, Arabidopsis thaliana
  peptide (1)..(488): Ceres Seq. ID no. 12729862
MRRIAAGIHRLGIRHGDVVMLLLPNSPEFALSFLAVAYLGAVSTTANPFYTQPEIAKQAKASAAKMIITKKCLVDKLTNLKNDGVLIVCLDDDGDNGVVSSSDDGCVSFTELTQADETELLKPKISPEDTVAMPYSSGTTGLPKGVMITHKGLVTSIAQKVDGENPNLNFTANDVILCFLPMFHIYALDALMLSAMRTGAALLIVPRFELNLVMELIQRYKVTVVPVAPPVVLAFIKSPETERYDLSSVRIMLSGAATLKKELEDAVRLKFPNAIFGQGYGMTESGTVAKSLAFAKNPFKTKSGACGTVIRNAEMKVVDTETGISLPRNKSGEICVRGHQLMKGYLNDPEATARTIDKDGWLHTGDIGFVDDDDEIFIVDRLKELIKFKGYQVAPAELEALLISHPSIDDAAVVAMKDEVADEVPVAFVARSQGSQLTEDDVKSYVNKQVVHYKRIKMVFFIEVIPKAVSGKILRKDLRAKLETMCSK

SEQ ID NO: 91878 - protein, 469 aa, Arabidopsis thaliana
  peptide (1)..(469): Ceres Seq. ID no. 12729863
MLLLPNSPEFALSFLAVAYLGAVSTTANPFYTQPEIAKQAKASAAKMIITKKCLVDKLTNLKNDGVLIVCLDDDGDNGVVSSSDDGCVSFTELTQADETELLKPKISPEDTVAMPYSSGTTGLPKGVMITHKGLVTSIAQKVDGENPNLNFTANDVILCFLPMFHIYALDALMLSAMRTGAALLIVPRFELNLVMELIQRYKVTVVPVAPPVVLAFIKSPETERYDLSSVRIMLSGAATLKKELEDAVRLKFPNAIFGQGYGMTESGTVAKSLAFAKNPFKTKSGACGTVIRNAEMKVVDTETGISLPRNKSGEICVRGHQLMKGYLNDPEATARTIDKDGWLHTGDIGFVDDDDEIFIVDRLKELIKFKGYQVAPAELEALLISHPSIDDAAVVAMKDEVADEVPVAFVARSQGSQLTEDDVKSYVNKQVVHYKRIKMVFFIEVIPKAVSGKILRKDLRAKLETMCSK

SEQ ID NO: 91879 - protein, 423 aa, Arabidopsis thaliana
  peptide (1)..(423): Ceres Seq. ID no. 12729864
MIITKKCLVDKLTNLKNDGVLIVCLDDDGDNGVVSSSDDGCVSFTELTQADETELLKPKISPEDTVAMPYSSGTTGLPKGVMITHKGLVTSIAQKVDGENPNLNFTANDVILCFLPMFHIYALDALMLSAMRTGAALLIVPRFELNLVMELIQRYKVTVVPVAPPVVLAFIKSPETERYDLSSVRIMLSGAATLKKELEDAVRLKFPNAIFGQGYGMTESGTVAKSLAFAKNPFKTKSGACGTVIRNAEMKVVDTETGISLPRNKSGEICVRGHQLMKGYLNDPEATARTIDKDGWLHTGDIGFVDDDDEIFIVDRLKELIKFKGYQVAPAELEALLISHPSIDDAAVVAMKDEVADEVPVAFVARSQGSQLTEDDVKSYVNKQVVHYKRIKMVFFIEVIPKAVSGKILRKDLRAKLETMCSK

SEQ ID NO: 91880 - DNA, 1943 bp, Arabidopsis thaliana
  misc_feature (1)..(1943): Ceres Seq. ID no. 12729865
  misc_feature (1)..(1943): Ortholog of  Ceres SEQ ID NO 14310907 as cited in SEQ ID NO 54338
caaacgttactttccaaaacaatcttttcagttttagataaaaatttgatattaacttctgattcatgacgacacaagatgtgatagtcaatgatcagaatgatcagaaacagtgtagtaatgacgtcattttccgatcgagattgcctgatatatacatccctaaccacctcccactccacgactacatcttcgaaaatatctcagagttcgccgctaagccatgcttgatcaacggtcccaccggcgaagtatacacctacgccgatgtccacgtaacatctcggaaactcgccgccggtcttcataacctcggcgtgaagcaacacgacgttgtaatgatcctcctcccgaactctcctgaagtagtcctcactttccttgccgcctccttcatcggcgcaatcaccacctccgcgaacccgttcttcactccggcggagatttctaaacaagccaaagcctccgcggcgaaactcatcgtcactcaatcccgttacgtcgataaaatcaagaacctccaaaacgacggcgttttgatcgtcaccaccgactccgacgccatccccgaaaactgcctccgtttctccgagttaactcagtccgaagaaccacgagtggactcaataccggagaagatttcgccagaagacgtcgtggcgcttcctttctcatccggcacgacgggtctccccaaaggagtgatgctaacacacaaaggtctagtcacgagcgtggcgcagcaagtcgacggcgagaatccgaatctttacttcaacagagacgacgtgatcctctgtgtcttgcctatgttccatatatacgctctcaactccatcatgctctgtagtctcagagttggtgccacgatcttgataatgcctaagttcgaaatcactctcttgttagagcagatacaaaggtgtaaagtcacggtggctatggtcgtgccaccgatcgttttagctatcgcgaagtcgccggagacggagaagtatgatctgagctcggttaggatggttaagtctggagcagctcctcttggtaaggagcttgaagatgctattagtgctaagtttcctaacgccaagcttggtcagggctatgggatgacagaagcaggtccggtgctagcaatgtcgttagggtttgctaaagagccgtttccagtgaagtcaggagcatgtggtacggtggtgaggaacgccgagatgaagatacttgatccagacacaggagattctttgcctaggaacaaacccggcgaaatatgcatccgtggcaaccaaatcatgaaaggctatctcaatgaccccttggccacggcatcgacgatcgataaagatggttggcttcacactggagacgtcggatttatcgatgatgacgacgagcttttcattgtggatagattgaaagaactcatcaagtacaaaggatttcaagtggctccagctgagctagagtctctcctcataggtcatccagaaatcaatgatgttgctgtcgtcgccatgaaggaagaagatgctggtgaggttcctgttgcgtttgtggtgagatcgaaagattcaaatatatccgaagatgaaatcaagcaattcgtgtcaaaacaggttgtgttttataagagaatcaacaaagtgttcttcactgactctattcctaaagctccatcagggaagatattgaggaaggatctaagagcaagactagcaaatggattaatgaactaggttttatatgatccacgtatatgaatgcaatcttatcagaaaaatgaaacaaaatttcgttttgtgaacaaaggaattaaacttacacgtaaaagaataatatttgtgctttttcctttatgtgtatgtaatggataaatagttgtatcttttgtttggtgggaatgatgtaacctttccatattgtggcatattgctcgaatataa

SEQ ID NO: 91881 - protein, 556 aa, Arabidopsis thaliana
  peptide (1)..(556): Ceres Seq. ID no. 12729866
MTTQDVIVNDQNDQKQCSNDVIFRSRLPDIYIPNHLPLHDYIFENISEFAAKPCLINGPTGEVYTYADVHVTSRKLAAGLHNLGVKQHDVVMILLPNSPEVVLTFLAASFIGAITTSANPFFTPAEISKQAKASAAKLIVTQSRYVDKIKNLQNDGVLIVTTDSDAIPENCLRFSELTQSEEPRVDSIPEKISPEDVVALPFSSGTTGLPKGVMLTHKGLVTSVAQQVDGENPNLYFNRDDVILCVLPMFHIYALNSIMLCSLRVGATILIMPKFEITLLLEQIQRCKVTVAMVVPPIVLAIAKSPETEKYDLSSVRMVKSGAAPLGKELEDAISAKFPNAKLGQGYGMTEAGPVLAMSLGFAKEPFPVKSGACGTVVRNAEMKILDPDTGDSLPRNKPGEICIRGNQIMKGYLNDPLATASTIDKDGWLHTGDVGFIDDDDELFIVDRLKELIKYKGFQVAPAELESLLIGHPEINDVAVVAMKEEDAGEVPVAFVVRSKDSNISEDEIKQFVSKQVVFYKRINKVFFTDSIPKAPSGKILRKDLRARLANGLMN

SEQ ID NO: 91882 - protein, 465 aa, Arabidopsis thaliana
  peptide (1)..(465): Ceres Seq. ID no. 12729867
MILLPNSPEVVLTFLAASFIGAITTSANPFFTPAEISKQAKASAAKLIVTQSRYVDKIKNLQNDGVLIVTTDSDAIPENCLRFSELTQSEEPRVDSIPEKISPEDVVALPFSSGTTGLPKGVMLTHKGLVTSVAQQVDGENPNLYFNRDDVILCVLPMFHIYALNSIMLCSLRVGATILIMPKFEITLLLEQIQRCKVTVAMVVPPIVLAIAKSPETEKYDLSSVRMVKSGAAPLGKELEDAISAKFPNAKLGQGYGMTEAGPVLAMSLGFAKEPFPVKSGACGTVVRNAEMKILDPDTGDSLPRNKPGEICIRGNQIMKGYLNDPLATASTIDKDGWLHTGDVGFIDDDDELFIVDRLKELIKYKGFQVAPAELESLLIGHPEINDVAVVAMKEEDAGEVPVAFVVRSKDSNISEDEIKQFVSKQVVFYKRINKVFFTDSIPKAPSGKILRKDLRARLANGLMN

SEQ ID NO: 91883 - protein, 343 aa, Arabidopsis thaliana
  peptide (1)..(343): Ceres Seq. ID no. 12729868
MLTHKGLVTSVAQQVDGENPNLYFNRDDVILCVLPMFHIYALNSIMLCSLRVGATILIMPKFEITLLLEQIQRCKVTVAMVVPPIVLAIAKSPETEKYDLSSVRMVKSGAAPLGKELEDAISAKFPNAKLGQGYGMTEAGPVLAMSLGFAKEPFPVKSGACGTVVRNAEMKILDPDTGDSLPRNKPGEICIRGNQIMKGYLNDPLATASTIDKDGWLHTGDVGFIDDDDELFIVDRLKELIKYKGFQVAPAELESLLIGHPEINDVAVVAMKEEDAGEVPVAFVVRSKDSNISEDEIKQFVSKQVVFYKRINKVFFTDSIPKAPSGKILRKDLRARLANGLMN

SEQ ID NO: 91884 - DNA, 1889 bp, Arabidopsis thaliana
  misc_feature (1)..(1889): Ceres Seq. ID no. 12729881
  misc_feature (1)..(1889): Ortholog of  Ceres SEQ ID NO 13600220 as cited in SEQ ID NO 0
aacatagtcttccactttgttttgaactttttgaccaaaaacacactcgtgagcttataaaaaaaaatcaacaatgaagattcctctcttggggttacttttactaataagtcttgtcggctctccgacaagggctgaagaaggacctgtttgcccgaagaccgaaactcttagccgtgcaagttttccggagggctttatgtttggtaccgcaaccgcagcctttcaggtggaaggtgcagtaaatgaaggttgcagaggtccaagcctgtgggacatctacaccaagaaatttccacatagagttaagaatcacaatgctgacgaggccgtcgatttctaccatcgctacaaggaggatatccagttgatgaaaaagctgaacactgatggttttagactttctatttcgtggccaagaatatttcctcatgggaggatggagaaaggaataagcaaagaaggagttcaattttaccacgatcttattgatgagctccttaaaaatgacataacaccattagtaacggtttttcattgggatactcccgccgatttggaagatgaatacggtggctttttaagcgaacgtattgtgcctgattttgtggagtatgcaaacttcacgttccacgagtatggggacaaagtgaaaaactggattacgttcaacgagccatgggtctttagccgttcgggctacgacgttgggaagaaagcaccaggacgttgttctccttacgtcaaagagtttggaaagctttgtcaagatggacggtcaggattcgaaccttatgttgtcagtcacaatttactcgtgggtcatgctgaagctgttgatgctttccgaaaatgcgaaaagtgcaaaggtggtaaaatcggaatcgctcatagtccagcttggtttgaacccgaagatgtggaaggaggtcaagcgactgtaaaccgtgtgcttgatttcgtcattggctggcatttggatcctaccacgttcggggactatcctcagtctatgaaagacgcggttggatctcggttgccaagatttaccaaagcccaaaaggcaaaactgaaagattcgacagacttcgtgggaataaactattacacttccttctttgcaaaggctgaccagaaggttgatagtcggaacccgacttgggctacagatgctctagtcgaatttgaaccgaagactgtggatggatccattaaaattggtagccagcccaacactgctaagatggctgtctacgctaagggtttgaggaagctcatgaaatacattaaggacagatacaacagccctgagatcataatcactgagaatggctacggggaggaccttggcgataaagatacagatcttagcgttgctctcaacgaccacaacaggaaatactatctccagaggcatcttttggcactgaatgaagctatatgtgaagacaaggtgaatgttacatcgtatttcttgtggtctttaatggacaacttcgagtggcaagacgggtacacagctaggttcggagtttactacatagacttcaagaacaacttgactcgtatggagaaagaatccgcaaaatggctttctgaattcctcaaaccaggcctgaaaccatctaagtcctcaaagctacacgaggagctctgagtcgagtttctttgcaagatcttaaagcaaaagcttcaatcccgcggacaataaaagaaggacgacgagtttgtctttggtttcttcttatgttgtatagtttctgctgcagtgtagttaagacatgtttagaataaggaaatgggttactatgtacccacatatatgtatccaaaatatgtacagtgttgttgttgcctctaaattcgaaatccaaagctttgatttatgc

SEQ ID NO: 91885 - protein, 527 aa, Arabidopsis thaliana
  peptide (1)..(527): Ceres Seq. ID no. 12729882
MKIPLLGLLLLISLVGSPTRAEEGPVCPKTETLSRASFPEGFMFGTATAAFQVEGAVNEGCRGPSLWDIYTKKFPHRVKNHNADEAVDFYHRYKEDIQLMKKLNTDGFRLSISWPRIFPHGRMEKGISKEGVQFYHDLIDELLKNDITPLVTVFHWDTPADLEDEYGGFLSERIVPDFVEYANFTFHEYGDKVKNWITFNEPWVFSRSGYDVGKKAPGRCSPYVKEFGKLCQDGRSGFEPYVVSHNLLVGHAEAVDAFRKCEKCKGGKIGIAHSPAWFEPEDVEGGQATVNRVLDFVIGWHLDPTTFGDYPQSMKDAVGSRLPRFTKAQKAKLKDSTDFVGINYYTSFFAKADQKVDSRNPTWATDALVEFEPKTVDGSIKIGSQPNTAKMAVYAKGLRKLMKYIKDRYNSPEIIITENGYGEDLGDKDTDLSVALNDHNRKYYLQRHLLALNEAICEDKVNVTSYFLWSLMDNFEWQDGYTARFGVYYIDFKNNLTRMEKESAKWLSEFLKPGLKPSKSSKLHEEL

SEQ ID NO: 91886 - protein, 485 aa, Arabidopsis thaliana
  peptide (1)..(485): Ceres Seq. ID no. 12729883
MFGTATAAFQVEGAVNEGCRGPSLWDIYTKKFPHRVKNHNADEAVDFYHRYKEDIQLMKKLNTDGFRLSISWPRIFPHGRMEKGISKEGVQFYHDLIDELLKNDITPLVTVFHWDTPADLEDEYGGFLSERIVPDFVEYANFTFHEYGDKVKNWITFNEPWVFSRSGYDVGKKAPGRCSPYVKEFGKLCQDGRSGFEPYVVSHNLLVGHAEAVDAFRKCEKCKGGKIGIAHSPAWFEPEDVEGGQATVNRVLDFVIGWHLDPTTFGDYPQSMKDAVGSRLPRFTKAQKAKLKDSTDFVGINYYTSFFAKADQKVDSRNPTWATDALVEFEPKTVDGSIKIGSQPNTAKMAVYAKGLRKLMKYIKDRYNSPEIIITENGYGEDLGDKDTDLSVALNDHNRKYYLQRHLLALNEAICEDKVNVTSYFLWSLMDNFEWQDGYTARFGVYYIDFKNNLTRMEKESAKWLSEFLKPGLKPSKSSKLHEEL

SEQ ID NO: 91887 - protein, 428 aa, Arabidopsis thaliana
  peptide (1)..(428): Ceres Seq. ID no. 12729884
MKKLNTDGFRLSISWPRIFPHGRMEKGISKEGVQFYHDLIDELLKNDITPLVTVFHWDTPADLEDEYGGFLSERIVPDFVEYANFTFHEYGDKVKNWITFNEPWVFSRSGYDVGKKAPGRCSPYVKEFGKLCQDGRSGFEPYVVSHNLLVGHAEAVDAFRKCEKCKGGKIGIAHSPAWFEPEDVEGGQATVNRVLDFVIGWHLDPTTFGDYPQSMKDAVGSRLPRFTKAQKAKLKDSTDFVGINYYTSFFAKADQKVDSRNPTWATDALVEFEPKTVDGSIKIGSQPNTAKMAVYAKGLRKLMKYIKDRYNSPEIIITENGYGEDLGDKDTDLSVALNDHNRKYYLQRHLLALNEAICEDKVNVTSYFLWSLMDNFEWQDGYTARFGVYYIDFKNNLTRMEKESAKWLSEFLKPGLKPSKSSKLHEEL

SEQ ID NO: 91888 - DNA, 2271 bp, Arabidopsis thaliana
  misc_feature (1)..(2271): Ceres Seq. ID no. 12729920
  misc_feature (1)..(2271): Ortholog of  Ceres SEQ ID NO 15169142 as cited in SEQ ID NO 58748
atggcgacactaaccgatatcggagtcgcagcaacgatcaatattctaaccgcatttgctttcttcattgcctttgcgatacttagacttcaaccagttaacgacagagtctatttccctaaatggtatctcaagggtttaagaagtagtcctataaaaacaggtggctttgctagcaagtttgtcaatttggattttcgatcttacatcagattcttgaattggatgcctcaagctttgagaatgcctgagcctgaacttattgatcatgctggtttggattctgttgtctatctcaggatttacttactcgggttgaagatcttttttcctatagcatgtattgctttcactgtaatggtaccggttaattggactaactcgacgttggatcagttaaagaatctaacttttagtgatattgataaactctctatatcgaatataccaactggatcatccaggttttgggtgcatttgtgtatggcttatgttattaccttttggacttgctttgtcctacaacgagagtacaagcatattgcttccatgaggctacagtttcttgcttctgagcataggagacctgaccagtttactgttcttgtaaggaacattcctccagatcctgatgaatcagtaagtgagctcgttgagcatttctttaaggtcaaccatccagactactacctcacttaccaggcggtctacaacgcaaacaagctgtcggaactggtacagaagaggatgaaattgcagaattggcttgattactatcaaaacaaacactctaggaatccatctaaaaggcctttaataaagattggtttccttggctgttggggtgaagaagttgatgcaattgatcactacatagaaaaaatcgagggtctaacgagaaaaataagtgaagagaaagagacagtaatgagcagcacaaaatcactcgtacctgcagcttttgtatccttcaaaaagcgttggggcgctgttgtttgctctcaaactcaacagtctcgaaacccgacagagtggctaaccgagtgggctccagagccgcgagacatatactgggacaatctagcattaccatatgttcagctcacaatccggagactagtaatagctgtagctttcttcttcctcactttcttcttcatgatccctatagctttcgtacagacactcgccaatatcgaaggcatcgaaaaggctgttccgttcttgaaaccgcttatcgaagtgaaaactgtaaagtcatttatccaaggttttcttccgggtatcgcattgaagatattcctcattgtcctcccaagtatactaatgctaatgtcgaagttcgaaggcttcataagcaaatcttcactagaaagaaggtgtgcaagcagatactacatgttccagttcatcaacgttttcctctgtagcataatcgcgggaactgcgcttcaacaacttgacagcttcctaaaccaatctgcaaccgaaataccgaagacaattggtgtctcgataccaatgaaagccactttctttatcacctacataatggtagacggatgggctggtgttgctggagagatactgaggttaaagccattgataatatatcatctcaagaacttcttccttgtgaaaacagagaaggacagagaagaagcaatggatcctggaaccataggtttcaatactggtgaacctcagatacaactctacttcattcttggtctagtttacgccgctgttagccccattctccttccttttatcctcgtcttcttcgccttagcttacgtggtttaccgtcatcagattataaatgtgtataaccaagagtatgagagtgctgcagcgttctggccagatgttcatagacgtgtagtgattgcactgatcgtatctcagcttcttttgatgggattgcttagcacgaaaaaagctgctcgttcgactccattgcttttcatacttcctgtgttaaccattggattccacaaattctgtcaaggacgttaccaacctatatttgtcacataccctttacaggatgcaatggttaaagatacgttggaacgcatgagagaaccgaatttaaacttgaaaacgtttcttcaaaacgcgtatgcacatccggtgtttaaagctgcagataatctagctaatgagatggttgtggaggagccagcgcccgataagacgccggatttagtggcgactaaacgtggctcaaggaggtttaatagcggctctgctgaaacctttacttag

SEQ ID NO: 91889 - protein, 756 aa, Arabidopsis thaliana
  peptide (1)..(756): Ceres Seq. ID no. 12729921
MATLTDIGVAATINILTAFAFFIAFAILRLQPVNDRVYFPKWYLKGLRSSPIKTGGFASKFVNLDFRSYIRFLNWMPQALRMPEPELIDHAGLDSVVYLRIYLLGLKIFFPIACIAFTVMVPVNWTNSTLDQLKNLTFSDIDKLSISNIPTGSSRFWVHLCMAYVITFWTCFVLQREYKHIASMRLQFLASEHRRPDQFTVLVRNIPPDPDESVSELVEHFFKVNHPDYYLTYQAVYNANKLSELVQKRMKLQNWLDYYQNKHSRNPSKRPLIKIGFLGCWGEEVDAIDHYIEKIEGLTRKISEEKETVMSSTKSLVPAAFVSFKKRWGAVVCSQTQQSRNPTEWLTEWAPEPRDIYWDNLALPYVQLTIRRLVIAVAFFFLTFFFMIPIAFVQTLANIEGIEKAVPFLKPLIEVKTVKSFIQGFLPGIALKIFLIVLPSILMLMSKFEGFISKSSLERRCASRYYMFQFINVFLCSIIAGTALQQLDSFLNQSATEIPKTIGVSIPMKATFFITYIMVDGWAGVAGEILRLKPLIIYHLKNFFLVKTEKDREEAMDPGTIGFNTGEPQIQLYFILGLVYAAVSPILLPFILVFFALAYVVYRHQIINVYNQEYESAAAFWPDVHRRVVIALIVSQLLLMGLLSTKKAARSTPLLFILPVLTIGFHKFCQGRYQPIFVTYPLQDAMVKDTLERMREPNLNLKTFLQNAYAHPVFKAADNLANEMVVEEPAPDKTPDLVATKRGSRRFNSGSAETFT

SEQ ID NO: 91890 - protein, 681 aa, Arabidopsis thaliana
  peptide (1)..(681): Ceres Seq. ID no. 12729922
MPQALRMPEPELIDHAGLDSVVYLRIYLLGLKIFFPIACIAFTVMVPVNWTNSTLDQLKNLTFSDIDKLSISNIPTGSSRFWVHLCMAYVITFWTCFVLQREYKHIASMRLQFLASEHRRPDQFTVLVRNIPPDPDESVSELVEHFFKVNHPDYYLTYQAVYNANKLSELVQKRMKLQNWLDYYQNKHSRNPSKRPLIKIGFLGCWGEEVDAIDHYIEKIEGLTRKISEEKETVMSSTKSLVPAAFVSFKKRWGAVVCSQTQQSRNPTEWLTEWAPEPRDIYWDNLALPYVQLTIRRLVIAVAFFFLTFFFMIPIAFVQTLANIEGIEKAVPFLKPLIEVKTVKSFIQGFLPGIALKIFLIVLPSILMLMSKFEGFISKSSLERRCASRYYMFQFINVFLCSIIAGTALQQLDSFLNQSATEIPKTIGVSIPMKATFFITYIMVDGWAGVAGEILRLKPLIIYHLKNFFLVKTEKDREEAMDPGTIGFNTGEPQIQLYFILGLVYAAVSPILLPFILVFFALAYVVYRHQIINVYNQEYESAAAFWPDVHRRVVIALIVSQLLLMGLLSTKKAARSTPLLFILPVLTIGFHKFCQGRYQPIFVTYPLQDAMVKDTLERMREPNLNLKTFLQNAYAHPVFKAADNLANEMVVEEPAPDKTPDLVATKRGSRRFNSGSAETFT

SEQ ID NO: 91891 - protein, 675 aa, Arabidopsis thaliana
  peptide (1)..(675): Ceres Seq. ID no. 12729923
MPEPELIDHAGLDSVVYLRIYLLGLKIFFPIACIAFTVMVPVNWTNSTLDQLKNLTFSDIDKLSISNIPTGSSRFWVHLCMAYVITFWTCFVLQREYKHIASMRLQFLASEHRRPDQFTVLVRNIPPDPDESVSELVEHFFKVNHPDYYLTYQAVYNANKLSELVQKRMKLQNWLDYYQNKHSRNPSKRPLIKIGFLGCWGEEVDAIDHYIEKIEGLTRKISEEKETVMSSTKSLVPAAFVSFKKRWGAVVCSQTQQSRNPTEWLTEWAPEPRDIYWDNLALPYVQLTIRRLVIAVAFFFLTFFFMIPIAFVQTLANIEGIEKAVPFLKPLIEVKTVKSFIQGFLPGIALKIFLIVLPSILMLMSKFEGFISKSSLERRCASRYYMFQFINVFLCSIIAGTALQQLDSFLNQSATEIPKTIGVSIPMKATFFITYIMVDGWAGVAGEILRLKPLIIYHLKNFFLVKTEKDREEAMDPGTIGFNTGEPQIQLYFILGLVYAAVSPILLPFILVFFALAYVVYRHQIINVYNQEYESAAAFWPDVHRRVVIALIVSQLLLMGLLSTKKAARSTPLLFILPVLTIGFHKFCQGRYQPIFVTYPLQDAMVKDTLERMREPNLNLKTFLQNAYAHPVFKAADNLANEMVVEEPAPDKTPDLVATKRGSRRFNSGSAETFT

SEQ ID NO: 91892 - DNA, 1614 bp, Arabidopsis thaliana
  misc_feature (1)..(1614): Ceres Seq. ID no. 12729924
  misc_feature (1)..(1614): Ortholog of  Ceres SEQ ID NO 15169474 as cited in SEQ ID NO 66139
  misc_feature (1)..(1614): Ortholog of  Ceres SEQ ID NO 13584744 as cited in SEQ ID NO 69137
atgggctctagggttcttgtacctttcccttgcgaatgtcaacctggtgatttcctagggcacaatttcagctacagtgttcgacaggaagatacttacgaaagagtcgcgattagtaattacgcgaatctcacgacgatggagtcgttacaggcgaggaatccttttccggcgactaacatacctctctctgcgacgcttaatgtattggtgaattgttcttgtggtgatgagagtgtttcgaaagattttggtttgtttgttacgtatccgcttcgtcctgaagacagtctcagttctattgcgagatcttccggtgtatcggcggatattctgcagagatataatcccggtgttaattttaactccgggaatggaatcgtttatgtgcctggaagagatccaaatggtgcatttccaccattcaaatcaagtaaacaagatggtgttggtgctggagttattgctggtatagttataggagtgattgtggctttgttgttgatcttgtttatcgtatattatgcttaccggaagaataagtcgaagggtgattcgttttcttcttctattccgttgtctactaaggctgatcatgcttcttctactagtctccaaagtggaggtttgggtggtgccggagtgtctcctggcattgctgccataagcgtggacaaatctgttgagttttcgttggaggaactagcaaaggctactgataatttcaatttgtcttttaagattgggcaaggtggttttggggctgtttactatgcagagctgagaggagaaaaagctgcgattaagaagatggacatggaggcatcgaaacagttcttggcggaactaaaagtcttaacgcgtgtacatcatgtcaacctggttcgcctgattggatattgtgttgagggatcacttttcttggtgtatgaatatgttgagaatggtaaccttggacaacatttacatgggtcaggacgagaaccattaccgtggactaagagagtgcagattgcactagactcagctagaggtttagaatatatccacgagcacacggttccagtttatgtccatagggacattaaatctgccaatattttgatagaccagaaattccgagcaaaggtagcagatttcgggttaacaaaactgacagaagttggaggttcagcaactcggggtgcaatgggtacatttggttacatggcaccagagactgtttatggagaagtgtctgcaaaagtagatgtatatgcatttggagttgtcctttacgaattgatttctgcgaaaggtgcggttgtcaaaatgacagaagccgttggtgaatttagaggccttgttggtgtgttcgaagaatcattcaaggaaaccgacaaagaagaagcactacgcaagattatagacccgaggctcggtgatagttacccgtttgattcggtatacaagatggcggaattagggaaagcatgtacacaagagaatgcgcagctacgtccgagtatgagatacattgtggttgctttatccactctcttttcgtctaccggaaattgggatgttggaaacttccaaaacgaagatttagtcagtcttatgtccggccggtag

SEQ ID NO: 91893 - protein, 537 aa, Arabidopsis thaliana; identical to SEQ ID NO: 38774
  peptide (1)..(537): Ceres Seq. ID no. 12729925

SEQ ID NO: 91894 - protein, 491 aa, Arabidopsis thaliana; identical to SEQ ID NO: 38775
  peptide (1)..(491): Ceres Seq. ID no. 12729926

SEQ ID NO: 91895 - DNA, 1641 bp, Arabidopsis thaliana
  misc_feature (1)..(1641): Ceres Seq. ID no. 12729927
  misc_feature (1)..(1641): Ortholog of  Ceres SEQ ID NO 13599322 as cited in SEQ ID NO 0
atgatcaaacagatatttgggaaattacctagaaagccttccaaatcattgcagaatgactccaatggtgaaggaggtgttaataattcttattatgcttcgaattcgagtactactagtatctctaaaccttcttcaacatcttcgaaatcatcatcagcctcgggttcgcgtgtagctaatggaactcttgctcctaactcaatgagctctaataggaatactaatcaagggaagaaaccattgggaggagatgctgttgtacaagctggaccgtttccgtcttctggtggggtttatgaggctttgcctagctttagagatgttcctatatcggagaaaccgaatctctttatcgggaagttgagtatgtgctgtgttgtttttgactttagtgatccgtctaagaaccttaaggagaaagagattaagaggcagacattgcttgagcttgttgattatgttgcatcagttggttttaagtttaacgatgtttcgatgcaagagttaacgaagatggtagcggttaatctgtttagaacttttccttctgcgaatcacgagagtaaaattcttgaaatacatgatatggatgatgaagaaccttctttggagccagcttggcctcatgttcaagttgtgtatgagattcttctcagattcgtggcttctcccatgactgatgcaaagcttgccaagagatatattgaccattcttttgtcttgaagctcttagacttgtttgattctgaagatcaaagagagagggaatatctaaaaactattctgcatcgggtgtacgggaagttcatggtgcatcgaccttacatcagaaaggcgataaacaatatcttctacagattcatatccgagactgaaaagcataatggcattgcggagttgctagagattcttggaagtataattaatggttttgctttgcctttaaaagaagagcacaagctcttccttttgcgagccttgattcctctccacaagcctaaatgttcatcagtctatcaccaacagctttcgtattgcattgttcagtttgtagaaaaggacttcaagctcgctgataccgttattagaggtcttttaaaatattggcctgtgactaacagctcaaaggaagttatgtttcttggagagttagaagaagtcttggaagcaactcaagccgctgagtttcaacgttgtatggttccattatcccgacaaattgctcgatgcctcaacagttcacatttccaggttgctgaaagagcattgtttctatggaacaacgatcacataagaaacctgatcactcagaaccataaagtgataatgcctatagtcttcccagctcttgagagaaacacgcgtggacattggaaccaagcagttcaaagtctgactataaacgtgaggaaagtattatgcgagattgaccaagttcttttcgacgagtgtttagccaaattccaagtagaagaagtgaataaaacagaggttaaagcgaaacgggaaaggacatggcaacggttagaagatttagctacttcaaagaccgttgtaaccaacgaggcagtactggttccaagatttgtgtcctcagtcaatcttactacaagcagctctgagtccacagggtcgtag

SEQ ID NO: 91896 - protein, 546 aa, Arabidopsis thaliana
  peptide (1)..(546): Ceres Seq. ID no. 12729928
MIKQIFGKLPRKPSKSLQNDSNGEGGVNNSYYASNSSTTSISKPSSTSSKSSSASGSRVANGTLAPNSMSSNRNTNQGKKPLGGDAVVQAGPFPSSGGVYEALPSFRDVPISEKPNLFIGKLSMCCVVFDFSDPSKNLKEKEIKRQTLLELVDYVASVGFKFNDVSMQELTKMVAVNLFRTFPSANHESKILEIHDMDDEEPSLEPAWPHVQVVYEILLRFVASPMTDAKLAKRYIDHSFVLKLLDLFDSEDQREREYLKTILHRVYGKFMVHRPYIRKAINNIFYRFISETEKHNGIAELLEILGSIINGFALPLKEEHKLFLLRALIPLHKPKCSSVYHQQLSYCIVQFVEKDFKLADTVIRGLLKYWPVTNSSKEVMFLGELEEVLEATQAAEFQRCMVPLSRQIARCLNSSHFQVAERALFLWNNDHIRNLITQNHKVIMPIVFPALERNTRGHWNQAVQSLTINVRKVLCEIDQVLFDECLAKFQVEEVNKTEVKAKRERTWQRLEDLATSKTVVTNEAVLVPRFVSSVNLTTSSSESTGS

SEQ ID NO: 91897 - protein, 478 aa, Arabidopsis thaliana
  peptide (1)..(478): Ceres Seq. ID no. 12729929
MSSNRNTNQGKKPLGGDAVVQAGPFPSSGGVYEALPSFRDVPISEKPNLFIGKLSMCCVVFDFSDPSKNLKEKEIKRQTLLELVDYVASVGFKFNDVSMQELTKMVAVNLFRTFPSANHESKILEIHDMDDEEPSLEPAWPHVQVVYEILLRFVASPMTDAKLAKRYIDHSFVLKLLDLFDSEDQREREYLKTILHRVYGKFMVHRPYIRKAINNIFYRFISETEKHNGIAELLEILGSIINGFALPLKEEHKLFLLRALIPLHKPKCSSVYHQQLSYCIVQFVEKDFKLADTVIRGLLKYWPVTNSSKEVMFLGELEEVLEATQAAEFQRCMVPLSRQIARCLNSSHFQVAERALFLWNNDHIRNLITQNHKVIMPIVFPALERNTRGHWNQAVQSLTINVRKVLCEIDQVLFDECLAKFQVEEVNKTEVKAKRERTWQRLEDLATSKTVVTNEAVLVPRFVSSVNLTTSSSESTGS

SEQ ID NO: 91898 - protein, 423 aa, Arabidopsis thaliana
  peptide (1)..(423): Ceres Seq. ID no. 12729930
MCCVVFDFSDPSKNLKEKEIKRQTLLELVDYVASVGFKFNDVSMQELTKMVAVNLFRTFPSANHESKILEIHDMDDEEPSLEPAWPHVQVVYEILLRFVASPMTDAKLAKRYIDHSFVLKLLDLFDSEDQREREYLKTILHRVYGKFMVHRPYIRKAINNIFYRFISETEKHNGIAELLEILGSIINGFALPLKEEHKLFLLRALIPLHKPKCSSVYHQQLSYCIVQFVEKDFKLADTVIRGLLKYWPVTNSSKEVMFLGELEEVLEATQAAEFQRCMVPLSRQIARCLNSSHFQVAERALFLWNNDHIRNLITQNHKVIMPIVFPALERNTRGHWNQAVQSLTINVRKVLCEIDQVLFDECLAKFQVEEVNKTEVKAKRERTWQRLEDLATSKTVVTNEAVLVPRFVSSVNLTTSSSESTGS

SEQ ID NO: 91899 - DNA, 633 bp, Arabidopsis thaliana
  misc_feature (1)..(633): Ceres Seq. ID no. 12729960
  misc_feature (1)..(633): Ortholog of  Ceres SEQ ID NO 15171175 as cited in SEQ ID NO 57476
  misc_feature (1)..(633): Ortholog of  Ceres SEQ ID NO 15178436 as cited in SEQ ID NO 57919
  misc_feature (1)..(633): Ortholog of  Ceres SEQ ID NO 13655808 as cited in SEQ ID NO 64901
atgttaaccgcagccggagacgatgaactggacccggtcgtgggaccagaatcggcaacggaagcagccactccaagagtgctgactataatctcccatgtgatggagaagctcgtggcacgaaacgagtggttagctaagcaaactaagggatttgggaagagcttggaggcgtttcacggcgtgagagcgccgagcataagtatagctaaataccttgagaggatatataagtacacaaaatgtagcccggcatgtttcgttgttgggtatgtgtacatagaccggttggctcataagcatcctggttctttggttgtctccttgaatgttcatagactcctcgtcacttgtgtcatgattgctgccaagatactagatgacgtgcactacaacaacgagttctatgctcgggttggaggcgtaagcaatgcagacttgaacaaaatggagttggagcttctctttcttcttgactttagagttactgtgagttttagagttttcgagagctattgctttcacctcgaaaaagagatgcaactaaacgacgccgtttcttccctcaaagatattcaaccaatgcaagaaagtctctctccagcatctactttatcatctttatatgtttga

SEQ ID NO: 91900 - protein, 210 aa, Arabidopsis thaliana
  peptide (1)..(210): Ceres Seq. ID no. 12729961
MLTAAGDDELDPVVGPESATEAATPRVLTIISHVMEKLVARNEWLAKQTKGFGKSLEAFHGVRAPSISIAKYLERIYKYTKCSPACFVVGYVYIDRLAHKHPGSLVVSLNVHRLLVTCVMIAAKILDDVHYNNEFYARVGGVSNADLNKMELELLFLLDFRVTVSFRVFESYCFHLEKEMQLNDAVSSLKDIQPMQESLSPASTLSSLYV

SEQ ID NO: 91901 - protein, 176 aa, Arabidopsis thaliana
  peptide (1)..(176): Ceres Seq. ID no. 12729962
MEKLVARNEWLAKQTKGFGKSLEAFHGVRAPSISIAKYLERIYKYTKCSPACFVVGYVYIDRLAHKHPGSLVVSLNVHRLLVTCVMIAAKILDDVHYNNEFYARVGGVSNADLNKMELELLFLLDFRVTVSFRVFESYCFHLEKEMQLNDAVSSLKDIQPMQESLSPASTLSSLYV

SEQ ID NO: 91902 - DNA, 837 bp, Arabidopsis thaliana
  misc_feature (1)..(837): Ceres Seq. ID no. 12729971
  misc_feature (1)..(837): Ortholog of  Ceres SEQ ID NO 15178924 as cited in SEQ ID NO 1050
  misc_feature (1)..(837): Ortholog of  Ceres SEQ ID NO 13661768 as cited in SEQ ID NO 61427
atgtactctttatcttctgtatcaaaacaccttattttggtccatatattggccctggtggccacacaactgcttctcatacgtagcgtttcgtctttgaacatgaccaattcctatctgaaccacaaatgctttgtcagtcaagggaaatacaagccaggaagtgcacatgagaaaagcctagaagctatcatccattccatctcggttggtgaaaatgttaatagcggttacgacatgatgtcatttggtgacggtccagatctagtctgcgttgtcctccagtgccgtggtgactcctacgggtccaagtgccgctcctgctttgcctcagccatggccgggcttcgtaggagatgtccgagatataaagggggaataatatggttcgaccaatgtcttctcgagatttcttcgatcgataatgtagggcagctcaattacggtgatagtttctgtatgtccaacgcgaagaatgtgggagatgatccattttctttcatactgaagtgggatactctcttcgacaatatatcacgtatagctatcactgaaaagaataaaaacttaaaagataccaacaaaccggcactatacggggcgggggagaagaggctcgggacaaagaagaagatgtacggaatggttcagtgtacagatgacttatctgttaaggcttgtgaggagtgtctggttgctaatatcttgaagtttcaaaattgctggaaaagtggtaaacgcggtgcgagggttttggataggagctgtaactttaggtatgagctttacccttttgttaatgccaagactggtcctaattcttattttaagagttaa

SEQ ID NO: 91903 - protein, 278 aa, Arabidopsis thaliana
  peptide (1)..(278): Ceres Seq. ID no. 12729972
MYSLSSVSKHLILVHILALVATQLLLIRSVSSLNMTNSYLNHKCFVSQGKYKPGSAHEKSLEAIIHSISVGENVNSGYDMMSFGDGPDLVCVVLQCRGDSYGSKCRSCFASAMAGLRRRCPRYKGGIIWFDQCLLEISSIDNVGQLNYGDSFCMSNAKNVGDDPFSFILKWDTLFDNISRIAITEKNKNLKDTNKPALYGAGEKRLGTKKKMYGMVQCTDDLSVKACEECLVANILKFQNCWKSGKRGARVLDRSCNFRYELYPFVNAKTGPNSYFKS

SEQ ID NO: 91904 - protein, 244 aa, Arabidopsis thaliana
  peptide (1)..(244): Ceres Seq. ID no. 12729973
MTNSYLNHKCFVSQGKYKPGSAHEKSLEAIIHSISVGENVNSGYDMMSFGDGPDLVCVVLQCRGDSYGSKCRSCFASAMAGLRRRCPRYKGGIIWFDQCLLEISSIDNVGQLNYGDSFCMSNAKNVGDDPFSFILKWDTLFDNISRIAITEKNKNLKDTNKPALYGAGEKRLGTKKKMYGMVQCTDDLSVKACEECLVANILKFQNCWKSGKRGARVLDRSCNFRYELYPFVNAKTGPNSYFKS

SEQ ID NO: 91905 - protein, 199 aa, Arabidopsis thaliana
  peptide (1)..(199): Ceres Seq. ID no. 12729974
MMSFGDGPDLVCVVLQCRGDSYGSKCRSCFASAMAGLRRRCPRYKGGIIWFDQCLLEISSIDNVGQLNYGDSFCMSNAKNVGDDPFSFILKWDTLFDNISRIAITEKNKNLKDTNKPALYGAGEKRLGTKKKMYGMVQCTDDLSVKACEECLVANILKFQNCWKSGKRGARVLDRSCNFRYELYPFVNAKTGPNSYFKS

SEQ ID NO: 91906 - DNA, 789 bp, Arabidopsis thaliana
  misc_feature (1)..(789): Ceres Seq. ID no. 12729983
  misc_feature (1)..(789): Ortholog of  Ceres SEQ ID NO 13661768 as cited in SEQ ID NO 61427
atgtctttatcctcttctgtaacgaaacatcttatttcggcctccatattagccatagtggcaatgcaactcccttctgtacacagtgttttatccctaaacgagaccaatgcatatctgcaccacatatgcattaacggtgaagggacattcaagtcggggagtccatacgagaaagaaatcaaacaactcattgattttttgtcatcgtttatcaaagactatagttttgtccacggcgttagtggtattggtcccgatgatatcaacgtcaagttccagtgccgaggcgataccttacaagccaagtgccgctcttgcctcgccaccgccttctccgagattcgtagtaaatgtccgaacaacaaagggagaataatatggtacgataactgtcatctcgacctttcgtcaatctatacatatggccagatcgattacaagaacaatttctatatgtacaacgcgaaggatgtgaggggcgataaaaagtctttctacaagaacatgaaggcattccttcataagctaaaggcgaaagcaagtagtaaggaaaacaaaccctacgtgaaagactatatgtatgcagcaggaagggaaagtcttgggacggtgaaattgtacgcaatggtgcagtgtacgcaggacttatcgcttaaaaattgcactgtgtgtttggactggattatgacgaagcttcccgaatgctgcaatggtaaacaaggaggaagagttttgagtccaagctgtaattttaggtatgagctatatccttttgtagaaaattaa

SEQ ID NO: 91907 - protein, 262 aa, Arabidopsis thaliana
  peptide (1)..(262): Ceres Seq. ID no. 12729984
MSLSSSVTKHLISASILAIVAMQLPSVHSVLSLNETNAYLHHICINGEGTFKSGSPYEKEIKQLIDFLSSFIKDYSFVHGVSGIGPDDINVKFQCRGDTLQAKCRSCLATAFSEIRSKCPNNKGRIIWYDNCHLDLSSIYTYGQIDYKNNFYMYNAKDVRGDKKSFYKNMKAFLHKLKAKASSKENKPYVKDYMYAAGRESLGTVKLYAMVQCTQDLSLKNCTVCLDWIMTKLPECCNGKQGGRVLSPSCNFRYELYPFVEN

SEQ ID NO: 91908 - protein, 241 aa, Arabidopsis thaliana
  peptide (1)..(241): Ceres Seq. ID no. 12729985
MQLPSVHSVLSLNETNAYLHHICINGEGTFKSGSPYEKEIKQLIDFLSSFIKDYSFVHGVSGIGPDDINVKFQCRGDTLQAKCRSCLATAFSEIRSKCPNNKGRIIWYDNCHLDLSSIYTYGQIDYKNNFYMYNAKDVRGDKKSFYKNMKAFLHKLKAKASSKENKPYVKDYMYAAGRESLGTVKLYAMVQCTQDLSLKNCTVCLDWIMTKLPECCNGKQGGRVLSPSCNFRYELYPFVEN

SEQ ID NO: 91909 - DNA, 795 bp, Arabidopsis thaliana
  misc_feature (1)..(795): Ceres Seq. ID no. 12729986
  misc_feature (1)..(795): Ortholog of  Ceres SEQ ID NO 13661768 as cited in SEQ ID NO 61427
  misc_feature (1)..(795): Ortholog of  Ceres SEQ ID NO 15179176 as cited in SEQ ID NO 0
atgtcttcaaatatttttggatcggtccctattttggtcgtggtggctatacaacttcttcttgtacacaatgtttcttcccagaacgttaccaatgactatttgaaccaccaatgcaacaacacccaagggagatacacgcatgggagtacgtttgagaagaacctcaaccaagttcttcataacatctctaacctcgatcttagatacggttacgcctacgtctctaatgttgtggcttacaaagttagcaaggatcccaacattgtcttcgttttgctccagtgccgcggtgactcctttgggtccaaatgccactcctgcctcagcacagccgtctctgggcttcgtgagagatgtccaggaaacagaggagcaacaatatggtacgaccaatgtcttttggagatttcttcggtggattccgaggggaggatccattacaaacgtatgttctatatgcaaaacccgacgaacgtcaccaacgatcccaaacggttcgaagataaaagaagggatctcctccacaagctaatgctggaagccaccaaggatagcaaggaaaacggcgccaagggactgttgtacgcagtgggtgagatgaggattggaagaaataagatgtatgcaatggtgcagtgtacgcaagacttatggcagactggttgccatgtgtgtctagaatggattacgcagatgaaatatggagagttcttctaccgtaaaccaggagggagagtttgtggtaggagttgtagctttaggtatgagctttacccttttcttagaaggtaa

SEQ ID NO: 91910 - protein, 264 aa, Arabidopsis thaliana
  peptide (1)..(264): Ceres Seq. ID no. 12729987
MSSNIFGSVPILVVVAIQLLLVHNVSSQNVTNDYLNHQCNNTQGRYTHGSTFEKNLNQVLHNISNLDLRYGYAYVSNVVAYKVSKDPNIVFVLLQCRGDSFGSKCHSCLSTAVSGLRERCPGNRGATIWYDQCLLEISSVDSEGRIHYKRMFYMQNPTNVTNDPKRFEDKRRDLLHKLMLEATKDSKENGAKGLLYAVGEMRIGRNKMYAMVQCTQDLWQTGCHVCLEWITQMKYGEFFYRKPGGRVCGRSCSFRYELYPFLRR

SEQ ID NO: 91911 - DNA, 771 bp, Arabidopsis thaliana
  misc_feature (1)..(771): Ceres Seq. ID no. 12729988
  misc_feature (1)..(771): Ortholog of  Ceres SEQ ID NO 13661768 as cited in SEQ ID NO 61427
  misc_feature (1)..(771): Ortholog of  Ceres SEQ ID NO 15179176 as cited in SEQ ID NO 0
atgtcttcagtttttggatctgtccatatcttggccatgatagccatacaactcctccttatacacagtgtttcgtctctgaaccttacaaatgcgtatctgcaccacaaatgcagcaacactcaaggaaaatataagcaggggagtgcgttcgagaaaaatctcaacttagtcctcagtaccatcacctcgattggaaattttcgtgacggtttccgctacaccgaagaaggtgaggatcccaataacgtctttgtcatgttccagtgtcgcggcgactcctactggtccaagtgccccccttgcattagcaccgctgtctctgggcttcgtaggagatgtccaagaaataagggagcaataatatggtatgaccaatgtcttttaaagatatcttcagtcgcctccttcaataagatagattatgagaacgatttctatttgtccaacccaaaaaacatgagtgatcgggagttgttcaacaaggagacgtcggctctcctggagaagctggcaaataaagcctccgatagaaacaacttggatggtaaacaattggtgttgtacgcagcaggggagaagagaattgggacaaagaaggtgtctgcaatggtgcagtgtacgaaagacttaatatttacaaagtgctttgagtgtttggaagggattttgaggaagtttccagagtgttgtgacggtaaacaaggagggagagttttgggtacgagctgtaactttaggtatgagttatatccttttcttagaaactaa

SEQ ID NO: 91912 - protein, 256 aa, Arabidopsis thaliana; identical to SEQ ID NO: 72354
  peptide (1)..(256): Ceres Seq. ID no. 12729989

SEQ ID NO: 91913 - protein, 244 aa, Arabidopsis thaliana; identical to SEQ ID NO: 72355
  peptide (1)..(244): Ceres Seq. ID no. 12729990

SEQ ID NO: 91914 - protein, 170 aa, Arabidopsis thaliana; identical to SEQ ID NO: 72356
  peptide (1)..(170): Ceres Seq. ID no. 12729991

SEQ ID NO: 91915 - DNA, 822 bp, Arabidopsis thaliana
  misc_feature (1)..(822): Ceres Seq. ID no. 12729992
  misc_feature (1)..(822): Ortholog of  Ceres SEQ ID NO 15178924 as cited in SEQ ID NO 1050
  misc_feature (1)..(822): Ortholog of  Ceres SEQ ID NO 13661768 as cited in SEQ ID NO 61427
  misc_feature (1)..(822): Ortholog of  Ceres SEQ ID NO 15179239 as cited in SEQ ID NO 0
atgtactcttcatgttctcttttacaacgtctcgtttggttccctttcttagccttggtggccacacaactcctatttatacgcaatgtttcgtccctgaacctcaccaatgagtatctgcatcacaaatgtctcgttagtgaagggaaatataaaccaggaagcaagtacgagtatatccttaacgattacatccgttttctcgcagccggaaattttcgctcaggttccatgcacatgactagtggtctaaaacccaatgctgtaaccattctctaccagtgcagcggtgactcctataattctaagtgccgctcttgctatgctgccggcatctccgggcttcgtaggcgatgtccgagaaacaaaggtgggataatatggttcgatcagtgttttgttgagattacttcaatcagtgtcatcgacttcaacatctcaaagatcaattacgagaacaatttccccttacacaacccgaacagggtaagtggcaatataaagtcattcaacaatgagacaatggctctcctcaaagagttggcgttgaaagcaaataataaagacaacatggacaatggcaagatggcactgtacgcatcaggggagaagagggtcgggacaaagaaggtgtacgcaatggttcagtgtatgagagatctagttaagcctaagatgtgtaaggagtgtttggaaagcattataaaggagtttcccgagtgttgcgacggtaaacaaggagggaggattttgggtacgagctgtgattttaggtatgaactttacccttttctaaggacttcagattcaaaaactgtttga

SEQ ID NO: 91916 - protein, 273 aa, Arabidopsis thaliana
  peptide (1)..(273): Ceres Seq. ID no. 12729993
MYSSCSLLQRLVWFPFLALVATQLLFIRNVSSLNLTNEYLHHKCLVSEGKYKPGSKYEYILNDYIRFLAAGNFRSGSMHMTSGLKPNAVTILYQCSGDSYNSKCRSCYAAGISGLRRRCPRNKGGIIWFDQCFVEITSISVIDFNISKINYENNFPLHNPNRVSGNIKSFNNETMALLKELALKANNKDNMDNGKMALYASGEKRVGTKKVYAMVQCMRDLVKPKMCKECLESIIKEFPECCDGKQGGRILGTSCDFRYELYPFLRTSDSKTV

SEQ ID NO: 91917 - protein, 196 aa, Arabidopsis thaliana
  peptide (1)..(196): Ceres Seq. ID no. 12729994
MHMTSGLKPNAVTILYQCSGDSYNSKCRSCYAAGISGLRRRCPRNKGGIIWFDQCFVEITSISVIDFNISKINYENNFPLHNPNRVSGNIKSFNNETMALLKELALKANNKDNMDNGKMALYASGEKRVGTKKVYAMVQCMRDLVKPKMCKECLESIIKEFPECCDGKQGGRILGTSCDFRYELYPFLRTSDSKTV

SEQ ID NO: 91918 - protein, 194 aa, Arabidopsis thaliana
  peptide (1)..(194): Ceres Seq. ID no. 12729995
MTSGLKPNAVTILYQCSGDSYNSKCRSCYAAGISGLRRRCPRNKGGIIWFDQCFVEITSISVIDFNISKINYENNFPLHNPNRVSGNIKSFNNETMALLKELALKANNKDNMDNGKMALYASGEKRVGTKKVYAMVQCMRDLVKPKMCKECLESIIKEFPECCDGKQGGRILGTSCDFRYELYPFLRTSDSKTV

SEQ ID NO: 91919 - DNA, 1007 bp, Arabidopsis thaliana
  misc_feature (1)..(1007): Ceres Seq. ID no. 12729998
  misc_feature (1)..(1007): Ortholog of  Ceres SEQ ID NO 13661768 as cited in SEQ ID NO 61427
aaaaaaaaaaaagacaccctccacaaaatatcaattttcttccaaaacaatgtcttcattaaaacgcatcgtttggttccctatcttggccatagccatacaaattctctctatacataccgttttgtctcaaagccagaacaatgcgtttctcttccacaagtgctcagacatcgaaggaagctttacctcaaaaagtctctacgagtcaaatctcaacaatctctttagtcagctctcttacaaagttccatccaccggttttgccgcctcctccactggcaacactccaaacaacgtcaacggtttggccctttgccgcggtgatgcctcctcctctgactgccgctcttgtcttgagactgccatccccgagctacgtcagagatgtccgaacaacaaggcgggaatagtatggtatgacaactgtcttgtaaagtattcctcgaccaatttcttcgggaagatagatttcgagaacaggttctatttgtacaacgtcaaaaatgtgagtgatccatcaacattcaactcgcagacgaaagctcttttaaccgagctgacaaagaaagcgactactagagataaccagaagctatttgcgacaggagagaaaaatatcggaaagaataaattgtacggactagtgcaatgtacgagggacttgaagagtattacttgtaaggcgtgtttaaatggaattattggggagcttcctaactgttgcgacggtaaagaaggagggagagttgtgggtgggagctgtaactttaggtatgagatttacccttttgttaagactgcttgattagaggtccaagttaaaagggggtccaatgccaaacacggtcttaatttgtgattattgtcaatgtgatatgtattgtatgttgttgtttgtataatgtgttgagccagtaaaatgtaatcttctctttgtgggttatttgtacgatagacacgattatagaggcttgactcctataaataaaaacattccctttgcc

SEQ ID NO: 91920 - protein, 268 aa, Arabidopsis thaliana
  peptide (1)..(268): Ceres Seq. ID no. 12729999
KKKKTPSTKYQFSSKTMSSLKRIVWFPILAIAIQILSIHTVLSQSQNNAFLFHKCSDIEGSFTSKSLYESNLNNLFSQLSYKVPSTGFAASSTGNTPNNVNGLALCRGDASSSDCRSCLETAIPELRQRCPNNKAGIVWYDNCLVKYSSTNFFGKIDFENRFYLYNVKNVSDPSTFNSQTKALLTELTKKATTRDNQKLFATGEKNIGKNKLYGLVQCTRDLKSITCKACLNGIIGELPNCCDGKEGGRVVGGSCNFRYEIYPFVKTA

SEQ ID NO: 91921 - protein, 252 aa, Arabidopsis thaliana
  peptide (1)..(252): Ceres Seq. ID no. 12730000
MSSLKRIVWFPILAIAIQILSIHTVLSQSQNNAFLFHKCSDIEGSFTSKSLYESNLNNLFSQLSYKVPSTGFAASSTGNTPNNVNGLALCRGDASSSDCRSCLETAIPELRQRCPNNKAGIVWYDNCLVKYSSTNFFGKIDFENRFYLYNVKNVSDPSTFNSQTKALLTELTKKATTRDNQKLFATGEKNIGKNKLYGLVQCTRDLKSITCKACLNGIIGELPNCCDGKEGGRVVGGSCNFRYEIYPFVKTA

SEQ ID NO: 91922 - DNA, 1329 bp, Arabidopsis thaliana
  misc_feature (1)..(1329): Ceres Seq. ID no. 12730004
  misc_feature (1)..(1329): Ortholog of  Ceres SEQ ID NO 12612333 as cited in SEQ ID NO 56421
atgtatctacttactcactcctttcagaaacccaaaccctcattccaaaaaatggggtctcgctctcaaaacctctcctttctcgtcctcctcctccttggcttcgttgccgtctcctatgcttgcgactgtacccctcctaaaccatcaccagcacctcacaaaccaccaaaacatccagtcaaaccgcctaaacctcctgccgtcaaaccacctaaaccaccggcagtaaaaccacctactccaaaacctcccaccgtgaaaccccatcctaaaccaccaaccgtcaaaccccatcctaaaccaccaaccgtcaaaccccaccctaagccacccaccgtcaaaccaccccaccctaaaccacccaccaaacctcacccccacccaaaacctcccatcgtaaagccaccaaccaagcctcctccgtccacccctaaacctcccaccaaacctcccccgtccacacctaaacctcccacgaccaagcctcctccgtctactccgaaaccaccccaccacaagcctccgcctacaccatgcccaccaccaacaccaacgccgactccaccagttgtaacaccgccaacaccaaccccacccgtcataactccaccaacaccaaccccacccgtcgtaacaccgccaacgccaactccacccgtcattacaccaccaacaccaactccacccgtcattacaccaccaacaccaacaccacccgtcgtgacacctccaacaccaacaccacccgtagtaacaccaccaacaccaactcctcctacgcctattccagagacttgcccaattgacacgctgaagctaggcgcttgtgtggacgttcttggaggtttgattcacatcggacttggaaaaagccacgccaaggcagaatgttgtccggttttaggaggtttacttgacctagacgcagccgtttgtctatgtaccaccattaagctcaaacttctcaacatcgaccttgttctccccattgctcttgagcttcttctcgactgtggaaaaactccaccatctgacttcaaatgtcccgcttaatcgatgtagaacgttgagagtctctggacgactccaaaagtttcgtttcttcaagaaatttgttagtttcatgatctatttggtaatgggaggttaatctgcatatgtgcgacctttagttacatgtttcatttgatacaataaaaggcgttgtaatttgggtttgagatttcaatttctttgggctttcttgttatgttgtacttttaagaagaagaaaaaaaaactgttaaacgatataactttttttttaatatgaacaagtttgtatct

SEQ ID NO: 91923 - protein, 351 aa, Arabidopsis thaliana
  peptide (1)..(351): Ceres Seq. ID no. 12730005
MYLLTHSFQKPKPSFQKMGSRSQNLSFLVLLLLGFVAVSYACDCTPPKPSPAPHKPPKHPVKPPKPPAVKPPKPPAVKPPTPKPPTVKPHPKPPTVKPHPKPPTVKPHPKPPTVKPPHPKPPTKPHPHPKPPIVKPPTKPPPSTPKPPTKPPPSTPKPPTTKPPPSTPKPPHHKPPPTPCPPPTPTPTPPVVTPPTPTPPVITPPTPTPPVVTPPTPTPPVITPPTPTPPVITPPTPTPPVVTPPTPTPPVVTPPTPTPPTPIPETCPIDTLKLGACVDVLGGLIHIGLGKSHAKAECCPVLGGLLDLDAAVCLCTTIKLKLLNIDLVLPIALELLLDCGKTPPSDFKCPA

SEQ ID NO: 91924 - protein, 334 aa, Arabidopsis thaliana
  peptide (1)..(334): Ceres Seq. ID no. 12730006
MGSRSQNLSFLVLLLLGFVAVSYACDCTPPKPSPAPHKPPKHPVKPPKPPAVKPPKPPAVKPPTPKPPTVKPHPKPPTVKPHPKPPTVKPHPKPPTVKPPHPKPPTKPHPHPKPPIVKPPTKPPPSTPKPPTKPPPSTPKPPTTKPPPSTPKPPHHKPPPTPCPPPTPTPTPPVVTPPTPTPPVITPPTPTPPVVTPPTPTPPVITPPTPTPPVITPPTPTPPVVTPPTPTPPVVTPPTPTPPTPIPETCPIDTLKLGACVDVLGGLIHIGLGKSHAKAECCPVLGGLLDLDAAVCLCTTIKLKLLNIDLVLPIALELLLDCGKTPPSDFKCPA

SEQ ID NO: 91925 - DNA, 3432 bp, Arabidopsis thaliana; identical to SEQ ID NO: 88169
  misc_feature (1)..(3432): Ceres Seq. ID no. 12706139
  misc_feature (1)..(3432): Ortholog of  Ceres SEQ ID NO 13594209 as cited in SEQ ID NO 59089
  misc_feature (1)..(3432): Ortholog of  Ceres SEQ ID NO 15169611 as cited in SEQ ID NO 65939
  misc_feature (1)..(3432): Ortholog of  Ceres SEQ ID NO 13502874 as cited in SEQ ID NO 66298
  misc_feature (1)..(3432): Ortholog of  Ceres SEQ ID NO 12614124 as cited in SEQ ID NO 68392

SEQ ID NO: 91926 - protein, 1143 aa, Arabidopsis thaliana; identical to SEQ ID NO: 88170
  peptide (1)..(1143): Ceres Seq. ID no. 12706140

SEQ ID NO: 91927 - protein, 962 aa, Arabidopsis thaliana; identical to SEQ ID NO: 88171
  peptide (1)..(962): Ceres Seq. ID no. 12706141

SEQ ID NO: 91928 - protein, 926 aa, Arabidopsis thaliana; identical to SEQ ID NO: 88172
  peptide (1)..(926): Ceres Seq. ID no. 12706142

SEQ ID NO: 91929 - DNA, 2067 bp, Arabidopsis thaliana; identical to SEQ ID NO: 88173
  misc_feature (1)..(2067): Ceres Seq. ID no. 12706146
  misc_feature (1)..(2067): Ortholog of  Ceres SEQ ID NO 13655744 as cited in SEQ ID NO 64032

SEQ ID NO: 91930 - protein, 688 aa, Arabidopsis thaliana; identical to SEQ ID NO: 88174
  peptide (1)..(688): Ceres Seq. ID no. 12706147

SEQ ID NO: 91931 - protein, 662 aa, Arabidopsis thaliana; identical to SEQ ID NO: 88175
  peptide (1)..(662): Ceres Seq. ID no. 12706148

SEQ ID NO: 91932 - protein, 660 aa, Arabidopsis thaliana; identical to SEQ ID NO: 88176
  peptide (1)..(660): Ceres Seq. ID no. 12706149

SEQ ID NO: 91933 - DNA, 1165 bp, Arabidopsis thaliana; identical to SEQ ID NO: 88177
  misc_feature (1)..(1165): Ceres Seq. ID no. 12706162
  misc_feature (1)..(1165): Ortholog of  Ceres SEQ ID NO 14315461 as cited in SEQ ID NO 57150

SEQ ID NO: 91934 - protein, 302 aa, Arabidopsis thaliana; identical to SEQ ID NO: 88178
  peptide (1)..(302): Ceres Seq. ID no. 12706163

SEQ ID NO: 91935 - protein, 216 aa, Arabidopsis thaliana; identical to SEQ ID NO: 26282
  peptide (1)..(216): Ceres Seq. ID no. 12706164

SEQ ID NO: 91936 - DNA, 1788 bp, Arabidopsis thaliana; identical to SEQ ID NO: 88180
  misc_feature (1)..(1788): Ceres Seq. ID no. 12706214
  misc_feature (1)..(1788): Ortholog of  Ceres SEQ ID NO 13656177 as cited in SEQ ID NO 64997

SEQ ID NO: 91937 - protein, 595 aa, Arabidopsis thaliana; identical to SEQ ID NO: 88181
  peptide (1)..(595): Ceres Seq. ID no. 12706215

SEQ ID NO: 91938 - protein, 563 aa, Arabidopsis thaliana; identical to SEQ ID NO: 88182
  peptide (1)..(563): Ceres Seq. ID no. 12706216

SEQ ID NO: 91939 - protein, 480 aa, Arabidopsis thaliana; identical to SEQ ID NO: 88183
  peptide (1)..(480): Ceres Seq. ID no. 12706217

SEQ ID NO: 91940 - DNA, 1551 bp, Arabidopsis thaliana; identical to SEQ ID NO: 88184
  misc_feature (1)..(1551): Ceres Seq. ID no. 12706251
  misc_feature (1)..(1551): Ortholog of  Ceres SEQ ID NO 13654989 as cited in SEQ ID NO 63117
  misc_feature (1)..(1551): Ortholog of  Ceres SEQ ID NO 13584744 as cited in SEQ ID NO 69137

SEQ ID NO: 91941 - protein, 516 aa, Arabidopsis thaliana; identical to SEQ ID NO: 88185
  peptide (1)..(516): Ceres Seq. ID no. 12706252

SEQ ID NO: 91942 - protein, 464 aa, Arabidopsis thaliana; identical to SEQ ID NO: 88186
  peptide (1)..(464): Ceres Seq. ID no. 12706253

SEQ ID NO: 91943 - protein, 429 aa, Arabidopsis thaliana; identical to SEQ ID NO: 88187
  peptide (1)..(429): Ceres Seq. ID no. 12706254

SEQ ID NO: 91944 - DNA, 1462 bp, Arabidopsis thaliana; identical to SEQ ID NO: 88188
  misc_feature (1)..(1462): Ceres Seq. ID no. 12706262
  misc_feature (1)..(1462): Ortholog of  Ceres SEQ ID NO 13598741 as cited in SEQ ID NO 62749
  misc_feature (1)..(1462): Ortholog of  Ceres SEQ ID NO 12587535 as cited in SEQ ID NO 64020
  misc_feature (1)..(1462): Ortholog of  Ceres SEQ ID NO 15176854 as cited in SEQ ID NO 64525
  misc_feature (1)..(1462): Ortholog of  Ceres SEQ ID NO 12586366 as cited in SEQ ID NO 68983
  misc_feature (1)..(1462): Ortholog of  Ceres SEQ ID NO 15178891 as cited in SEQ ID NO 0

SEQ ID NO: 91945 - protein, 366 aa, Arabidopsis thaliana; identical to SEQ ID NO: 35908
  peptide (1)..(366): Ceres Seq. ID no. 12706263

SEQ ID NO: 91946 - protein, 340 aa, Arabidopsis thaliana; identical to SEQ ID NO: 35909
  peptide (1)..(340): Ceres Seq. ID no. 12706264

SEQ ID NO: 91947 - protein, 325 aa, Arabidopsis thaliana; identical to SEQ ID NO: 35910
  peptide (1)..(325): Ceres Seq. ID no. 12706265

SEQ ID NO: 91948 - DNA, 1155 bp, Arabidopsis thaliana; identical to SEQ ID NO: 88192
  misc_feature (1)..(1155): Ceres Seq. ID no. 12706276
  misc_feature (1)..(1155): Ortholog of  Ceres SEQ ID NO 14307202 as cited in SEQ ID NO 54330

SEQ ID NO: 91949 - protein, 215 aa, Arabidopsis thaliana; identical to SEQ ID NO: 25265
  peptide (1)..(215): Ceres Seq. ID no. 12706277

SEQ ID NO: 91950 - protein, 198 aa, Arabidopsis thaliana; identical to SEQ ID NO: 25266
  peptide (1)..(198): Ceres Seq. ID no. 12706278

SEQ ID NO: 91951 - protein, 172 aa, Arabidopsis thaliana; identical to SEQ ID NO: 25267
  peptide (1)..(172): Ceres Seq. ID no. 12706279

SEQ ID NO: 91952 - DNA, 2020 bp, Arabidopsis thaliana; identical to SEQ ID NO: 88196
  misc_feature (1)..(2020): Ceres Seq. ID no. 12706323
  misc_feature (1)..(2020): Ortholog of  Ceres SEQ ID NO 13596244 as cited in SEQ ID NO 69307

SEQ ID NO: 91953 - protein, 386 aa, Arabidopsis thaliana; identical to SEQ ID NO: 28879
  peptide (1)..(386): Ceres Seq. ID no. 12706324

SEQ ID NO: 91954 - protein, 297 aa, Arabidopsis thaliana; identical to SEQ ID NO: 28880
  peptide (1)..(297): Ceres Seq. ID no. 12706325

SEQ ID NO: 91955 - protein, 294 aa, Arabidopsis thaliana; identical to SEQ ID NO: 28881
  peptide (1)..(294): Ceres Seq. ID no. 12706326

SEQ ID NO: 91956 - DNA, 3744 bp, Arabidopsis thaliana; identical to SEQ ID NO: 88200
  misc_feature (1)..(3744): Ceres Seq. ID no. 12706359
  misc_feature (1)..(3744): Ortholog of  Ceres SEQ ID NO 12586556 as cited in SEQ ID NO 64667
  misc_feature (1)..(3744): Ortholog of  Ceres SEQ ID NO 13660894 as cited in SEQ ID NO 67475

SEQ ID NO: 91957 - protein, 1247 aa, Arabidopsis thaliana; identical to SEQ ID NO: 88201
  peptide (1)..(1247): Ceres Seq. ID no. 12706360

SEQ ID NO: 91958 - protein, 1144 aa, Arabidopsis thaliana; identical to SEQ ID NO: 88202
  peptide (1)..(1144): Ceres Seq. ID no. 12706361

SEQ ID NO: 91959 - protein, 1138 aa, Arabidopsis thaliana; identical to SEQ ID NO: 88203
  peptide (1)..(1138): Ceres Seq. ID no. 12706362

SEQ ID NO: 91960 - DNA, 2307 bp, Arabidopsis thaliana; identical to SEQ ID NO: 88204
  misc_feature (1)..(2307): Ceres Seq. ID no. 12706402
  misc_feature (1)..(2307): Ortholog of  Ceres SEQ ID NO 14313151 as cited in SEQ ID NO 54664

SEQ ID NO: 91961 - protein, 768 aa, Arabidopsis thaliana; identical to SEQ ID NO: 88205
  peptide (1)..(768): Ceres Seq. ID no. 12706403

SEQ ID NO: 91962 - protein, 726 aa, Arabidopsis thaliana; identical to SEQ ID NO: 88206
  peptide (1)..(726): Ceres Seq. ID no. 12706404

SEQ ID NO: 91963 - protein, 679 aa, Arabidopsis thaliana; identical to SEQ ID NO: 88207
  peptide (1)..(679): Ceres Seq. ID no. 12706405

SEQ ID NO: 91964 - DNA, 1719 bp, Arabidopsis thaliana; identical to SEQ ID NO: 88208
  misc_feature (1)..(1719): Ceres Seq. ID no. 12706427
  misc_feature (1)..(1719): Ortholog of  Ceres SEQ ID NO 13597411 as cited in SEQ ID NO 64125

SEQ ID NO: 91965 - protein, 572 aa, Arabidopsis thaliana; identical to SEQ ID NO: 38704
  peptide (1)..(572): Ceres Seq. ID no. 12706428

SEQ ID NO: 91966 - protein, 564 aa, Arabidopsis thaliana; identical to SEQ ID NO: 38705
  peptide (1)..(564): Ceres Seq. ID no. 12706429

SEQ ID NO: 91967 - protein, 506 aa, Arabidopsis thaliana; identical to SEQ ID NO: 38706
  peptide (1)..(506): Ceres Seq. ID no. 12706430

SEQ ID NO: 91968 - DNA, 1267 bp, Arabidopsis thaliana; identical to SEQ ID NO: 88212
  misc_feature (1)..(1267): Ceres Seq. ID no. 12706519
  misc_feature (1)..(1267): Ortholog of  Ceres SEQ ID NO 15225973 as cited in SEQ ID NO 50947

SEQ ID NO: 91969 - protein, 371 aa, Arabidopsis thaliana; identical to SEQ ID NO: 88213
  peptide (1)..(371): Ceres Seq. ID no. 12706520

SEQ ID NO: 91970 - protein, 195 aa, Arabidopsis thaliana; identical to SEQ ID NO: 25290
  peptide (1)..(195): Ceres Seq. ID no. 12706521

SEQ ID NO: 91971 - DNA, 1221 bp, Arabidopsis thaliana; identical to SEQ ID NO: 88215
  misc_feature (1)..(1221): Ceres Seq. ID no. 12706522
  misc_feature (1)..(1221): Ortholog of  Ceres SEQ ID NO 12778345 as cited in SEQ ID NO 62792
  misc_feature (1)..(1221): Ortholog of  Ceres SEQ ID NO 13662513 as cited in SEQ ID NO 63303

SEQ ID NO: 91972 - protein, 406 aa, Arabidopsis thaliana; identical to SEQ ID NO: 88216
  peptide (1)..(406): Ceres Seq. ID no. 12706523

SEQ ID NO: 91973 - protein, 404 aa, Arabidopsis thaliana; identical to SEQ ID NO: 88217
  peptide (1)..(404): Ceres Seq. ID no. 12706524

SEQ ID NO: 91974 - protein, 313 aa, Arabidopsis thaliana; identical to SEQ ID NO: 76789
  peptide (1)..(313): Ceres Seq. ID no. 12706525

SEQ ID NO: 91975 - DNA, 1609 bp, Arabidopsis thaliana; identical to SEQ ID NO: 88219
  misc_feature (1)..(1609): Ceres Seq. ID no. 12706529
  misc_feature (1)..(1609): Ortholog of  Ceres SEQ ID NO 15176444 as cited in SEQ ID NO 53249

SEQ ID NO: 91976 - protein, 481 aa, Arabidopsis thaliana; identical to SEQ ID NO: 88220
  peptide (1)..(481): Ceres Seq. ID no. 12706530

SEQ ID NO: 91977 - protein, 472 aa, Arabidopsis thaliana; identical to SEQ ID NO: 88221
  peptide (1)..(472): Ceres Seq. ID no. 12706531

SEQ ID NO: 91978 - protein, 465 aa, Arabidopsis thaliana; identical to SEQ ID NO: 88222
  peptide (1)..(465): Ceres Seq. ID no. 12706532

SEQ ID NO: 91979 - DNA, 2028 bp, Arabidopsis thaliana; identical to SEQ ID NO: 88223
  misc_feature (1)..(2028): Ceres Seq. ID no. 12706533
  misc_feature (1)..(2028): Ortholog of  Ceres SEQ ID NO 13657677 as cited in SEQ ID NO 66119

SEQ ID NO: 91980 - protein, 675 aa, Arabidopsis thaliana; identical to SEQ ID NO: 88224
  peptide (1)..(675): Ceres Seq. ID no. 12706534

SEQ ID NO: 91981 - protein, 628 aa, Arabidopsis thaliana; identical to SEQ ID NO: 88225
  peptide (1)..(628): Ceres Seq. ID no. 12706535

SEQ ID NO: 91982 - protein, 613 aa, Arabidopsis thaliana; identical to SEQ ID NO: 88226
  peptide (1)..(613): Ceres Seq. ID no. 12706536

SEQ ID NO: 91983 - DNA, 3633 bp, Arabidopsis thaliana; identical to SEQ ID NO: 88227
  misc_feature (1)..(3633): Ceres Seq. ID no. 12706545
  misc_feature (1)..(3633): Ortholog of  Ceres SEQ ID NO 14303870 as cited in SEQ ID NO 53632
  misc_feature (1)..(3633): Ortholog of  Ceres SEQ ID NO 13656662 as cited in SEQ ID NO 65594

SEQ ID NO: 91984 - protein, 1210 aa, Arabidopsis thaliana; identical to SEQ ID NO: 88228
  peptide (1)..(1210): Ceres Seq. ID no. 12706546

SEQ ID NO: 91985 - protein, 1040 aa, Arabidopsis thaliana; identical to SEQ ID NO: 88229
  peptide (1)..(1040): Ceres Seq. ID no. 12706547

SEQ ID NO: 91986 - protein, 985 aa, Arabidopsis thaliana; identical to SEQ ID NO: 88230
  peptide (1)..(985): Ceres Seq. ID no. 12706548

SEQ ID NO: 91987 - DNA, 858 bp, Arabidopsis thaliana; identical to SEQ ID NO: 88231
  misc_feature (1)..(858): Ceres Seq. ID no. 12706558
  misc_feature (1)..(858): Ortholog of  Ceres SEQ ID NO 13594209 as cited in SEQ ID NO 59089

SEQ ID NO: 91988 - protein, 285 aa, Arabidopsis thaliana; identical to SEQ ID NO: 88232
  peptide (1)..(285): Ceres Seq. ID no. 12706559

SEQ ID NO: 91989 - protein, 272 aa, Arabidopsis thaliana; identical to SEQ ID NO: 88233
  peptide (1)..(272): Ceres Seq. ID no. 12706560

SEQ ID NO: 91990 - protein, 219 aa, Arabidopsis thaliana; identical to SEQ ID NO: 88234
  peptide (1)..(219): Ceres Seq. ID no. 12706561

SEQ ID NO: 91991 - DNA, 4626 bp, Arabidopsis thaliana; identical to SEQ ID NO: 88235
  misc_feature (1)..(4626): Ceres Seq. ID no. 12706578
  misc_feature (1)..(4626): Ortholog of  Ceres SEQ ID NO 14310375 as cited in SEQ ID NO 59612

SEQ ID NO: 91992 - protein, 1541 aa, Arabidopsis thaliana; identical to SEQ ID NO: 88236
  peptide (1)..(1541): Ceres Seq. ID no. 12706579

SEQ ID NO: 91993 - protein, 1506 aa, Arabidopsis thaliana; identical to SEQ ID NO: 88237
  peptide (1)..(1506): Ceres Seq. ID no. 12706580

SEQ ID NO: 91994 - protein, 1468 aa, Arabidopsis thaliana; identical to SEQ ID NO: 88238
  peptide (1)..(1468): Ceres Seq. ID no. 12706581

SEQ ID NO: 91995 - DNA, 678 bp, Arabidopsis thaliana; identical to SEQ ID NO: 88239
  misc_feature (1)..(678): Ceres Seq. ID no. 12706590
  misc_feature (1)..(678): Ortholog of  Ceres SEQ ID NO 15169809 as cited in SEQ ID NO 52839

SEQ ID NO: 91996 - protein, 225 aa, Arabidopsis thaliana; identical to SEQ ID NO: 81789
  peptide (1)..(225): Ceres Seq. ID no. 12706591

SEQ ID NO: 91997 - protein, 224 aa, Arabidopsis thaliana; identical to SEQ ID NO: 81790
  peptide (1)..(224): Ceres Seq. ID no. 12706592

SEQ ID NO: 91998 - protein, 154 aa, Arabidopsis thaliana; identical to SEQ ID NO: 88242
  peptide (1)..(154): Ceres Seq. ID no. 12706593

SEQ ID NO: 91999 - DNA, 774 bp, Arabidopsis thaliana; identical to SEQ ID NO: 88243
  misc_feature (1)..(774): Ceres Seq. ID no. 12706630
  misc_feature (1)..(774): Ortholog of  Ceres SEQ ID NO 13581740 as cited in SEQ ID NO 58200

SEQ ID NO: 92000 - protein, 257 aa, Arabidopsis thaliana; identical to SEQ ID NO: 88244
  peptide (1)..(257): Ceres Seq. ID no. 12706631

SEQ ID NO: 92001 - DNA, 665 bp, Arabidopsis thaliana; identical to SEQ ID NO: 88245
  misc_feature (1)..(665): Ceres Seq. ID no. 12706632
  misc_feature (1)..(665): Ortholog of  Ceres SEQ ID NO 13600689 as cited in SEQ ID NO 0
  misc_feature (1)..(665): Ortholog of  Ceres SEQ ID NO 15178120 as cited in SEQ ID NO 0

SEQ ID NO: 92002 - protein, 121 aa, Arabidopsis thaliana; identical to SEQ ID NO: 88246
  peptide (1)..(121): Ceres Seq. ID no. 12706633

SEQ ID NO: 92003 - protein, 62 aa, Arabidopsis thaliana; identical to SEQ ID NO: 88247
  peptide (1)..(62): Ceres Seq. ID no. 12706634

SEQ ID NO: 92004 - DNA, 828 bp, Arabidopsis thaliana; identical to SEQ ID NO: 88248
  misc_feature (1)..(828): Ceres Seq. ID no. 12706635
  misc_feature (1)..(828): Ortholog of  Ceres SEQ ID NO 13581740 as cited in SEQ ID NO 58200

SEQ ID NO: 92005 - protein, 275 aa, Arabidopsis thaliana; identical to SEQ ID NO: 88249
  peptide (1)..(275): Ceres Seq. ID no. 12706636

SEQ ID NO: 92006 - DNA, 1563 bp, Arabidopsis thaliana; identical to SEQ ID NO: 88250
  misc_feature (1)..(1563): Ceres Seq. ID no. 12706649
  misc_feature (1)..(1563): Ortholog of  Ceres SEQ ID NO 13595521 as cited in SEQ ID NO 59840

SEQ ID NO: 92007 - protein, 520 aa, Arabidopsis thaliana; identical to SEQ ID NO: 88251
  peptide (1)..(520): Ceres Seq. ID no. 12706650

SEQ ID NO: 92008 - protein, 447 aa, Arabidopsis thaliana; identical to SEQ ID NO: 88252
  peptide (1)..(447): Ceres Seq. ID no. 12706651

SEQ ID NO: 92009 - protein, 432 aa, Arabidopsis thaliana; identical to SEQ ID NO: 88253
  peptide (1)..(432): Ceres Seq. ID no. 12706652

SEQ ID NO: 92010 - DNA, 1719 bp, Arabidopsis thaliana; identical to SEQ ID NO: 88254
  misc_feature (1)..(1719): Ceres Seq. ID no. 12706702
  misc_feature (1)..(1719): Ortholog of  Ceres SEQ ID NO 12586556 as cited in SEQ ID NO 64667
  misc_feature (1)..(1719): Ortholog of  Ceres SEQ ID NO 13660894 as cited in SEQ ID NO 67475

SEQ ID NO: 92011 - protein, 572 aa, Arabidopsis thaliana; identical to SEQ ID NO: 88255
  peptide (1)..(572): Ceres Seq. ID no. 12706703

SEQ ID NO: 92012 - protein, 482 aa, Arabidopsis thaliana; identical to SEQ ID NO: 88256
  peptide (1)..(482): Ceres Seq. ID no. 12706704

SEQ ID NO: 92013 - protein, 480 aa, Arabidopsis thaliana; identical to SEQ ID NO: 88257
  peptide (1)..(480): Ceres Seq. ID no. 12706705

SEQ ID NO: 92014 - DNA, 642 bp, Arabidopsis thaliana; identical to SEQ ID NO: 88258
  misc_feature (1)..(642): Ceres Seq. ID no. 12706909
  misc_feature (1)..(642): Ortholog of  Ceres SEQ ID NO 13638893 as cited in SEQ ID NO 55835
  misc_feature (1)..(642): Ortholog of  Ceres SEQ ID NO 13661656 as cited in SEQ ID NO 61607
  misc_feature (1)..(642): Ortholog of  Ceres SEQ ID NO 14309331 as cited in SEQ ID NO 0

SEQ ID NO: 92015 - protein, 172 aa, Arabidopsis thaliana; identical to SEQ ID NO: 35649
  peptide (1)..(172): Ceres Seq. ID no. 12706910

SEQ ID NO: 92016 - protein, 169 aa, Arabidopsis thaliana; identical to SEQ ID NO: 35650
  peptide (1)..(169): Ceres Seq. ID no. 12706911

SEQ ID NO: 92017 - protein, 162 aa, Arabidopsis thaliana; identical to SEQ ID NO: 35651
  peptide (1)..(162): Ceres Seq. ID no. 12706912

SEQ ID NO: 92018 - DNA, 1164 bp, Arabidopsis thaliana; identical to SEQ ID NO: 88262
  misc_feature (1)..(1164): Ceres Seq. ID no. 12706963
  misc_feature (1)..(1164): Ortholog of  Ceres SEQ ID NO 13658153 as cited in SEQ ID NO 66326

SEQ ID NO: 92019 - protein, 387 aa, Arabidopsis thaliana; identical to SEQ ID NO: 88263
  peptide (1)..(387): Ceres Seq. ID no. 12706964

SEQ ID NO: 92020 - protein, 359 aa, Arabidopsis thaliana; identical to SEQ ID NO: 88264
  peptide (1)..(359): Ceres Seq. ID no. 12706965

SEQ ID NO: 92021 - protein, 325 aa, Arabidopsis thaliana; identical to SEQ ID NO: 88265
  peptide (1)..(325): Ceres Seq. ID no. 12706966

SEQ ID NO: 92022 - DNA, 1620 bp, Arabidopsis thaliana; identical to SEQ ID NO: 88266
  misc_feature (1)..(1620): Ceres Seq. ID no. 12707022
  misc_feature (1)..(1620): Ortholog of  Ceres SEQ ID NO 13646415 as cited in SEQ ID NO 20579

SEQ ID NO: 92023 - protein, 539 aa, Arabidopsis thaliana; identical to SEQ ID NO: 88267
  peptide (1)..(539): Ceres Seq. ID no. 12707023

SEQ ID NO: 92024 - protein, 299 aa, Arabidopsis thaliana; identical to SEQ ID NO: 88268
  peptide (1)..(299): Ceres Seq. ID no. 12707024

SEQ ID NO: 92025 - protein, 275 aa, Arabidopsis thaliana; identical to SEQ ID NO: 88269
  peptide (1)..(275): Ceres Seq. ID no. 12707025

SEQ ID NO: 92026 - DNA, 738 bp, Arabidopsis thaliana; identical to SEQ ID NO: 88270
  misc_feature (1)..(738): Ceres Seq. ID no. 12707068
  misc_feature (1)..(738): Ortholog of  Ceres SEQ ID NO 13594416 as cited in SEQ ID NO 51058
  misc_feature (1)..(738): Ortholog of  Ceres SEQ ID NO 13596609 as cited in SEQ ID NO 63070
  misc_feature (1)..(738): Ortholog of  Ceres SEQ ID NO 14302096 as cited in SEQ ID NO 68356
  misc_feature (1)..(738): Ortholog of  Ceres SEQ ID NO 13598574 as cited in SEQ ID NO 69083

SEQ ID NO: 92027 - protein, 245 aa, Arabidopsis thaliana; identical to SEQ ID NO: 88271
  peptide (1)..(245): Ceres Seq. ID no. 12707069

SEQ ID NO: 92028 - protein, 168 aa, Arabidopsis thaliana; identical to SEQ ID NO: 88272
  peptide (1)..(168): Ceres Seq. ID no. 12707070

SEQ ID NO: 92029 - DNA, 687 bp, Arabidopsis thaliana; identical to SEQ ID NO: 88273
  misc_feature (1)..(687): Ceres Seq. ID no. 12707085
  misc_feature (1)..(687): Ortholog of  Ceres SEQ ID NO 12609339 as cited in SEQ ID NO 51780

SEQ ID NO: 92030 - protein, 228 aa, Arabidopsis thaliana; identical to SEQ ID NO: 88274
  peptide (1)..(228): Ceres Seq. ID no. 12707086

SEQ ID NO: 92031 - protein, 165 aa, Arabidopsis thaliana; identical to SEQ ID NO: 77596
  peptide (1)..(165): Ceres Seq. ID no. 12707087

SEQ ID NO: 92032 - protein, 144 aa, Arabidopsis thaliana; identical to SEQ ID NO: 88276
  peptide (1)..(144): Ceres Seq. ID no. 12707088

SEQ ID NO: 92033 - DNA, 957 bp, Arabidopsis thaliana; identical to SEQ ID NO: 88277
  misc_feature (1)..(957): Ceres Seq. ID no. 12707089
  misc_feature (1)..(957): Ortholog of  Ceres SEQ ID NO 14308120 as cited in SEQ ID NO 58423
  misc_feature (1)..(957): Ortholog of  Ceres SEQ ID NO 14307004 as cited in SEQ ID NO 59551
  misc_feature (1)..(957): Ortholog of  Ceres SEQ ID NO 13661504 as cited in SEQ ID NO 61294
  misc_feature (1)..(957): Ortholog of  Ceres SEQ ID NO 12617197 as cited in SEQ ID NO 63406
  misc_feature (1)..(957): Ortholog of  Ceres SEQ ID NO 13597804 as cited in SEQ ID NO 64182
  misc_feature (1)..(957): Ortholog of  Ceres SEQ ID NO 13598565 as cited in SEQ ID NO 65250
  misc_feature (1)..(957): Ortholog of  Ceres SEQ ID NO 13598597 as cited in SEQ ID NO 65496
  misc_feature (1)..(957): Ortholog of  Ceres SEQ ID NO 13596284 as cited in SEQ ID NO 68273
  misc_feature (1)..(957): Ortholog of  Ceres SEQ ID NO 15178902 as cited in SEQ ID NO 0

SEQ ID NO: 92034 - protein, 318 aa, Arabidopsis thaliana; identical to SEQ ID NO: 40384
  peptide (1)..(318): Ceres Seq. ID no. 12707090

SEQ ID NO: 92035 - DNA, 1045 bp, Arabidopsis thaliana; identical to SEQ ID NO: 88279
  misc_feature (1)..(1045): Ceres Seq. ID no. 12707216
  misc_feature (1)..(1045): Ortholog of  Ceres SEQ ID NO 13596116 as cited in SEQ ID NO 62213

SEQ ID NO: 92036 - protein, 230 aa, Arabidopsis thaliana; identical to SEQ ID NO: 36323
  peptide (1)..(230): Ceres Seq. ID no. 12707217

SEQ ID NO: 92037 - protein, 133 aa, Arabidopsis thaliana; identical to SEQ ID NO: 36324
  peptide (1)..(133): Ceres Seq. ID no. 12707218

SEQ ID NO: 92038 - DNA, 802 bp, Arabidopsis thaliana; identical to SEQ ID NO: 88282
  misc_feature (1)..(802): Ceres Seq. ID no. 12707271
  misc_feature (1)..(802): Ortholog of  Ceres SEQ ID NO 13598422 as cited in SEQ ID NO 68856

SEQ ID NO: 92039 - protein, 216 aa, Arabidopsis thaliana; identical to SEQ ID NO: 88283
  peptide (1)..(216): Ceres Seq. ID no. 12707272

SEQ ID NO: 92040 - protein, 179 aa, Arabidopsis thaliana; identical to SEQ ID NO: 88284
  peptide (1)..(179): Ceres Seq. ID no. 12707273

SEQ ID NO: 92041 - DNA, 1284 bp, Arabidopsis thaliana; identical to SEQ ID NO: 88285
  misc_feature (1)..(1284): Ceres Seq. ID no. 12707274
  misc_feature (1)..(1284): Ortholog of  Ceres SEQ ID NO 14308061 as cited in SEQ ID NO 55155
  misc_feature (1)..(1284): Ortholog of  Ceres SEQ ID NO 13654238 as cited in SEQ ID NO 67874

SEQ ID NO: 92042 - protein, 427 aa, Arabidopsis thaliana; identical to SEQ ID NO: 88286
  peptide (1)..(427): Ceres Seq. ID no. 12707275

SEQ ID NO: 92043 - protein, 348 aa, Arabidopsis thaliana; identical to SEQ ID NO: 72087
  peptide (1)..(348): Ceres Seq. ID no. 12707276

SEQ ID NO: 92044 - DNA, 1062 bp, Arabidopsis thaliana; identical to SEQ ID NO: 88288
  misc_feature (1)..(1062): Ceres Seq. ID no. 12707401
  misc_feature (1)..(1062): Ortholog of  Ceres SEQ ID NO 12636774 as cited in SEQ ID NO 372
  misc_feature (1)..(1062): Ortholog of  Ceres SEQ ID NO 13596470 as cited in SEQ ID NO 62158
  misc_feature (1)..(1062): Ortholog of  Ceres SEQ ID NO 12615466 as cited in SEQ ID NO 62761
  misc_feature (1)..(1062): Ortholog of  Ceres SEQ ID NO 12615907 as cited in SEQ ID NO 62860
  misc_feature (1)..(1062): Ortholog of  Ceres SEQ ID NO 13597295 as cited in SEQ ID NO 63743
  misc_feature (1)..(1062): Ortholog of  Ceres SEQ ID NO 12617090 as cited in SEQ ID NO 64005
  misc_feature (1)..(1062): Ortholog of  Ceres SEQ ID NO 13597439 as cited in SEQ ID NO 64081
  misc_feature (1)..(1062): Ortholog of  Ceres SEQ ID NO 13597233 as cited in SEQ ID NO 64370
  misc_feature (1)..(1062): Ortholog of  Ceres SEQ ID NO 13599438 as cited in SEQ ID NO 0
  misc_feature (1)..(1062): Ortholog of  Ceres SEQ ID NO 13600370 as cited in SEQ ID NO 0

SEQ ID NO: 92045 - protein, 353 aa, Arabidopsis thaliana; identical to SEQ ID NO: 88289
  peptide (1)..(353): Ceres Seq. ID no. 12707402

SEQ ID NO: 92046 - protein, 342 aa, Arabidopsis thaliana; identical to SEQ ID NO: 88290
  peptide (1)..(342): Ceres Seq. ID no. 12707403

SEQ ID NO: 92047 - protein, 247 aa, Arabidopsis thaliana; identical to SEQ ID NO: 70754
  peptide (1)..(247): Ceres Seq. ID no. 12707404

SEQ ID NO: 92048 - DNA, 1590 bp, Arabidopsis thaliana; identical to SEQ ID NO: 88292
  misc_feature (1)..(1590): Ceres Seq. ID no. 12707479
  misc_feature (1)..(1590): Ortholog of  Ceres SEQ ID NO 14310920 as cited in SEQ ID NO 54622

SEQ ID NO: 92049 - protein, 529 aa, Arabidopsis thaliana; identical to SEQ ID NO: 88293
  peptide (1)..(529): Ceres Seq. ID no. 12707480

SEQ ID NO: 92050 - protein, 409 aa, Arabidopsis thaliana; identical to SEQ ID NO: 84581
  peptide (1)..(409): Ceres Seq. ID no. 12707481

SEQ ID NO: 92051 - protein, 408 aa, Arabidopsis thaliana; identical to SEQ ID NO: 84582
  peptide (1)..(408): Ceres Seq. ID no. 12707482

SEQ ID NO: 92052 - DNA, 1545 bp, Arabidopsis thaliana; identical to SEQ ID NO: 88296
  misc_feature (1)..(1545): Ceres Seq. ID no. 12707489
  misc_feature (1)..(1545): Ortholog of  Ceres SEQ ID NO 12586556 as cited in SEQ ID NO 64667
  misc_feature (1)..(1545): Ortholog of  Ceres SEQ ID NO 13660894 as cited in SEQ ID NO 67475

SEQ ID NO: 92053 - protein, 514 aa, Arabidopsis thaliana; identical to SEQ ID NO: 88297
  peptide (1)..(514): Ceres Seq. ID no. 12707490

SEQ ID NO: 92054 - protein, 436 aa, Arabidopsis thaliana; identical to SEQ ID NO: 88298
  peptide (1)..(436): Ceres Seq. ID no. 12707491

SEQ ID NO: 92055 - protein, 426 aa, Arabidopsis thaliana; identical to SEQ ID NO: 88299
  peptide (1)..(426): Ceres Seq. ID no. 12707492

SEQ ID NO: 92056 - DNA, 2412 bp, Arabidopsis thaliana; identical to SEQ ID NO: 88300
  misc_feature (1)..(2412): Ceres Seq. ID no. 12707514
  misc_feature (1)..(2412): Ortholog of  Ceres SEQ ID NO 14315338 as cited in SEQ ID NO 60283

SEQ ID NO: 92057 - protein, 803 aa, Arabidopsis thaliana; identical to SEQ ID NO: 88301
  peptide (1)..(803): Ceres Seq. ID no. 12707515

SEQ ID NO: 92058 - protein, 520 aa, Arabidopsis thaliana; identical to SEQ ID NO: 88302
  peptide (1)..(520): Ceres Seq. ID no. 12707516

SEQ ID NO: 92059 - protein, 490 aa, Arabidopsis thaliana; identical to SEQ ID NO: 88303
  peptide (1)..(490): Ceres Seq. ID no. 12707517

SEQ ID NO: 92060 - DNA, 1291 bp, Arabidopsis thaliana; identical to SEQ ID NO: 88304
  misc_feature (1)..(1291): Ceres Seq. ID no. 12707518
  misc_feature (1)..(1291): Ortholog of  Ceres SEQ ID NO 15224513 as cited in SEQ ID NO 63921

SEQ ID NO: 92061 - protein, 391 aa, Arabidopsis thaliana; identical to SEQ ID NO: 26556
  peptide (1)..(391): Ceres Seq. ID no. 12707519

SEQ ID NO: 92062 - protein, 339 aa, Arabidopsis thaliana; identical to SEQ ID NO: 26557
  peptide (1)..(339): Ceres Seq. ID no. 12707520

SEQ ID NO: 92063 - protein, 294 aa, Arabidopsis thaliana; identical to SEQ ID NO: 26558
  peptide (1)..(294): Ceres Seq. ID no. 12707521

SEQ ID NO: 92064 - DNA, 1068 bp, Arabidopsis thaliana; identical to SEQ ID NO: 88308
  misc_feature (1)..(1068): Ceres Seq. ID no. 12707526
  misc_feature (1)..(1068): Ortholog of  Ceres SEQ ID NO 12364737 as cited in SEQ ID NO 51089
  misc_feature (1)..(1068): Ortholog of  Ceres SEQ ID NO 13595567 as cited in SEQ ID NO 56760
  misc_feature (1)..(1068): Ortholog of  Ceres SEQ ID NO 13655302 as cited in SEQ ID NO 63307
  misc_feature (1)..(1068): Ortholog of  Ceres SEQ ID NO 12625474 as cited in SEQ ID NO 64169
  misc_feature (1)..(1068): Ortholog of  Ceres SEQ ID NO 13597502 as cited in SEQ ID NO 64681

SEQ ID NO: 92065 - protein, 355 aa, Arabidopsis thaliana; identical to SEQ ID NO: 88309
  peptide (1)..(355): Ceres Seq. ID no. 12707527

SEQ ID NO: 92066 - protein, 344 aa, Arabidopsis thaliana; identical to SEQ ID NO: 88310
  peptide (1)..(344): Ceres Seq. ID no. 12707528

SEQ ID NO: 92067 - protein, 343 aa, Arabidopsis thaliana; identical to SEQ ID NO: 88311
  peptide (1)..(343): Ceres Seq. ID no. 12707529

SEQ ID NO: 92068 - DNA, 2499 bp, Arabidopsis thaliana; identical to SEQ ID NO: 88312
  misc_feature (1)..(2499): Ceres Seq. ID no. 12707549
  misc_feature (1)..(2499): Ortholog of  Ceres SEQ ID NO 13599820 as cited in SEQ ID NO 0

SEQ ID NO: 92069 - protein, 832 aa, Arabidopsis thaliana; identical to SEQ ID NO: 88313
  peptide (1)..(832): Ceres Seq. ID no. 12707550

SEQ ID NO: 92070 - protein, 719 aa, Arabidopsis thaliana; identical to SEQ ID NO: 88314
  peptide (1)..(719): Ceres Seq. ID no. 12707551

SEQ ID NO: 92071 - protein, 668 aa, Arabidopsis thaliana; identical to SEQ ID NO: 88315
  peptide (1)..(668): Ceres Seq. ID no. 12707552

SEQ ID NO: 92072 - DNA, 1965 bp, Arabidopsis thaliana; identical to SEQ ID NO: 88316
  misc_feature (1)..(1965): Ceres Seq. ID no. 12707561
  misc_feature (1)..(1965): Ortholog of  Ceres SEQ ID NO 15176685 as cited in SEQ ID NO 58334

SEQ ID NO: 92073 - protein, 654 aa, Arabidopsis thaliana; identical to SEQ ID NO: 88317
  peptide (1)..(654): Ceres Seq. ID no. 12707562

SEQ ID NO: 92074 - protein, 608 aa, Arabidopsis thaliana; identical to SEQ ID NO: 88318
  peptide (1)..(608): Ceres Seq. ID no. 12707563

SEQ ID NO: 92075 - protein, 604 aa, Arabidopsis thaliana; identical to SEQ ID NO: 88319
  peptide (1)..(604): Ceres Seq. ID no. 12707564

SEQ ID NO: 92076 - DNA, 1334 bp, Arabidopsis thaliana; identical to SEQ ID NO: 88320
  misc_feature (1)..(1334): Ceres Seq. ID no. 12707565
  misc_feature (1)..(1334): Ortholog of  Ceres SEQ ID NO 12636774 as cited in SEQ ID NO 372
  misc_feature (1)..(1334): Ortholog of  Ceres SEQ ID NO 13582350 as cited in SEQ ID NO 56734
  misc_feature (1)..(1334): Ortholog of  Ceres SEQ ID NO 12476493 as cited in SEQ ID NO 58163
  misc_feature (1)..(1334): Ortholog of  Ceres SEQ ID NO 12578315 as cited in SEQ ID NO 62451
  misc_feature (1)..(1334): Ortholog of  Ceres SEQ ID NO 12615466 as cited in SEQ ID NO 62761
  misc_feature (1)..(1334): Ortholog of  Ceres SEQ ID NO 13597295 as cited in SEQ ID NO 63743
  misc_feature (1)..(1334): Ortholog of  Ceres SEQ ID NO 12617090 as cited in SEQ ID NO 64005
  misc_feature (1)..(1334): Ortholog of  Ceres SEQ ID NO 15226458 as cited in SEQ ID NO 64042
  misc_feature (1)..(1334): Ortholog of  Ceres SEQ ID NO 13597439 as cited in SEQ ID NO 64081
  misc_feature (1)..(1334): Ortholog of  Ceres SEQ ID NO 13597233 as cited in SEQ ID NO 64370
  misc_feature (1)..(1334): Ortholog of  Ceres SEQ ID NO 13598327 as cited in SEQ ID NO 68040
  misc_feature (1)..(1334): Ortholog of  Ceres SEQ ID NO 13599438 as cited in SEQ ID NO 0

SEQ ID NO: 92077 - protein, 353 aa, Arabidopsis thaliana; identical to SEQ ID NO: 35579
  peptide (1)..(353): Ceres Seq. ID no. 12707566

SEQ ID NO: 92078 - protein, 336 aa, Arabidopsis thaliana; identical to SEQ ID NO: 35580
  peptide (1)..(336): Ceres Seq. ID no. 12707567

SEQ ID NO: 92079 - DNA, 1359 bp, Arabidopsis thaliana; identical to SEQ ID NO: 88323
  misc_feature (1)..(1359): Ceres Seq. ID no. 12707680
  misc_feature (1)..(1359): Ortholog of  Ceres SEQ ID NO 14310235 as cited in SEQ ID NO 20678

SEQ ID NO: 92080 - protein, 452 aa, Arabidopsis thaliana; identical to SEQ ID NO: 88324
  peptide (1)..(452): Ceres Seq. ID no. 12707681

SEQ ID NO: 92081 - protein, 441 aa, Arabidopsis thaliana; identical to SEQ ID NO: 88325
  peptide (1)..(441): Ceres Seq. ID no. 12707682

SEQ ID NO: 92082 - protein, 439 aa, Arabidopsis thaliana; identical to SEQ ID NO: 88326
  peptide (1)..(439): Ceres Seq. ID no. 12707683

SEQ ID NO: 92083 - DNA, 753 bp, Arabidopsis thaliana; identical to SEQ ID NO: 88327
  misc_feature (1)..(753): Ceres Seq. ID no. 12707684
  misc_feature (1)..(753): Ortholog of  Ceres SEQ ID NO 13598319 as cited in SEQ ID NO 68758
  misc_feature (1)..(753): Ortholog of  Ceres SEQ ID NO 15226238 as cited in SEQ ID NO 68840
  misc_feature (1)..(753): Ortholog of  Ceres SEQ ID NO 12635175 as cited in SEQ ID NO 0

SEQ ID NO: 92084 - protein, 250 aa, Arabidopsis thaliana; identical to SEQ ID NO: 88328
  peptide (1)..(250): Ceres Seq. ID no. 12707685

SEQ ID NO: 92085 - protein, 131 aa, Arabidopsis thaliana; identical to SEQ ID NO: 88329
  peptide (1)..(131): Ceres Seq. ID no. 12707686

SEQ ID NO: 92086 - DNA, 1236 bp, Arabidopsis thaliana; identical to SEQ ID NO: 88330
  misc_feature (1)..(1236): Ceres Seq. ID no. 12707687
  misc_feature (1)..(1236): Ortholog of  Ceres SEQ ID NO 14303542 as cited in SEQ ID NO 63539
  misc_feature (1)..(1236): Ortholog of  Ceres SEQ ID NO 13597333 as cited in SEQ ID NO 63974
  misc_feature (1)..(1236): Ortholog of  Ceres SEQ ID NO 12407937 as cited in SEQ ID NO 0

SEQ ID NO: 92087 - protein, 326 aa, Arabidopsis thaliana; identical to SEQ ID NO: 88331
  peptide (1)..(326): Ceres Seq. ID no. 12707688

SEQ ID NO: 92088 - protein, 305 aa, Arabidopsis thaliana; identical to SEQ ID NO: 88332
  peptide (1)..(305): Ceres Seq. ID no. 12707689

SEQ ID NO: 92089 - protein, 217 aa, Arabidopsis thaliana; identical to SEQ ID NO: 88333
  peptide (1)..(217): Ceres Seq. ID no. 12707690

SEQ ID NO: 92090 - DNA, 1506 bp, Arabidopsis thaliana; identical to SEQ ID NO: 88334
  misc_feature (1)..(1506): Ceres Seq. ID no. 12707699
  misc_feature (1)..(1506): Ortholog of  Ceres SEQ ID NO 14314220 as cited in SEQ ID NO 57321

SEQ ID NO: 92091 - protein, 501 aa, Arabidopsis thaliana; identical to SEQ ID NO: 88335
  peptide (1)..(501): Ceres Seq. ID no. 12707700

SEQ ID NO: 92092 - DNA, 960 bp, Arabidopsis thaliana; identical to SEQ ID NO: 88336
  misc_feature (1)..(960): Ceres Seq. ID no. 12707701
  misc_feature (1)..(960): Ortholog of  Ceres SEQ ID NO 14311287 as cited in SEQ ID NO 53177

SEQ ID NO: 92093 - protein, 319 aa, Arabidopsis thaliana; identical to SEQ ID NO: 88337
  peptide (1)..(319): Ceres Seq. ID no. 12707702

SEQ ID NO: 92094 - protein, 234 aa, Arabidopsis thaliana; identical to SEQ ID NO: 88338
  peptide (1)..(234): Ceres Seq. ID no. 12707703

SEQ ID NO: 92095 - DNA, 1842 bp, Arabidopsis thaliana; identical to SEQ ID NO: 88339
  misc_feature (1)..(1842): Ceres Seq. ID no. 12707770
  misc_feature (1)..(1842): Ortholog of  Ceres SEQ ID NO 14311579 as cited in SEQ ID NO 51717

SEQ ID NO: 92096 - protein, 613 aa, Arabidopsis thaliana; identical to SEQ ID NO: 88340
  peptide (1)..(613): Ceres Seq. ID no. 12707771

SEQ ID NO: 92097 - protein, 539 aa, Arabidopsis thaliana; identical to SEQ ID NO: 88341
  peptide (1)..(539): Ceres Seq. ID no. 12707772

SEQ ID NO: 92098 - protein, 523 aa, Arabidopsis thaliana; identical to SEQ ID NO: 88342
  peptide (1)..(523): Ceres Seq. ID no. 12707773

SEQ ID NO: 92099 - DNA, 807 bp, Arabidopsis thaliana; identical to SEQ ID NO: 88343
  misc_feature (1)..(807): Ceres Seq. ID no. 12707778
  misc_feature (1)..(807): Ortholog of  Ceres SEQ ID NO 14302764 as cited in SEQ ID NO 67753
  misc_feature (1)..(807): Ortholog of  Ceres SEQ ID NO 14302291 as cited in SEQ ID NO 68180

SEQ ID NO: 92100 - protein, 268 aa, Arabidopsis thaliana; identical to SEQ ID NO: 88344
  peptide (1)..(268): Ceres Seq. ID no. 12707779

SEQ ID NO: 92101 - protein, 266 aa, Arabidopsis thaliana; identical to SEQ ID NO: 88345
  peptide (1)..(266): Ceres Seq. ID no. 12707780

SEQ ID NO: 92102 - protein, 188 aa, Arabidopsis thaliana; identical to SEQ ID NO: 27258
  peptide (1)..(188): Ceres Seq. ID no. 12707781

SEQ ID NO: 92103 - DNA, 822 bp, Arabidopsis thaliana; identical to SEQ ID NO: 88347
  misc_feature (1)..(822): Ceres Seq. ID no. 12707819
  misc_feature (1)..(822): Ortholog of  Ceres SEQ ID NO 14306062 as cited in SEQ ID NO 57524

SEQ ID NO: 92104 - protein, 180 aa, Arabidopsis thaliana; identical to SEQ ID NO: 27583
  peptide (1)..(180): Ceres Seq. ID no. 12707820

SEQ ID NO: 92105 - protein, 159 aa, Arabidopsis thaliana; identical to SEQ ID NO: 27584
  peptide (1)..(159): Ceres Seq. ID no. 12707821

SEQ ID NO: 92106 - protein, 155 aa, Arabidopsis thaliana; identical to SEQ ID NO: 27585
  peptide (1)..(155): Ceres Seq. ID no. 12707822

SEQ ID NO: 92107 - DNA, 789 bp, Arabidopsis thaliana; identical to SEQ ID NO: 88351
  misc_feature (1)..(789): Ceres Seq. ID no. 12707834
  misc_feature (1)..(789): Ortholog of  Ceres SEQ ID NO 15174883 as cited in SEQ ID NO 53894

SEQ ID NO: 92108 - protein, 262 aa, Arabidopsis thaliana; identical to SEQ ID NO: 88352
  peptide (1)..(262): Ceres Seq. ID no. 12707835

SEQ ID NO: 92109 - protein, 185 aa, Arabidopsis thaliana; identical to SEQ ID NO: 83088
  peptide (1)..(185): Ceres Seq. ID no. 12707836

SEQ ID NO: 92110 - DNA, 1155 bp, Arabidopsis thaliana; identical to SEQ ID NO: 88354
  misc_feature (1)..(1155): Ceres Seq. ID no. 12707906
  misc_feature (1)..(1155): Ortholog of  Ceres SEQ ID NO 13582332 as cited in SEQ ID NO 59890
  misc_feature (1)..(1155): Ortholog of  Ceres SEQ ID NO 13598278 as cited in SEQ ID NO 68456

SEQ ID NO: 92111 - protein, 384 aa, Arabidopsis thaliana; identical to SEQ ID NO: 88355
  peptide (1)..(384): Ceres Seq. ID no. 12707907

SEQ ID NO: 92112 - protein, 370 aa, Arabidopsis thaliana; identical to SEQ ID NO: 88356
  peptide (1)..(370): Ceres Seq. ID no. 12707908

SEQ ID NO: 92113 - protein, 366 aa, Arabidopsis thaliana; identical to SEQ ID NO: 88357
  peptide (1)..(366): Ceres Seq. ID no. 12707909

SEQ ID NO: 92114 - DNA, 1938 bp, Arabidopsis thaliana; identical to SEQ ID NO: 88358
  misc_feature (1)..(1938): Ceres Seq. ID no. 12707910
  misc_feature (1)..(1938): Ortholog of  Ceres SEQ ID NO 15176941 as cited in SEQ ID NO 55559
  misc_feature (1)..(1938): Ortholog of  Ceres SEQ ID NO 13595658 as cited in SEQ ID NO 59888
  misc_feature (1)..(1938): Ortholog of  Ceres SEQ ID NO 13662324 as cited in SEQ ID NO 62162

SEQ ID NO: 92115 - protein, 645 aa, Arabidopsis thaliana; identical to SEQ ID NO: 88359
  peptide (1)..(645): Ceres Seq. ID no. 12707911

SEQ ID NO: 92116 - protein, 495 aa, Arabidopsis thaliana; identical to SEQ ID NO: 88360
  peptide (1)..(495): Ceres Seq. ID no. 12707912

SEQ ID NO: 92117 - protein, 396 aa, Arabidopsis thaliana; identical to SEQ ID NO: 88361
  peptide (1)..(396): Ceres Seq. ID no. 12707913

SEQ ID NO: 92118 - DNA, 774 bp, Arabidopsis thaliana; identical to SEQ ID NO: 88362
  misc_feature (1)..(774): Ceres Seq. ID no. 12707914
  misc_feature (1)..(774): Ortholog of  Ceres SEQ ID NO 15179873 as cited in SEQ ID NO 66846

SEQ ID NO: 92119 - protein, 257 aa, Arabidopsis thaliana; identical to SEQ ID NO: 42493
  peptide (1)..(257): Ceres Seq. ID no. 12707915

SEQ ID NO: 92120 - protein, 233 aa, Arabidopsis thaliana; identical to SEQ ID NO: 42494
  peptide (1)..(233): Ceres Seq. ID no. 12707916

SEQ ID NO: 92121 - protein, 217 aa, Arabidopsis thaliana; identical to SEQ ID NO: 42495
  peptide (1)..(217): Ceres Seq. ID no. 12707917

SEQ ID NO: 92122 - DNA, 1482 bp, Arabidopsis thaliana; identical to SEQ ID NO: 88366
  misc_feature (1)..(1482): Ceres Seq. ID no. 12707924
  misc_feature (1)..(1482): Ortholog of  Ceres SEQ ID NO 14302943 as cited in SEQ ID NO 20446

SEQ ID NO: 92123 - protein, 493 aa, Arabidopsis thaliana; identical to SEQ ID NO: 88367
  peptide (1)..(493): Ceres Seq. ID no. 12707925

SEQ ID NO: 92124 - DNA, 1149 bp, Arabidopsis thaliana; identical to SEQ ID NO: 88368
  misc_feature (1)..(1149): Ceres Seq. ID no. 12708316
  misc_feature (1)..(1149): Ortholog of  Ceres SEQ ID NO 12582601 as cited in SEQ ID NO 51064
  misc_feature (1)..(1149): Ortholog of  Ceres SEQ ID NO 13581092 as cited in SEQ ID NO 54771
  misc_feature (1)..(1149): Ortholog of  Ceres SEQ ID NO 13594298 as cited in SEQ ID NO 57803
  misc_feature (1)..(1149): Ortholog of  Ceres SEQ ID NO 13503476 as cited in SEQ ID NO 61978
  misc_feature (1)..(1149): Ortholog of  Ceres SEQ ID NO 12578438 as cited in SEQ ID NO 62201
  misc_feature (1)..(1149): Ortholog of  Ceres SEQ ID NO 12617675 as cited in SEQ ID NO 64656

SEQ ID NO: 92125 - protein, 296 aa, Arabidopsis thaliana; identical to SEQ ID NO: 29752
  peptide (1)..(296): Ceres Seq. ID no. 12708317

SEQ ID NO: 92126 - protein, 286 aa, Arabidopsis thaliana; identical to SEQ ID NO: 29753
  peptide (1)..(286): Ceres Seq. ID no. 12708318

SEQ ID NO: 92127 - protein, 281 aa, Arabidopsis thaliana; identical to SEQ ID NO: 29754
  peptide (1)..(281): Ceres Seq. ID no. 12708319

SEQ ID NO: 92128 - DNA, 1227 bp, Arabidopsis thaliana; identical to SEQ ID NO: 88372
  misc_feature (1)..(1227): Ceres Seq. ID no. 12708435
  misc_feature (1)..(1227): Ortholog of  Ceres SEQ ID NO 12612314 as cited in SEQ ID NO 51420

SEQ ID NO: 92129 - protein, 408 aa, Arabidopsis thaliana; identical to SEQ ID NO: 88373
  peptide (1)..(408): Ceres Seq. ID no. 12708436

SEQ ID NO: 92130 - protein, 395 aa, Arabidopsis thaliana; identical to SEQ ID NO: 88374
  peptide (1)..(395): Ceres Seq. ID no. 12708437

SEQ ID NO: 92131 - protein, 380 aa, Arabidopsis thaliana; identical to SEQ ID NO: 88375
  peptide (1)..(380): Ceres Seq. ID no. 12708438

SEQ ID NO: 92132 - DNA, 1647 bp, Arabidopsis thaliana; identical to SEQ ID NO: 88376
  misc_feature (1)..(1647): Ceres Seq. ID no. 12708521
  misc_feature (1)..(1647): Ortholog of  Ceres SEQ ID NO 14315317 as cited in SEQ ID NO 58242
  misc_feature (1)..(1647): Ortholog of  Ceres SEQ ID NO 13655375 as cited in SEQ ID NO 63347
  misc_feature (1)..(1647): Ortholog of  Ceres SEQ ID NO 12626166 as cited in SEQ ID NO 64505
  misc_feature (1)..(1647): Ortholog of  Ceres SEQ ID NO 14301599 as cited in SEQ ID NO 65699

SEQ ID NO: 92133 - protein, 347 aa, Arabidopsis thaliana; identical to SEQ ID NO: 42696
  peptide (1)..(347): Ceres Seq. ID no. 12708522

SEQ ID NO: 92134 - protein, 328 aa, Arabidopsis thaliana; identical to SEQ ID NO: 42697
  peptide (1)..(328): Ceres Seq. ID no. 12708523

SEQ ID NO: 92135 - protein, 318 aa, Arabidopsis thaliana; identical to SEQ ID NO: 42698
  peptide (1)..(318): Ceres Seq. ID no. 12708524

SEQ ID NO: 92136 - DNA, 2346 bp, Arabidopsis thaliana; identical to SEQ ID NO: 88380
  misc_feature (1)..(2346): Ceres Seq. ID no. 12708600
  misc_feature (1)..(2346): Ortholog of  Ceres SEQ ID NO 13656177 as cited in SEQ ID NO 64997

SEQ ID NO: 92137 - protein, 781 aa, Arabidopsis thaliana; identical to SEQ ID NO: 88381
  peptide (1)..(781): Ceres Seq. ID no. 12708601

SEQ ID NO: 92138 - protein, 769 aa, Arabidopsis thaliana; identical to SEQ ID NO: 88382
  peptide (1)..(769): Ceres Seq. ID no. 12708602

SEQ ID NO: 92139 - protein, 754 aa, Arabidopsis thaliana; identical to SEQ ID NO: 88383
  peptide (1)..(754): Ceres Seq. ID no. 12708603

SEQ ID NO: 92140 - DNA, 1140 bp, Arabidopsis thaliana; identical to SEQ ID NO: 88384
  misc_feature (1)..(1140): Ceres Seq. ID no. 12708635
  misc_feature (1)..(1140): Ortholog of  Ceres SEQ ID NO 12586556 as cited in SEQ ID NO 64667
  misc_feature (1)..(1140): Ortholog of  Ceres SEQ ID NO 13660894 as cited in SEQ ID NO 67475

SEQ ID NO: 92141 - protein, 379 aa, Arabidopsis thaliana; identical to SEQ ID NO: 73041
  peptide (1)..(379): Ceres Seq. ID no. 12708636

SEQ ID NO: 92142 - protein, 360 aa, Arabidopsis thaliana; identical to SEQ ID NO: 73042
  peptide (1)..(360): Ceres Seq. ID no. 12708637

SEQ ID NO: 92143 - protein, 263 aa, Arabidopsis thaliana; identical to SEQ ID NO: 88387
  peptide (1)..(263): Ceres Seq. ID no. 12708638

SEQ ID NO: 92144 - DNA, 2262 bp, Arabidopsis thaliana; identical to SEQ ID NO: 88388
  misc_feature (1)..(2262): Ceres Seq. ID no. 12708641
  misc_feature (1)..(2262): Ortholog of  Ceres SEQ ID NO 13657138 as cited in SEQ ID NO 65923
  misc_feature (1)..(2262): Ortholog of  Ceres SEQ ID NO 13584744 as cited in SEQ ID NO 69137

SEQ ID NO: 92145 - protein, 753 aa, Arabidopsis thaliana; identical to SEQ ID NO: 88389
  peptide (1)..(753): Ceres Seq. ID no. 12708642

SEQ ID NO: 92146 - protein, 481 aa, Arabidopsis thaliana; identical to SEQ ID NO: 88390
  peptide (1)..(481): Ceres Seq. ID no. 12708643

SEQ ID NO: 92147 - protein, 464 aa, Arabidopsis thaliana; identical to SEQ ID NO: 88391
  peptide (1)..(464): Ceres Seq. ID no. 12708644

SEQ ID NO: 92148 - DNA, 2157 bp, Arabidopsis thaliana; identical to SEQ ID NO: 88392
  misc_feature (1)..(2157): Ceres Seq. ID no. 12708652
  misc_feature (1)..(2157): Ortholog of  Ceres SEQ ID NO 14315774 as cited in SEQ ID NO 20630

SEQ ID NO: 92149 - protein, 718 aa, Arabidopsis thaliana; identical to SEQ ID NO: 88393
  peptide (1)..(718): Ceres Seq. ID no. 12708653

SEQ ID NO: 92150 - protein, 667 aa, Arabidopsis thaliana; identical to SEQ ID NO: 88394
  peptide (1)..(667): Ceres Seq. ID no. 12708654

SEQ ID NO: 92151 - protein, 628 aa, Arabidopsis thaliana; identical to SEQ ID NO: 88395
  peptide (1)..(628): Ceres Seq. ID no. 12708655

SEQ ID NO: 92152 - DNA, 1237 bp, Arabidopsis thaliana; identical to SEQ ID NO: 88396
  misc_feature (1)..(1237): Ceres Seq. ID no. 12708664
  misc_feature (1)..(1237): Ortholog of  Ceres SEQ ID NO 12562215 as cited in SEQ ID NO 20489
  misc_feature (1)..(1237): Ortholog of  Ceres SEQ ID NO 13595548 as cited in SEQ ID NO 51024
  misc_feature (1)..(1237): Ortholog of  Ceres SEQ ID NO 13582350 as cited in SEQ ID NO 56734
  misc_feature (1)..(1237): Ortholog of  Ceres SEQ ID NO 12476493 as cited in SEQ ID NO 58163
  misc_feature (1)..(1237): Ortholog of  Ceres SEQ ID NO 13597295 as cited in SEQ ID NO 63743
  misc_feature (1)..(1237): Ortholog of  Ceres SEQ ID NO 12617090 as cited in SEQ ID NO 64005
  misc_feature (1)..(1237): Ortholog of  Ceres SEQ ID NO 13597439 as cited in SEQ ID NO 64081
  misc_feature (1)..(1237): Ortholog of  Ceres SEQ ID NO 13597233 as cited in SEQ ID NO 64370
  misc_feature (1)..(1237): Ortholog of  Ceres SEQ ID NO 13623850 as cited in SEQ ID NO 0
  misc_feature (1)..(1237): Ortholog of  Ceres SEQ ID NO 14309162 as cited in SEQ ID NO 0

SEQ ID NO: 92153 - protein, 307 aa, Arabidopsis thaliana; identical to SEQ ID NO: 88397
  peptide (1)..(307): Ceres Seq. ID no. 12708665

SEQ ID NO: 92154 - protein, 196 aa, Arabidopsis thaliana; identical to SEQ ID NO: 88398
  peptide (1)..(196): Ceres Seq. ID no. 12708666

SEQ ID NO: 92155 - protein, 182 aa, Arabidopsis thaliana; identical to SEQ ID NO: 88399
  peptide (1)..(182): Ceres Seq. ID no. 12708667

SEQ ID NO: 92156 - DNA, 1092 bp, Arabidopsis thaliana; identical to SEQ ID NO: 88400
  misc_feature (1)..(1092): Ceres Seq. ID no. 12708743
  misc_feature (1)..(1092): Ortholog of  Ceres SEQ ID NO 12611726 as cited in SEQ ID NO 56740
  misc_feature (1)..(1092): Ortholog of  Ceres SEQ ID NO 13658911 as cited in SEQ ID NO 66294
  misc_feature (1)..(1092): Ortholog of  Ceres SEQ ID NO 13660693 as cited in SEQ ID NO 67411

SEQ ID NO: 92157 - protein, 363 aa, Arabidopsis thaliana; identical to SEQ ID NO: 88401
  peptide (1)..(363): Ceres Seq. ID no. 12708744

SEQ ID NO: 92158 - protein, 348 aa, Arabidopsis thaliana; identical to SEQ ID NO: 88402
  peptide (1)..(348): Ceres Seq. ID no. 12708745

SEQ ID NO: 92159 - protein, 252 aa, Arabidopsis thaliana; identical to SEQ ID NO: 88403
  peptide (1)..(252): Ceres Seq. ID no. 12708746

SEQ ID NO: 92160 - DNA, 5322 bp, Arabidopsis thaliana; identical to SEQ ID NO: 88404
  misc_feature (1)..(5322): Ceres Seq. ID no. 12708788
  misc_feature (1)..(5322): Ortholog of  Ceres SEQ ID NO 13580958 as cited in SEQ ID NO 53269
  misc_feature (1)..(5322): Ortholog of  Ceres SEQ ID NO 13623196 as cited in SEQ ID NO 0

SEQ ID NO: 92161 - protein, 1773 aa, Arabidopsis thaliana; identical to SEQ ID NO: 88405
  peptide (1)..(1773): Ceres Seq. ID no. 12708789

SEQ ID NO: 92162 - protein, 1646 aa, Arabidopsis thaliana; identical to SEQ ID NO: 88406
  peptide (1)..(1646): Ceres Seq. ID no. 12708790

SEQ ID NO: 92163 - protein, 1605 aa, Arabidopsis thaliana; identical to SEQ ID NO: 88407
  peptide (1)..(1605): Ceres Seq. ID no. 12708791

SEQ ID NO: 92164 - DNA, 3261 bp, Arabidopsis thaliana; identical to SEQ ID NO: 88408
  misc_feature (1)..(3261): Ceres Seq. ID no. 12708796
  misc_feature (1)..(3261): Ortholog of  Ceres SEQ ID NO 13656160 as cited in SEQ ID NO 64905

SEQ ID NO: 92165 - protein, 1086 aa, Arabidopsis thaliana; identical to SEQ ID NO: 88409
  peptide (1)..(1086): Ceres Seq. ID no. 12708797

SEQ ID NO: 92166 - protein, 1058 aa, Arabidopsis thaliana; identical to SEQ ID NO: 88410
  peptide (1)..(1058): Ceres Seq. ID no. 12708798

SEQ ID NO: 92167 - protein, 993 aa, Arabidopsis thaliana; identical to SEQ ID NO: 88411
  peptide (1)..(993): Ceres Seq. ID no. 12708799

SEQ ID NO: 92168 - DNA, 1305 bp, Arabidopsis thaliana; identical to SEQ ID NO: 88412
  misc_feature (1)..(1305): Ceres Seq. ID no. 12708839
  misc_feature (1)..(1305): Ortholog of  Ceres SEQ ID NO 13594345 as cited in SEQ ID NO 58043
  misc_feature (1)..(1305): Ortholog of  Ceres SEQ ID NO 13597574 as cited in SEQ ID NO 64677
  misc_feature (1)..(1305): Ortholog of  Ceres SEQ ID NO 13662880 as cited in SEQ ID NO 65422
  misc_feature (1)..(1305): Ortholog of  Ceres SEQ ID NO 14302071 as cited in SEQ ID NO 66585
  misc_feature (1)..(1305): Ortholog of  Ceres SEQ ID NO 14316013 as cited in SEQ ID NO 67181
  misc_feature (1)..(1305): Ortholog of  Ceres SEQ ID NO 12779098 as cited in SEQ ID NO 67698
  misc_feature (1)..(1305): Ortholog of  Ceres SEQ ID NO 13596180 as cited in SEQ ID NO 67941
  misc_feature (1)..(1305): Ortholog of  Ceres SEQ ID NO 13591190 as cited in SEQ ID NO 68044

SEQ ID NO: 92169 - protein, 434 aa, Arabidopsis thaliana; identical to SEQ ID NO: 88413
  peptide (1)..(434): Ceres Seq. ID no. 12708840

SEQ ID NO: 92170 - protein, 412 aa, Arabidopsis thaliana; identical to SEQ ID NO: 88414
  peptide (1)..(412): Ceres Seq. ID no. 12708841

SEQ ID NO: 92171 - protein, 306 aa, Arabidopsis thaliana; identical to SEQ ID NO: 88415
  peptide (1)..(306): Ceres Seq. ID no. 12708842

SEQ ID NO: 92172 - DNA, 654 bp, Arabidopsis thaliana; identical to SEQ ID NO: 88416
  misc_feature (1)..(654): Ceres Seq. ID no. 12708847
  misc_feature (1)..(654): Ortholog of  Ceres SEQ ID NO 13594498 as cited in SEQ ID NO 51322
  misc_feature (1)..(654): Ortholog of  Ceres SEQ ID NO 15179033 as cited in SEQ ID NO 0

SEQ ID NO: 92173 - protein, 217 aa, Arabidopsis thaliana; identical to SEQ ID NO: 88417
  peptide (1)..(217): Ceres Seq. ID no. 12708848

SEQ ID NO: 92174 - protein, 167 aa, Arabidopsis thaliana; identical to SEQ ID NO: 88418
  peptide (1)..(167): Ceres Seq. ID no. 12708849

SEQ ID NO: 92175 - protein, 138 aa, Arabidopsis thaliana; identical to SEQ ID NO: 88419
  peptide (1)..(138): Ceres Seq. ID no. 12708850

SEQ ID NO: 92176 - DNA, 2307 bp, Arabidopsis thaliana; identical to SEQ ID NO: 88420
  misc_feature (1)..(2307): Ceres Seq. ID no. 12708856
  misc_feature (1)..(2307): Ortholog of  Ceres SEQ ID NO 14310784 as cited in SEQ ID NO 58503

SEQ ID NO: 92177 - protein, 682 aa, Arabidopsis thaliana; identical to SEQ ID NO: 88421
  peptide (1)..(682): Ceres Seq. ID no. 12708857

SEQ ID NO: 92178 - protein, 577 aa, Arabidopsis thaliana; identical to SEQ ID NO: 88422
  peptide (1)..(577): Ceres Seq. ID no. 12708858

SEQ ID NO: 92179 - protein, 527 aa, Arabidopsis thaliana; identical to SEQ ID NO: 88423
  peptide (1)..(527): Ceres Seq. ID no. 12708859

SEQ ID NO: 92180 - DNA, 777 bp, Arabidopsis thaliana; identical to SEQ ID NO: 88424
  misc_feature (1)..(777): Ceres Seq. ID no. 12708860
  misc_feature (1)..(777): Ortholog of  Ceres SEQ ID NO 14304224 as cited in SEQ ID NO 56350
  misc_feature (1)..(777): Ortholog of  Ceres SEQ ID NO 13597679 as cited in SEQ ID NO 65073

SEQ ID NO: 92181 - protein, 258 aa, Arabidopsis thaliana; identical to SEQ ID NO: 88425
  peptide (1)..(258): Ceres Seq. ID no. 12708861

SEQ ID NO: 92182 - protein, 148 aa, Arabidopsis thaliana; identical to SEQ ID NO: 39956
  peptide (1)..(148): Ceres Seq. ID no. 12708862

SEQ ID NO: 92183 - DNA, 767 bp, Arabidopsis thaliana; identical to SEQ ID NO: 88427
  misc_feature (1)..(767): Ceres Seq. ID no. 12708893
  misc_feature (1)..(767): Ortholog of  Ceres SEQ ID NO 13594647 as cited in SEQ ID NO 52208
  misc_feature (1)..(767): Ortholog of  Ceres SEQ ID NO 13637658 as cited in SEQ ID NO 53077
  misc_feature (1)..(767): Ortholog of  Ceres SEQ ID NO 13664275 as cited in SEQ ID NO 61120
  misc_feature (1)..(767): Ortholog of  Ceres SEQ ID NO 15174168 as cited in SEQ ID NO 61888
  misc_feature (1)..(767): Ortholog of  Ceres SEQ ID NO 12635311 as cited in SEQ ID NO 0
  misc_feature (1)..(767): Ortholog of  Ceres SEQ ID NO 13599510 as cited in SEQ ID NO 0
  misc_feature (1)..(767): Ortholog of  Ceres SEQ ID NO 13599622 as cited in SEQ ID NO 0
  misc_feature (1)..(767): Ortholog of  Ceres SEQ ID NO 13600020 as cited in SEQ ID NO 0

SEQ ID NO: 92184 - protein, 193 aa, Arabidopsis thaliana; identical to SEQ ID NO: 88428
  peptide (1)..(193): Ceres Seq. ID no. 12708894

SEQ ID NO: 92185 - protein, 186 aa, Arabidopsis thaliana; identical to SEQ ID NO: 76280
  peptide (1)..(186): Ceres Seq. ID no. 12708895

SEQ ID NO: 92186 - protein, 151 aa, Arabidopsis thaliana; identical to SEQ ID NO: 76281
  peptide (1)..(151): Ceres Seq. ID no. 12708896

SEQ ID NO: 92187 - DNA, 708 bp, Arabidopsis thaliana; identical to SEQ ID NO: 88431
  misc_feature (1)..(708): Ceres Seq. ID no. 12708910
  misc_feature (1)..(708): Ortholog of  Ceres SEQ ID NO 14304124 as cited in SEQ ID NO 56378
  misc_feature (1)..(708): Ortholog of  Ceres SEQ ID NO 12585331 as cited in SEQ ID NO 62912
  misc_feature (1)..(708): Ortholog of  Ceres SEQ ID NO 13654964 as cited in SEQ ID NO 63176

SEQ ID NO: 92188 - protein, 235 aa, Arabidopsis thaliana; identical to SEQ ID NO: 88432
  peptide (1)..(235): Ceres Seq. ID no. 12708911

SEQ ID NO: 92189 - protein, 218 aa, Arabidopsis thaliana; identical to SEQ ID NO: 88433
  peptide (1)..(218): Ceres Seq. ID no. 12708912

SEQ ID NO: 92190 - DNA, 1464 bp, Arabidopsis thaliana; identical to SEQ ID NO: 88434
  misc_feature (1)..(1464): Ceres Seq. ID no. 12708925
  misc_feature (1)..(1464): Ortholog of  Ceres SEQ ID NO 13646680 as cited in SEQ ID NO 20737

SEQ ID NO: 92191 - protein, 487 aa, Arabidopsis thaliana; identical to SEQ ID NO: 88435
  peptide (1)..(487): Ceres Seq. ID no. 12708926

SEQ ID NO: 92192 - protein, 449 aa, Arabidopsis thaliana; identical to SEQ ID NO: 88436
  peptide (1)..(449): Ceres Seq. ID no. 12708927

SEQ ID NO: 92193 - protein, 414 aa, Arabidopsis thaliana; identical to SEQ ID NO: 88437
  peptide (1)..(414): Ceres Seq. ID no. 12708928

SEQ ID NO: 92194 - DNA, 1585 bp, Arabidopsis thaliana; identical to SEQ ID NO: 88438
  misc_feature (1)..(1585): Ceres Seq. ID no. 12709017
  misc_feature (1)..(1585): Ortholog of  Ceres SEQ ID NO 13597574 as cited in SEQ ID NO 64677
  misc_feature (1)..(1585): Ortholog of  Ceres SEQ ID NO 13597843 as cited in SEQ ID NO 64850
  misc_feature (1)..(1585): Ortholog of  Ceres SEQ ID NO 13597678 as cited in SEQ ID NO 65375
  misc_feature (1)..(1585): Ortholog of  Ceres SEQ ID NO 13596180 as cited in SEQ ID NO 67941
  misc_feature (1)..(1585): Ortholog of  Ceres SEQ ID NO 13591190 as cited in SEQ ID NO 68044
  misc_feature (1)..(1585): Ortholog of  Ceres SEQ ID NO 13595961 as cited in SEQ ID NO 68223

SEQ ID NO: 92195 - protein, 478 aa, Arabidopsis thaliana; identical to SEQ ID NO: 88439
  peptide (1)..(478): Ceres Seq. ID no. 12709018

SEQ ID NO: 92196 - protein, 360 aa, Arabidopsis thaliana; identical to SEQ ID NO: 88440
  peptide (1)..(360): Ceres Seq. ID no. 12709019

SEQ ID NO: 92197 - protein, 355 aa, Arabidopsis thaliana; identical to SEQ ID NO: 88441
  peptide (1)..(355): Ceres Seq. ID no. 12709020

SEQ ID NO: 92198 - DNA, 1494 bp, Arabidopsis thaliana; identical to SEQ ID NO: 88442
  misc_feature (1)..(1494): Ceres Seq. ID no. 12709025
  misc_feature (1)..(1494): Ortholog of  Ceres SEQ ID NO 13597546 as cited in SEQ ID NO 65017
  misc_feature (1)..(1494): Ortholog of  Ceres SEQ ID NO 13654353 as cited in SEQ ID NO 68318

SEQ ID NO: 92199 - protein, 497 aa, Arabidopsis thaliana; identical to SEQ ID NO: 88443
  peptide (1)..(497): Ceres Seq. ID no. 12709026

SEQ ID NO: 92200 - protein, 487 aa, Arabidopsis thaliana; identical to SEQ ID NO: 72130
  peptide (1)..(487): Ceres Seq. ID no. 12709027

SEQ ID NO: 92201 - protein, 458 aa, Arabidopsis thaliana; identical to SEQ ID NO: 72131
  peptide (1)..(458): Ceres Seq. ID no. 12709028

SEQ ID NO: 92202 - DNA, 1110 bp, Arabidopsis thaliana; identical to SEQ ID NO: 88446
  misc_feature (1)..(1110): Ceres Seq. ID no. 12709040
  misc_feature (1)..(1110): Ortholog of  Ceres SEQ ID NO 13597546 as cited in SEQ ID NO 65017

SEQ ID NO: 92203 - protein, 369 aa, Arabidopsis thaliana; identical to SEQ ID NO: 88447
  peptide (1)..(369): Ceres Seq. ID no. 12709041

SEQ ID NO: 92204 - protein, 330 aa, Arabidopsis thaliana; identical to SEQ ID NO: 88448
  peptide (1)..(330): Ceres Seq. ID no. 12709042

SEQ ID NO: 92205 - protein, 318 aa, Arabidopsis thaliana; identical to SEQ ID NO: 88449
  peptide (1)..(318): Ceres Seq. ID no. 12709043

SEQ ID NO: 92206 - DNA, 1533 bp, Arabidopsis thaliana; identical to SEQ ID NO: 88450
  misc_feature (1)..(1533): Ceres Seq. ID no. 12709069
  misc_feature (1)..(1533): Ortholog of  Ceres SEQ ID NO 13594345 as cited in SEQ ID NO 58043
  misc_feature (1)..(1533): Ortholog of  Ceres SEQ ID NO 12614112 as cited in SEQ ID NO 60891
  misc_feature (1)..(1533): Ortholog of  Ceres SEQ ID NO 13597574 as cited in SEQ ID NO 64677
  misc_feature (1)..(1533): Ortholog of  Ceres SEQ ID NO 13662880 as cited in SEQ ID NO 65422
  misc_feature (1)..(1533): Ortholog of  Ceres SEQ ID NO 12779098 as cited in SEQ ID NO 67698
  misc_feature (1)..(1533): Ortholog of  Ceres SEQ ID NO 13591190 as cited in SEQ ID NO 68044
  misc_feature (1)..(1533): Ortholog of  Ceres SEQ ID NO 13596089 as cited in SEQ ID NO 68373

SEQ ID NO: 92207 - protein, 475 aa, Arabidopsis thaliana; identical to SEQ ID NO: 88451
  peptide (1)..(475): Ceres Seq. ID no. 12709070

SEQ ID NO: 92208 - protein, 473 aa, Arabidopsis thaliana; identical to SEQ ID NO: 88452
  peptide (1)..(473): Ceres Seq. ID no. 12709071

SEQ ID NO: 92209 - protein, 465 aa, Arabidopsis thaliana; identical to SEQ ID NO: 88453
  peptide (1)..(465): Ceres Seq. ID no. 12709072

SEQ ID NO: 92210 - DNA, 2346 bp, Arabidopsis thaliana; identical to SEQ ID NO: 88454
  misc_feature (1)..(2346): Ceres Seq. ID no. 12709110
  misc_feature (1)..(2346): Ortholog of  Ceres SEQ ID NO 15180400 as cited in SEQ ID NO 0

SEQ ID NO: 92211 - protein, 781 aa, Arabidopsis thaliana; identical to SEQ ID NO: 88455
  peptide (1)..(781): Ceres Seq. ID no. 12709111

SEQ ID NO: 92212 - protein, 770 aa, Arabidopsis thaliana; identical to SEQ ID NO: 88456
  peptide (1)..(770): Ceres Seq. ID no. 12709112

SEQ ID NO: 92213 - protein, 621 aa, Arabidopsis thaliana; identical to SEQ ID NO: 88457
  peptide (1)..(621): Ceres Seq. ID no. 12709113

SEQ ID NO: 92214 - DNA, 540 bp, Arabidopsis thaliana; identical to SEQ ID NO: 88458
  misc_feature (1)..(540): Ceres Seq. ID no. 12709123
  misc_feature (1)..(540): Ortholog of  Ceres SEQ ID NO 12618205 as cited in SEQ ID NO 65153

SEQ ID NO: 92215 - protein, 179 aa, Arabidopsis thaliana; identical to SEQ ID NO: 71301
  peptide (1)..(179): Ceres Seq. ID no. 12709124

SEQ ID NO: 92216 - DNA, 675 bp, Arabidopsis thaliana; identical to SEQ ID NO: 88460
  misc_feature (1)..(675): Ceres Seq. ID no. 12709166
  misc_feature (1)..(675): Ortholog of  Ceres SEQ ID NO 13586635 as cited in SEQ ID NO 14217
  misc_feature (1)..(675): Ortholog of  Ceres SEQ ID NO 12616285 as cited in SEQ ID NO 63483

SEQ ID NO: 92217 - protein, 224 aa, Arabidopsis thaliana; identical to SEQ ID NO: 88461
  peptide (1)..(224): Ceres Seq. ID no. 12709167

SEQ ID NO: 92218 - protein, 142 aa, Arabidopsis thaliana; identical to SEQ ID NO: 88462
  peptide (1)..(142): Ceres Seq. ID no. 12709168

SEQ ID NO: 92219 - DNA, 3576 bp, Arabidopsis thaliana; identical to SEQ ID NO: 88463
  misc_feature (1)..(3576): Ceres Seq. ID no. 12709336
  misc_feature (1)..(3576): Ortholog of  Ceres SEQ ID NO 14308232 as cited in SEQ ID NO 58659

SEQ ID NO: 92220 - protein, 1191 aa, Arabidopsis thaliana; identical to SEQ ID NO: 88464
  peptide (1)..(1191): Ceres Seq. ID no. 12709337

SEQ ID NO: 92221 - protein, 1182 aa, Arabidopsis thaliana; identical to SEQ ID NO: 88465
  peptide (1)..(1182): Ceres Seq. ID no. 12709338

SEQ ID NO: 92222 - protein, 1141 aa, Arabidopsis thaliana; identical to SEQ ID NO: 88466
  peptide (1)..(1141): Ceres Seq. ID no. 12709339

SEQ ID NO: 92223 - DNA, 3185 bp, Arabidopsis thaliana; identical to SEQ ID NO: 88467
  misc_feature (1)..(3185): Ceres Seq. ID no. 12709411
  misc_feature (1)..(3185): Ortholog of  Ceres SEQ ID NO 13646569 as cited in SEQ ID NO 20745

SEQ ID NO: 92224 - protein, 949 aa, Arabidopsis thaliana; identical to SEQ ID NO: 88468
  peptide (1)..(949): Ceres Seq. ID no. 12709412

SEQ ID NO: 92225 - protein, 882 aa, Arabidopsis thaliana; identical to SEQ ID NO: 88469
  peptide (1)..(882): Ceres Seq. ID no. 12709413

SEQ ID NO: 92226 - protein, 874 aa, Arabidopsis thaliana; identical to SEQ ID NO: 88470
  peptide (1)..(874): Ceres Seq. ID no. 12709414

SEQ ID NO: 92227 - DNA, 1041 bp, Arabidopsis thaliana; identical to SEQ ID NO: 88471
  misc_feature (1)..(1041): Ceres Seq. ID no. 12709624
  misc_feature (1)..(1041): Ortholog of  Ceres SEQ ID NO 13655812 as cited in SEQ ID NO 64743

SEQ ID NO: 92228 - protein, 346 aa, Arabidopsis thaliana; identical to SEQ ID NO: 88472
  peptide (1)..(346): Ceres Seq. ID no. 12709625

SEQ ID NO: 92229 - protein, 318 aa, Arabidopsis thaliana; identical to SEQ ID NO: 88473
  peptide (1)..(318): Ceres Seq. ID no. 12709626

SEQ ID NO: 92230 - protein, 263 aa, Arabidopsis thaliana; identical to SEQ ID NO: 88474
  peptide (1)..(263): Ceres Seq. ID no. 12709627

SEQ ID NO: 92231 - DNA, 1221 bp, Arabidopsis thaliana; identical to SEQ ID NO: 88475
  misc_feature (1)..(1221): Ceres Seq. ID no. 12709659
  misc_feature (1)..(1221): Ortholog of  Ceres SEQ ID NO 15170447 as cited in SEQ ID NO 52849
  misc_feature (1)..(1221): Ortholog of  Ceres SEQ ID NO 13589042 as cited in SEQ ID NO 60626
  misc_feature (1)..(1221): Ortholog of  Ceres SEQ ID NO 14302887 as cited in SEQ ID NO 66146

SEQ ID NO: 92232 - protein, 406 aa, Arabidopsis thaliana; identical to SEQ ID NO: 76958
  peptide (1)..(406): Ceres Seq. ID no. 12709660

SEQ ID NO: 92233 - protein, 396 aa, Arabidopsis thaliana; identical to SEQ ID NO: 76959
  peptide (1)..(396): Ceres Seq. ID no. 12709661

SEQ ID NO: 92234 - protein, 367 aa, Arabidopsis thaliana; identical to SEQ ID NO: 76960
  peptide (1)..(367): Ceres Seq. ID no. 12709662

SEQ ID NO: 92235 - DNA, 1284 bp, Arabidopsis thaliana; identical to SEQ ID NO: 88479
  misc_feature (1)..(1284): Ceres Seq. ID no. 12709704
  misc_feature (1)..(1284): Ortholog of  Ceres SEQ ID NO 14314220 as cited in SEQ ID NO 57321

SEQ ID NO: 92236 - protein, 427 aa, Arabidopsis thaliana; identical to SEQ ID NO: 88480
  peptide (1)..(427): Ceres Seq. ID no. 12709705

SEQ ID NO: 92237 - protein, 359 aa, Arabidopsis thaliana; identical to SEQ ID NO: 88481
  peptide (1)..(359): Ceres Seq. ID no. 12709706

SEQ ID NO: 92238 - protein, 305 aa, Arabidopsis thaliana; identical to SEQ ID NO: 88482
  peptide (1)..(305): Ceres Seq. ID no. 12709707

SEQ ID NO: 92239 - DNA, 969 bp, Arabidopsis thaliana; identical to SEQ ID NO: 88483
  misc_feature (1)..(969): Ceres Seq. ID no. 12709712
  misc_feature (1)..(969): Ortholog of  Ceres SEQ ID NO 13595658 as cited in SEQ ID NO 59888
  misc_feature (1)..(969): Ortholog of  Ceres SEQ ID NO 13661330 as cited in SEQ ID NO 61614
  misc_feature (1)..(969): Ortholog of  Ceres SEQ ID NO 13596025 as cited in SEQ ID NO 62024
  misc_feature (1)..(969): Ortholog of  Ceres SEQ ID NO 13662324 as cited in SEQ ID NO 62162
  misc_feature (1)..(969): Ortholog of  Ceres SEQ ID NO 12625713 as cited in SEQ ID NO 64160
  misc_feature (1)..(969): Ortholog of  Ceres SEQ ID NO 14301782 as cited in SEQ ID NO 66788

SEQ ID NO: 92240 - protein, 322 aa, Arabidopsis thaliana; identical to SEQ ID NO: 88484
  peptide (1)..(322): Ceres Seq. ID no. 12709713

SEQ ID NO: 92241 - DNA, 2166 bp, Arabidopsis thaliana; identical to SEQ ID NO: 88485
  misc_feature (1)..(2166): Ceres Seq. ID no. 12709759
  misc_feature (1)..(2166): Ortholog of  Ceres SEQ ID NO 13586013 as cited in SEQ ID NO 1182

SEQ ID NO: 92242 - protein, 721 aa, Arabidopsis thaliana; identical to SEQ ID NO: 88486
  peptide (1)..(721): Ceres Seq. ID no. 12709760

SEQ ID NO: 92243 - protein, 701 aa, Arabidopsis thaliana; identical to SEQ ID NO: 88487
  peptide (1)..(701): Ceres Seq. ID no. 12709761

SEQ ID NO: 92244 - protein, 684 aa, Arabidopsis thaliana; identical to SEQ ID NO: 88488
  peptide (1)..(684): Ceres Seq. ID no. 12709762

SEQ ID NO: 92245 - DNA, 3201 bp, Arabidopsis thaliana; identical to SEQ ID NO: 88489
  misc_feature (1)..(3201): Ceres Seq. ID no. 12709802
  misc_feature (1)..(3201): Ortholog of  Ceres SEQ ID NO 12613725 as cited in SEQ ID NO 68196

SEQ ID NO: 92246 - protein, 1066 aa, Arabidopsis thaliana; identical to SEQ ID NO: 88490
  peptide (1)..(1066): Ceres Seq. ID no. 12709803

SEQ ID NO: 92247 - protein, 1027 aa, Arabidopsis thaliana; identical to SEQ ID NO: 88491
  peptide (1)..(1027): Ceres Seq. ID no. 12709804

SEQ ID NO: 92248 - protein, 1012 aa, Arabidopsis thaliana; identical to SEQ ID NO: 88492
  peptide (1)..(1012): Ceres Seq. ID no. 12709805

SEQ ID NO: 92249 - DNA, 3591 bp, Arabidopsis thaliana; identical to SEQ ID NO: 88493
  misc_feature (1)..(3591): Ceres Seq. ID no. 12709809
  misc_feature (1)..(3591): Ortholog of  Ceres SEQ ID NO 13600310 as cited in SEQ ID NO 5086

SEQ ID NO: 92250 - protein, 1196 aa, Arabidopsis thaliana; identical to SEQ ID NO: 88494
  peptide (1)..(1196): Ceres Seq. ID no. 12709810

SEQ ID NO: 92251 - protein, 1160 aa, Arabidopsis thaliana; identical to SEQ ID NO: 71693
  peptide (1)..(1160): Ceres Seq. ID no. 12709811

SEQ ID NO: 92252 - protein, 1145 aa, Arabidopsis thaliana; identical to SEQ ID NO: 71694
  peptide (1)..(1145): Ceres Seq. ID no. 12709812

SEQ ID NO: 92253 - DNA, 1212 bp, Arabidopsis thaliana; identical to SEQ ID NO: 88497
  misc_feature (1)..(1212): Ceres Seq. ID no. 12709921
  misc_feature (1)..(1212): Ortholog of  Ceres SEQ ID NO 13659033 as cited in SEQ ID NO 66372
  misc_feature (1)..(1212): Ortholog of  Ceres SEQ ID NO 13655724 as cited in SEQ ID NO 68973
  misc_feature (1)..(1212): Ortholog of  Ceres SEQ ID NO 12625899 as cited in SEQ ID NO 69079

SEQ ID NO: 92254 - protein, 403 aa, Arabidopsis thaliana; identical to SEQ ID NO: 88498
  peptide (1)..(403): Ceres Seq. ID no. 12709922

SEQ ID NO: 92255 - protein, 276 aa, Arabidopsis thaliana; identical to SEQ ID NO: 88499
  peptide (1)..(276): Ceres Seq. ID no. 12709923

SEQ ID NO: 92256 - protein, 262 aa, Arabidopsis thaliana; identical to SEQ ID NO: 88500
  peptide (1)..(262): Ceres Seq. ID no. 12709924

SEQ ID NO: 92257 - DNA, 652 bp, Arabidopsis thaliana; identical to SEQ ID NO: 88501
  misc_feature (1)..(652): Ceres Seq. ID no. 12709940
  misc_feature (1)..(652): Ortholog of  Ceres SEQ ID NO 12610253 as cited in SEQ ID NO 56230

SEQ ID NO: 92258 - protein, 172 aa, Arabidopsis thaliana; identical to SEQ ID NO: 88502
  peptide (1)..(172): Ceres Seq. ID no. 12709941

SEQ ID NO: 92259 - protein, 153 aa, Arabidopsis thaliana; identical to SEQ ID NO: 88503
  peptide (1)..(153): Ceres Seq. ID no. 12709942

SEQ ID NO: 92260 - DNA, 1159 bp, Arabidopsis thaliana; identical to SEQ ID NO: 88504
  misc_feature (1)..(1159): Ceres Seq. ID no. 12710014
  misc_feature (1)..(1159): Ortholog of  Ceres SEQ ID NO 15178797 as cited in SEQ ID NO 1152
  misc_feature (1)..(1159): Ortholog of  Ceres SEQ ID NO 15175688 as cited in SEQ ID NO 60465
  misc_feature (1)..(1159): Ortholog of  Ceres SEQ ID NO 13495628 as cited in SEQ ID NO 60727

SEQ ID NO: 92261 - protein, 337 aa, Arabidopsis thaliana; identical to SEQ ID NO: 23122
  peptide (1)..(337): Ceres Seq. ID no. 12710015

SEQ ID NO: 92262 - protein, 330 aa, Arabidopsis thaliana; identical to SEQ ID NO: 23123
  peptide (1)..(330): Ceres Seq. ID no. 12710016

SEQ ID NO: 92263 - protein, 326 aa, Arabidopsis thaliana; identical to SEQ ID NO: 23124
  peptide (1)..(326): Ceres Seq. ID no. 12710017

SEQ ID NO: 92264 - DNA, 1113 bp, Arabidopsis thaliana; identical to SEQ ID NO: 88508
  misc_feature (1)..(1113): Ceres Seq. ID no. 12710075
  misc_feature (1)..(1113): Ortholog of  Ceres SEQ ID NO 13593854 as cited in SEQ ID NO 53403
  misc_feature (1)..(1113): Ortholog of  Ceres SEQ ID NO 12581680 as cited in SEQ ID NO 55019

SEQ ID NO: 92265 - protein, 370 aa, Arabidopsis thaliana; identical to SEQ ID NO: 88509
  peptide (1)..(370): Ceres Seq. ID no. 12710076

SEQ ID NO: 92266 - protein, 359 aa, Arabidopsis thaliana; identical to SEQ ID NO: 88510
  peptide (1)..(359): Ceres Seq. ID no. 12710077

SEQ ID NO: 92267 - protein, 330 aa, Arabidopsis thaliana; identical to SEQ ID NO: 88511
  peptide (1)..(330): Ceres Seq. ID no. 12710078

SEQ ID NO: 92268 - DNA, 852 bp, Arabidopsis thaliana; identical to SEQ ID NO: 88512
  misc_feature (1)..(852): Ceres Seq. ID no. 12710123
  misc_feature (1)..(852): Ortholog of  Ceres SEQ ID NO 14312148 as cited in SEQ ID NO 57263

SEQ ID NO: 92269 - protein, 283 aa, Arabidopsis thaliana; identical to SEQ ID NO: 88513
  peptide (1)..(283): Ceres Seq. ID no. 12710124

SEQ ID NO: 92270 - protein, 282 aa, Arabidopsis thaliana; identical to SEQ ID NO: 88514
  peptide (1)..(282): Ceres Seq. ID no. 12710125

SEQ ID NO: 92271 - protein, 262 aa, Arabidopsis thaliana; identical to SEQ ID NO: 88515
  peptide (1)..(262): Ceres Seq. ID no. 12710126

SEQ ID NO: 92272 - DNA, 2559 bp, Arabidopsis thaliana; identical to SEQ ID NO: 88516
  misc_feature (1)..(2559): Ceres Seq. ID no. 12710165
  misc_feature (1)..(2559): Ortholog of  Ceres SEQ ID NO 15172609 as cited in SEQ ID NO 61938
  misc_feature (1)..(2559): Ortholog of  Ceres SEQ ID NO 13595870 as cited in SEQ ID NO 62101
  misc_feature (1)..(2559): Ortholog of  Ceres SEQ ID NO 13590241 as cited in SEQ ID NO 63878
  misc_feature (1)..(2559): Ortholog of  Ceres SEQ ID NO 13657939 as cited in SEQ ID NO 66349
  misc_feature (1)..(2559): Ortholog of  Ceres SEQ ID NO 13660597 as cited in SEQ ID NO 67655
  misc_feature (1)..(2559): Ortholog of  Ceres SEQ ID NO 13654484 as cited in SEQ ID NO 67717

SEQ ID NO: 92273 - protein, 852 aa, Arabidopsis thaliana; identical to SEQ ID NO: 88517
  peptide (1)..(852): Ceres Seq. ID no. 12710166

SEQ ID NO: 92274 - protein, 761 aa, Arabidopsis thaliana; identical to SEQ ID NO: 42290
  peptide (1)..(761): Ceres Seq. ID no. 12710167

SEQ ID NO: 92275 - protein, 723 aa, Arabidopsis thaliana; identical to SEQ ID NO: 42291
  peptide (1)..(723): Ceres Seq. ID no. 12710168

SEQ ID NO: 92276 - DNA, 588 bp, Arabidopsis thaliana; identical to SEQ ID NO: 88520
  misc_feature (1)..(588): Ceres Seq. ID no. 12710245
  misc_feature (1)..(588): Ortholog of  Ceres SEQ ID NO 13595210 as cited in SEQ ID NO 56285

SEQ ID NO: 92277 - protein, 195 aa, Arabidopsis thaliana; identical to SEQ ID NO: 88521
  peptide (1)..(195): Ceres Seq. ID no. 12710246

SEQ ID NO: 92278 - protein, 193 aa, Arabidopsis thaliana; identical to SEQ ID NO: 88522
  peptide (1)..(193): Ceres Seq. ID no. 12710247

SEQ ID NO: 92279 - DNA, 2730 bp, Arabidopsis thaliana; identical to SEQ ID NO: 88523
  misc_feature (1)..(2730): Ceres Seq. ID no. 12710256
  misc_feature (1)..(2730): Ortholog of  Ceres SEQ ID NO 14308747 as cited in SEQ ID NO 55372

SEQ ID NO: 92280 - protein, 909 aa, Arabidopsis thaliana; identical to SEQ ID NO: 88524
  peptide (1)..(909): Ceres Seq. ID no. 12710257

SEQ ID NO: 92281 - protein, 882 aa, Arabidopsis thaliana; identical to SEQ ID NO: 88525
  peptide (1)..(882): Ceres Seq. ID no. 12710258

SEQ ID NO: 92282 - protein, 841 aa, Arabidopsis thaliana; identical to SEQ ID NO: 88526
  peptide (1)..(841): Ceres Seq. ID no. 12710259

SEQ ID NO: 92283 - DNA, 1083 bp, Arabidopsis thaliana; identical to SEQ ID NO: 88527
  misc_feature (1)..(1083): Ceres Seq. ID no. 12710287
  misc_feature (1)..(1083): Ortholog of  Ceres SEQ ID NO 12364737 as cited in SEQ ID NO 51089
  misc_feature (1)..(1083): Ortholog of  Ceres SEQ ID NO 14306553 as cited in SEQ ID NO 53121
  misc_feature (1)..(1083): Ortholog of  Ceres SEQ ID NO 13582301 as cited in SEQ ID NO 56509
  misc_feature (1)..(1083): Ortholog of  Ceres SEQ ID NO 13595567 as cited in SEQ ID NO 56760
  misc_feature (1)..(1083): Ortholog of  Ceres SEQ ID NO 13655302 as cited in SEQ ID NO 63307
  misc_feature (1)..(1083): Ortholog of  Ceres SEQ ID NO 13597380 as cited in SEQ ID NO 64054
  misc_feature (1)..(1083): Ortholog of  Ceres SEQ ID NO 12625474 as cited in SEQ ID NO 64169
  misc_feature (1)..(1083): Ortholog of  Ceres SEQ ID NO 13597502 as cited in SEQ ID NO 64681
  misc_feature (1)..(1083): Ortholog of  Ceres SEQ ID NO 15180805 as cited in SEQ ID NO 0

SEQ ID NO: 92284 - protein, 360 aa, Arabidopsis thaliana; identical to SEQ ID NO: 88528
  peptide (1)..(360): Ceres Seq. ID no. 12710288

SEQ ID NO: 92285 - DNA, 1250 bp, Arabidopsis thaliana; identical to SEQ ID NO: 88529
  misc_feature (1)..(1250): Ceres Seq. ID no. 12710302
  misc_feature (1)..(1250): Ortholog of  Ceres SEQ ID NO 13655812 as cited in SEQ ID NO 64743
  misc_feature (1)..(1250): Ortholog of  Ceres SEQ ID NO 15178828 as cited in SEQ ID NO 0

SEQ ID NO: 92286 - protein, 282 aa, Arabidopsis thaliana; identical to SEQ ID NO: 42540
  peptide (1)..(282): Ceres Seq. ID no. 12710303

SEQ ID NO: 92287 - protein, 258 aa, Arabidopsis thaliana; identical to SEQ ID NO: 21781
  peptide (1)..(258): Ceres Seq. ID no. 12710304

SEQ ID NO: 92288 - protein, 254 aa, Arabidopsis thaliana; identical to SEQ ID NO: 21782
  peptide (1)..(254): Ceres Seq. ID no. 12710305

SEQ ID NO: 92289 - DNA, 1152 bp, Arabidopsis thaliana; identical to SEQ ID NO: 88533
  misc_feature (1)..(1152): Ceres Seq. ID no. 12710436
  misc_feature (1)..(1152): Ortholog of  Ceres SEQ ID NO 15171549 as cited in SEQ ID NO 59640

SEQ ID NO: 92290 - protein, 383 aa, Arabidopsis thaliana; identical to SEQ ID NO: 88534
  peptide (1)..(383): Ceres Seq. ID no. 12710437

SEQ ID NO: 92291 - protein, 255 aa, Arabidopsis thaliana; identical to SEQ ID NO: 88535
  peptide (1)..(255): Ceres Seq. ID no. 12710438

SEQ ID NO: 92292 - protein, 203 aa, Arabidopsis thaliana; identical to SEQ ID NO: 84471
  peptide (1)..(203): Ceres Seq. ID no. 12710439

SEQ ID NO: 92293 - DNA, 1080 bp, Arabidopsis thaliana; identical to SEQ ID NO: 88537
  misc_feature (1)..(1080): Ceres Seq. ID no. 12710484
  misc_feature (1)..(1080): Ortholog of  Ceres SEQ ID NO 14312266 as cited in SEQ ID NO 59225

SEQ ID NO: 92294 - protein, 359 aa, Arabidopsis thaliana; identical to SEQ ID NO: 88538
  peptide (1)..(359): Ceres Seq. ID no. 12710485

SEQ ID NO: 92295 - protein, 189 aa, Arabidopsis thaliana; identical to SEQ ID NO: 88539
  peptide (1)..(189): Ceres Seq. ID no. 12710486

SEQ ID NO: 92296 - DNA, 2382 bp, Arabidopsis thaliana; identical to SEQ ID NO: 88540
  misc_feature (1)..(2382): Ceres Seq. ID no. 12710524
  misc_feature (1)..(2382): Ortholog of  Ceres SEQ ID NO 13596194 as cited in SEQ ID NO 68484

SEQ ID NO: 92297 - protein, 793 aa, Arabidopsis thaliana; identical to SEQ ID NO: 88541
  peptide (1)..(793): Ceres Seq. ID no. 12710525

SEQ ID NO: 92298 - protein, 657 aa, Arabidopsis thaliana; identical to SEQ ID NO: 88542
  peptide (1)..(657): Ceres Seq. ID no. 12710526

SEQ ID NO: 92299 - protein, 487 aa, Arabidopsis thaliana; identical to SEQ ID NO: 88543
  peptide (1)..(487): Ceres Seq. ID no. 12710527

SEQ ID NO: 92300 - DNA, 1416 bp, Arabidopsis thaliana; identical to SEQ ID NO: 88544
  misc_feature (1)..(1416): Ceres Seq. ID no. 12710554
  misc_feature (1)..(1416): Ortholog of  Ceres SEQ ID NO 13597732 as cited in SEQ ID NO 64810
  misc_feature (1)..(1416): Ortholog of  Ceres SEQ ID NO 14301912 as cited in SEQ ID NO 67786

SEQ ID NO: 92301 - protein, 471 aa, Arabidopsis thaliana; identical to SEQ ID NO: 77200
  peptide (1)..(471): Ceres Seq. ID no. 12710555

SEQ ID NO: 92302 - protein, 347 aa, Arabidopsis thaliana; identical to SEQ ID NO: 88546
  peptide (1)..(347): Ceres Seq. ID no. 12710556

SEQ ID NO: 92303 - protein, 256 aa, Arabidopsis thaliana; identical to SEQ ID NO: 88547
  peptide (1)..(256): Ceres Seq. ID no. 12710557

SEQ ID NO: 92304 - DNA, 1799 bp, Arabidopsis thaliana; identical to SEQ ID NO: 88548
  misc_feature (1)..(1799): Ceres Seq. ID no. 12710588
  misc_feature (1)..(1799): Ortholog of  Ceres SEQ ID NO 14311535 as cited in SEQ ID NO 51559
  misc_feature (1)..(1799): Ortholog of  Ceres SEQ ID NO 15176200 as cited in SEQ ID NO 55188

SEQ ID NO: 92305 - protein, 502 aa, Arabidopsis thaliana; identical to SEQ ID NO: 88549
  peptide (1)..(502): Ceres Seq. ID no. 12710589

SEQ ID NO: 92306 - protein, 487 aa, Arabidopsis thaliana; identical to SEQ ID NO: 88550
  peptide (1)..(487): Ceres Seq. ID no. 12710590

SEQ ID NO: 92307 - protein, 455 aa, Arabidopsis thaliana; identical to SEQ ID NO: 88551
  peptide (1)..(455): Ceres Seq. ID no. 12710591

SEQ ID NO: 92308 - DNA, 663 bp, Arabidopsis thaliana; identical to SEQ ID NO: 88552
  misc_feature (1)..(663): Ceres Seq. ID no. 12710652
  misc_feature (1)..(663): Ortholog of  Ceres SEQ ID NO 12609146 as cited in SEQ ID NO 52118
  misc_feature (1)..(663): Ortholog of  Ceres SEQ ID NO 14316158 as cited in SEQ ID NO 52413
  misc_feature (1)..(663): Ortholog of  Ceres SEQ ID NO 13638136 as cited in SEQ ID NO 58644
  misc_feature (1)..(663): Ortholog of  Ceres SEQ ID NO 12587035 as cited in SEQ ID NO 63605

SEQ ID NO: 92309 - protein, 220 aa, Arabidopsis thaliana; identical to SEQ ID NO: 88553
  peptide (1)..(220): Ceres Seq. ID no. 12710653

SEQ ID NO: 92310 - protein, 135 aa, Arabidopsis thaliana; identical to SEQ ID NO: 88554
  peptide (1)..(135): Ceres Seq. ID no. 12710654

SEQ ID NO: 92311 - DNA, 958 bp, Arabidopsis thaliana; identical to SEQ ID NO: 88555
  misc_feature (1)..(958): Ceres Seq. ID no. 12710655
  misc_feature (1)..(958): Ortholog of  Ceres SEQ ID NO 13591776 as cited in SEQ ID NO 20695
  misc_feature (1)..(958): Ortholog of  Ceres SEQ ID NO 13595072 as cited in SEQ ID NO 55971

SEQ ID NO: 92312 - protein, 265 aa, Arabidopsis thaliana; identical to SEQ ID NO: 88556
  peptide (1)..(265): Ceres Seq. ID no. 12710656

SEQ ID NO: 92313 - protein, 229 aa, Arabidopsis thaliana; identical to SEQ ID NO: 88557
  peptide (1)..(229): Ceres Seq. ID no. 12710657

SEQ ID NO: 92314 - protein, 160 aa, Arabidopsis thaliana; identical to SEQ ID NO: 25132
  peptide (1)..(160): Ceres Seq. ID no. 12710658

SEQ ID NO: 92315 - DNA, 1083 bp, Arabidopsis thaliana; identical to SEQ ID NO: 88559
  misc_feature (1)..(1083): Ceres Seq. ID no. 12710909
  misc_feature (1)..(1083): Ortholog of  Ceres SEQ ID NO 15226408 as cited in SEQ ID NO 55563

SEQ ID NO: 92316 - protein, 360 aa, Arabidopsis thaliana; identical to SEQ ID NO: 88560
  peptide (1)..(360): Ceres Seq. ID no. 12710910

SEQ ID NO: 92317 - protein, 349 aa, Arabidopsis thaliana; identical to SEQ ID NO: 88561
  peptide (1)..(349): Ceres Seq. ID no. 12710911

SEQ ID NO: 92318 - protein, 342 aa, Arabidopsis thaliana; identical to SEQ ID NO: 88562
  peptide (1)..(342): Ceres Seq. ID no. 12710912

SEQ ID NO: 92319 - DNA, 501 bp, Arabidopsis thaliana; identical to SEQ ID NO: 88563
  misc_feature (1)..(501): Ceres Seq. ID no. 12710913
  misc_feature (1)..(501): Ortholog of  Ceres SEQ ID NO 13584023 as cited in SEQ ID NO 63516

SEQ ID NO: 92320 - protein, 166 aa, Arabidopsis thaliana; identical to SEQ ID NO: 47917
  peptide (1)..(166): Ceres Seq. ID no. 12710914

SEQ ID NO: 92321 - protein, 84 aa, Arabidopsis thaliana; identical to SEQ ID NO: 88565
  peptide (1)..(84): Ceres Seq. ID no. 12710915

SEQ ID NO: 92322 - DNA, 1724 bp, Arabidopsis thaliana; identical to SEQ ID NO: 88566
  misc_feature (1)..(1724): Ceres Seq. ID no. 12710988
  misc_feature (1)..(1724): Ortholog of  Ceres SEQ ID NO 15227026 as cited in SEQ ID NO 52193
  misc_feature (1)..(1724): Ortholog of  Ceres SEQ ID NO 15177994 as cited in SEQ ID NO 55641
  misc_feature (1)..(1724): Ortholog of  Ceres SEQ ID NO 13595454 as cited in SEQ ID NO 56502

SEQ ID NO: 92323 - protein, 314 aa, Arabidopsis thaliana; identical to SEQ ID NO: 88567
  peptide (1)..(314): Ceres Seq. ID no. 12710989

SEQ ID NO: 92324 - protein, 261 aa, Arabidopsis thaliana; identical to SEQ ID NO: 42859
  peptide (1)..(261): Ceres Seq. ID no. 12710990

SEQ ID NO: 92325 - protein, 243 aa, Arabidopsis thaliana; identical to SEQ ID NO: 42860
  peptide (1)..(243): Ceres Seq. ID no. 12710991

SEQ ID NO: 92326 - DNA, 894 bp, Arabidopsis thaliana; identical to SEQ ID NO: 88570
  misc_feature (1)..(894): Ceres Seq. ID no. 12710992
  misc_feature (1)..(894): Ortholog of  Ceres SEQ ID NO 15180374 as cited in SEQ ID NO 0

SEQ ID NO: 92327 - protein, 165 aa, Arabidopsis thaliana; identical to SEQ ID NO: 41188
  peptide (1)..(165): Ceres Seq. ID no. 12710993

SEQ ID NO: 92328 - protein, 159 aa, Arabidopsis thaliana; identical to SEQ ID NO: 41189
  peptide (1)..(159): Ceres Seq. ID no. 12710994

SEQ ID NO: 92329 - protein, 157 aa, Arabidopsis thaliana; identical to SEQ ID NO: 41190
  peptide (1)..(157): Ceres Seq. ID no. 12710995

SEQ ID NO: 92330 - DNA, 1308 bp, Arabidopsis thaliana; identical to SEQ ID NO: 88574
  misc_feature (1)..(1308): Ceres Seq. ID no. 12710999
  misc_feature (1)..(1308): Ortholog of  Ceres SEQ ID NO 13663419 as cited in SEQ ID NO 66561

SEQ ID NO: 92331 - protein, 435 aa, Arabidopsis thaliana; identical to SEQ ID NO: 88575
  peptide (1)..(435): Ceres Seq. ID no. 12711000

SEQ ID NO: 92332 - protein, 333 aa, Arabidopsis thaliana; identical to SEQ ID NO: 88576
  peptide (1)..(333): Ceres Seq. ID no. 12711001

SEQ ID NO: 92333 - protein, 308 aa, Arabidopsis thaliana; identical to SEQ ID NO: 88577
  peptide (1)..(308): Ceres Seq. ID no. 12711002

SEQ ID NO: 92334 - DNA, 1563 bp, Arabidopsis thaliana; identical to SEQ ID NO: 88578
  misc_feature (1)..(1563): Ceres Seq. ID no. 12711003
  misc_feature (1)..(1563): Ortholog of  Ceres SEQ ID NO 15176532 as cited in SEQ ID NO 58184
  misc_feature (1)..(1563): Ortholog of  Ceres SEQ ID NO 13597546 as cited in SEQ ID NO 65017
  misc_feature (1)..(1563): Ortholog of  Ceres SEQ ID NO 14307908 as cited in SEQ ID NO 67189
  misc_feature (1)..(1563): Ortholog of  Ceres SEQ ID NO 13654353 as cited in SEQ ID NO 68318

SEQ ID NO: 92335 - protein, 520 aa, Arabidopsis thaliana; identical to SEQ ID NO: 88579
  peptide (1)..(520): Ceres Seq. ID no. 12711004

SEQ ID NO: 92336 - protein, 391 aa, Arabidopsis thaliana; identical to SEQ ID NO: 88580
  peptide (1)..(391): Ceres Seq. ID no. 12711005

SEQ ID NO: 92337 - protein, 349 aa, Arabidopsis thaliana; identical to SEQ ID NO: 88581
  peptide (1)..(349): Ceres Seq. ID no. 12711006

SEQ ID NO: 92338 - DNA, 1623 bp, Arabidopsis thaliana; identical to SEQ ID NO: 88582
  misc_feature (1)..(1623): Ceres Seq. ID no. 12711037
  misc_feature (1)..(1623): Ortholog of  Ceres SEQ ID NO 15179554 as cited in SEQ ID NO 1174
  misc_feature (1)..(1623): Ortholog of  Ceres SEQ ID NO 15177814 as cited in SEQ ID NO 55489

SEQ ID NO: 92339 - protein, 540 aa, Arabidopsis thaliana; identical to SEQ ID NO: 88583
  peptide (1)..(540): Ceres Seq. ID no. 12711038

SEQ ID NO: 92340 - protein, 490 aa, Arabidopsis thaliana; identical to SEQ ID NO: 88584
  peptide (1)..(490): Ceres Seq. ID no. 12711039

SEQ ID NO: 92341 - protein, 464 aa, Arabidopsis thaliana; identical to SEQ ID NO: 88585
  peptide (1)..(464): Ceres Seq. ID no. 12711040

SEQ ID NO: 92342 - DNA, 3009 bp, Arabidopsis thaliana; identical to SEQ ID NO: 88586
  misc_feature (1)..(3009): Ceres Seq. ID no. 12711064
  misc_feature (1)..(3009): Ortholog of  Ceres SEQ ID NO 13593889 as cited in SEQ ID NO 53305
  misc_feature (1)..(3009): Ortholog of  Ceres SEQ ID NO 13581959 as cited in SEQ ID NO 56156

SEQ ID NO: 92343 - protein, 1002 aa, Arabidopsis thaliana; identical to SEQ ID NO: 88587
  peptide (1)..(1002): Ceres Seq. ID no. 12711065

SEQ ID NO: 92344 - protein, 1000 aa, Arabidopsis thaliana; identical to SEQ ID NO: 88588
  peptide (1)..(1000): Ceres Seq. ID no. 12711066

SEQ ID NO: 92345 - protein, 998 aa, Arabidopsis thaliana; identical to SEQ ID NO: 88589
  peptide (1)..(998): Ceres Seq. ID no. 12711067

SEQ ID NO: 92346 - DNA, 3042 bp, Arabidopsis thaliana; identical to SEQ ID NO: 88590
  misc_feature (1)..(3042): Ceres Seq. ID no. 12711084
  misc_feature (1)..(3042): Ortholog of  Ceres SEQ ID NO 13600310 as cited in SEQ ID NO 5086

SEQ ID NO: 92347 - protein, 1013 aa, Arabidopsis thaliana; identical to SEQ ID NO: 88591
  peptide (1)..(1013): Ceres Seq. ID no. 12711085

SEQ ID NO: 92348 - protein, 1010 aa, Arabidopsis thaliana; identical to SEQ ID NO: 88592
  peptide (1)..(1010): Ceres Seq. ID no. 12711086

SEQ ID NO: 92349 - protein, 930 aa, Arabidopsis thaliana; identical to SEQ ID NO: 88593
  peptide (1)..(930): Ceres Seq. ID no. 12711087

SEQ ID NO: 92350 - DNA, 1683 bp, Arabidopsis thaliana; identical to SEQ ID NO: 88594
  misc_feature (1)..(1683): Ceres Seq. ID no. 12711092
  misc_feature (1)..(1683): Ortholog of  Ceres SEQ ID NO 13597574 as cited in SEQ ID NO 64677
  misc_feature (1)..(1683): Ortholog of  Ceres SEQ ID NO 13597843 as cited in SEQ ID NO 64850
  misc_feature (1)..(1683): Ortholog of  Ceres SEQ ID NO 12617417 as cited in SEQ ID NO 65089
  misc_feature (1)..(1683): Ortholog of  Ceres SEQ ID NO 13597678 as cited in SEQ ID NO 65375
  misc_feature (1)..(1683): Ortholog of  Ceres SEQ ID NO 12779098 as cited in SEQ ID NO 67698
  misc_feature (1)..(1683): Ortholog of  Ceres SEQ ID NO 13596180 as cited in SEQ ID NO 67941
  misc_feature (1)..(1683): Ortholog of  Ceres SEQ ID NO 13591190 as cited in SEQ ID NO 68044
  misc_feature (1)..(1683): Ortholog of  Ceres SEQ ID NO 13595961 as cited in SEQ ID NO 68223

SEQ ID NO: 92351 - protein, 560 aa, Arabidopsis thaliana; identical to SEQ ID NO: 88595
  peptide (1)..(560): Ceres Seq. ID no. 12711093

SEQ ID NO: 92352 - protein, 535 aa, Arabidopsis thaliana; identical to SEQ ID NO: 88596
  peptide (1)..(535): Ceres Seq. ID no. 12711094

SEQ ID NO: 92353 - protein, 462 aa, Arabidopsis thaliana; identical to SEQ ID NO: 88597
  peptide (1)..(462): Ceres Seq. ID no. 12711095

SEQ ID NO: 92354 - DNA, 987 bp, Arabidopsis thaliana; identical to SEQ ID NO: 88598
  misc_feature (1)..(987): Ceres Seq. ID no. 12711102
  misc_feature (1)..(987): Ortholog of  Ceres SEQ ID NO 13664220 as cited in SEQ ID NO 61151
  misc_feature (1)..(987): Ortholog of  Ceres SEQ ID NO 13597477 as cited in SEQ ID NO 65160

SEQ ID NO: 92355 - protein, 328 aa, Arabidopsis thaliana; identical to SEQ ID NO: 88599
  peptide (1)..(328): Ceres Seq. ID no. 12711103

SEQ ID NO: 92356 - DNA, 1344 bp, Arabidopsis thaliana; identical to SEQ ID NO: 88600
  misc_feature (1)..(1344): Ceres Seq. ID no. 12711141
  misc_feature (1)..(1344): Ortholog of  Ceres SEQ ID NO 14301471 as cited in SEQ ID NO 68064
  misc_feature (1)..(1344): Ortholog of  Ceres SEQ ID NO 13574418 as cited in SEQ ID NO 0
  misc_feature (1)..(1344): Ortholog of  Ceres SEQ ID NO 13600272 as cited in SEQ ID NO 0

SEQ ID NO: 92357 - protein, 447 aa, Arabidopsis thaliana; identical to SEQ ID NO: 88601
  peptide (1)..(447): Ceres Seq. ID no. 12711142

SEQ ID NO: 92358 - protein, 298 aa, Arabidopsis thaliana; identical to SEQ ID NO: 88602
  peptide (1)..(298): Ceres Seq. ID no. 12711143

SEQ ID NO: 92359 - DNA, 1812 bp, Arabidopsis thaliana; identical to SEQ ID NO: 88603
  misc_feature (1)..(1812): Ceres Seq. ID no. 12711144
  misc_feature (1)..(1812): Ortholog of  Ceres SEQ ID NO 15171212 as cited in SEQ ID NO 56899
  misc_feature (1)..(1812): Ortholog of  Ceres SEQ ID NO 12613725 as cited in SEQ ID NO 68196

SEQ ID NO: 92360 - protein, 603 aa, Arabidopsis thaliana; identical to SEQ ID NO: 88604
  peptide (1)..(603): Ceres Seq. ID no. 12711145

SEQ ID NO: 92361 - protein, 600 aa, Arabidopsis thaliana; identical to SEQ ID NO: 88605
  peptide (1)..(600): Ceres Seq. ID no. 12711146

SEQ ID NO: 92362 - protein, 557 aa, Arabidopsis thaliana; identical to SEQ ID NO: 88606
  peptide (1)..(557): Ceres Seq. ID no. 12711147

SEQ ID NO: 92363 - DNA, 1554 bp, Arabidopsis thaliana; identical to SEQ ID NO: 88607
  misc_feature (1)..(1554): Ceres Seq. ID no. 12711148
  misc_feature (1)..(1554): Ortholog of  Ceres SEQ ID NO 12613725 as cited in SEQ ID NO 68196

SEQ ID NO: 92364 - protein, 517 aa, Arabidopsis thaliana; identical to SEQ ID NO: 88608
  peptide (1)..(517): Ceres Seq. ID no. 12711149

SEQ ID NO: 92365 - protein, 493 aa, Arabidopsis thaliana; identical to SEQ ID NO: 88609
  peptide (1)..(493): Ceres Seq. ID no. 12711150

SEQ ID NO: 92366 - protein, 475 aa, Arabidopsis thaliana; identical to SEQ ID NO: 88610
  peptide (1)..(475): Ceres Seq. ID no. 12711151

SEQ ID NO: 92367 - DNA, 1911 bp, Arabidopsis thaliana; identical to SEQ ID NO: 88611
  misc_feature (1)..(1911): Ceres Seq. ID no. 12711160
  misc_feature (1)..(1911): Ortholog of  Ceres SEQ ID NO 13654989 as cited in SEQ ID NO 63117
  misc_feature (1)..(1911): Ortholog of  Ceres SEQ ID NO 13584744 as cited in SEQ ID NO 69137

SEQ ID NO: 92368 - protein, 636 aa, Arabidopsis thaliana; identical to SEQ ID NO: 88612
  peptide (1)..(636): Ceres Seq. ID no. 12711161

SEQ ID NO: 92369 - DNA, 1302 bp, Arabidopsis thaliana; identical to SEQ ID NO: 88613
  misc_feature (1)..(1302): Ceres Seq. ID no. 12711162
  misc_feature (1)..(1302): Ortholog of  Ceres SEQ ID NO 12611884 as cited in SEQ ID NO 51018
  misc_feature (1)..(1302): Ortholog of  Ceres SEQ ID NO 12609093 as cited in SEQ ID NO 52008
  misc_feature (1)..(1302): Ortholog of  Ceres SEQ ID NO 12609839 as cited in SEQ ID NO 52022
  misc_feature (1)..(1302): Ortholog of  Ceres SEQ ID NO 13638885 as cited in SEQ ID NO 55803
  misc_feature (1)..(1302): Ortholog of  Ceres SEQ ID NO 14301452 as cited in SEQ ID NO 60984
  misc_feature (1)..(1302): Ortholog of  Ceres SEQ ID NO 12587429 as cited in SEQ ID NO 63113
  misc_feature (1)..(1302): Ortholog of  Ceres SEQ ID NO 12615635 as cited in SEQ ID NO 63133
  misc_feature (1)..(1302): Ortholog of  Ceres SEQ ID NO 12586351 as cited in SEQ ID NO 64028
  misc_feature (1)..(1302): Ortholog of  Ceres SEQ ID NO 15173174 as cited in SEQ ID NO 64046
  misc_feature (1)..(1302): Ortholog of  Ceres SEQ ID NO 13654441 as cited in SEQ ID NO 67814
  misc_feature (1)..(1302): Ortholog of  Ceres SEQ ID NO 12635608 as cited in SEQ ID NO 0
  misc_feature (1)..(1302): Ortholog of  Ceres SEQ ID NO 14309027 as cited in SEQ ID NO 0

SEQ ID NO: 92370 - protein, 433 aa, Arabidopsis thaliana; identical to SEQ ID NO: 88614
  peptide (1)..(433): Ceres Seq. ID no. 12711163

SEQ ID NO: 92371 - protein, 430 aa, Arabidopsis thaliana; identical to SEQ ID NO: 88615
  peptide (1)..(430): Ceres Seq. ID no. 12711164

SEQ ID NO: 92372 - protein, 354 aa, Arabidopsis thaliana; identical to SEQ ID NO: 88616
  peptide (1)..(354): Ceres Seq. ID no. 12711165

SEQ ID NO: 92373 - DNA, 2358 bp, Arabidopsis thaliana; identical to SEQ ID NO: 88617
  misc_feature (1)..(2358): Ceres Seq. ID no. 12711168
  misc_feature (1)..(2358): Ortholog of  Ceres SEQ ID NO 15226209 as cited in SEQ ID NO 0

SEQ ID NO: 92374 - protein, 785 aa, Arabidopsis thaliana; identical to SEQ ID NO: 88618
  peptide (1)..(785): Ceres Seq. ID no. 12711169

SEQ ID NO: 92375 - protein, 720 aa, Arabidopsis thaliana; identical to SEQ ID NO: 88619
  peptide (1)..(720): Ceres Seq. ID no. 12711170

SEQ ID NO: 92376 - protein, 716 aa, Arabidopsis thaliana; identical to SEQ ID NO: 88620
  peptide (1)..(716): Ceres Seq. ID no. 12711171

SEQ ID NO: 92377 - DNA, 3798 bp, Arabidopsis thaliana; identical to SEQ ID NO: 88621
  misc_feature (1)..(3798): Ceres Seq. ID no. 12711186
  misc_feature (1)..(3798): Ortholog of  Ceres SEQ ID NO 13600485 as cited in SEQ ID NO 1221

SEQ ID NO: 92378 - protein, 1265 aa, Arabidopsis thaliana; identical to SEQ ID NO: 88622
  peptide (1)..(1265): Ceres Seq. ID no. 12711187

SEQ ID NO: 92379 - protein, 1226 aa, Arabidopsis thaliana; identical to SEQ ID NO: 88623
  peptide (1)..(1226): Ceres Seq. ID no. 12711188

SEQ ID NO: 92380 - protein, 1137 aa, Arabidopsis thaliana; identical to SEQ ID NO: 88624
  peptide (1)..(1137): Ceres Seq. ID no. 12711189

SEQ ID NO: 92381 - DNA, 1282 bp, Arabidopsis thaliana; identical to SEQ ID NO: 88625
  misc_feature (1)..(1282): Ceres Seq. ID no. 12711202
  misc_feature (1)..(1282): Ortholog of  Ceres SEQ ID NO 13659033 as cited in SEQ ID NO 66372
  misc_feature (1)..(1282): Ortholog of  Ceres SEQ ID NO 13655724 as cited in SEQ ID NO 68973
  misc_feature (1)..(1282): Ortholog of  Ceres SEQ ID NO 12625899 as cited in SEQ ID NO 69079

SEQ ID NO: 92382 - protein, 416 aa, Arabidopsis thaliana; identical to SEQ ID NO: 24155
  peptide (1)..(416): Ceres Seq. ID no. 12711203

SEQ ID NO: 92383 - protein, 274 aa, Arabidopsis thaliana; identical to SEQ ID NO: 24156
  peptide (1)..(274): Ceres Seq. ID no. 12711204

SEQ ID NO: 92384 - protein, 262 aa, Arabidopsis thaliana; identical to SEQ ID NO: 24157
  peptide (1)..(262): Ceres Seq. ID no. 12711205

SEQ ID NO: 92385 - DNA, 1083 bp, Arabidopsis thaliana; identical to SEQ ID NO: 88629
  misc_feature (1)..(1083): Ceres Seq. ID no. 12711206
  misc_feature (1)..(1083): Ortholog of  Ceres SEQ ID NO 13639645 as cited in SEQ ID NO 57488

SEQ ID NO: 92386 - protein, 360 aa, Arabidopsis thaliana; identical to SEQ ID NO: 88630
  peptide (1)..(360): Ceres Seq. ID no. 12711207

SEQ ID NO: 92387 - protein, 357 aa, Arabidopsis thaliana; identical to SEQ ID NO: 88631
  peptide (1)..(357): Ceres Seq. ID no. 12711208

SEQ ID NO: 92388 - protein, 347 aa, Arabidopsis thaliana; identical to SEQ ID NO: 88632
  peptide (1)..(347): Ceres Seq. ID no. 12711209

SEQ ID NO: 92389 - DNA, 1815 bp, Arabidopsis thaliana; identical to SEQ ID NO: 88633
  misc_feature (1)..(1815): Ceres Seq. ID no. 12711231
  misc_feature (1)..(1815): Ortholog of  Ceres SEQ ID NO 15171224 as cited in SEQ ID NO 52348

SEQ ID NO: 92390 - protein, 604 aa, Arabidopsis thaliana; identical to SEQ ID NO: 88634
  peptide (1)..(604): Ceres Seq. ID no. 12711232

SEQ ID NO: 92391 - protein, 539 aa, Arabidopsis thaliana; identical to SEQ ID NO: 88635
  peptide (1)..(539): Ceres Seq. ID no. 12711233

SEQ ID NO: 92392 - protein, 514 aa, Arabidopsis thaliana; identical to SEQ ID NO: 88636
  peptide (1)..(514): Ceres Seq. ID no. 12711234

SEQ ID NO: 92393 - DNA, 2931 bp, Arabidopsis thaliana; identical to SEQ ID NO: 88637
  misc_feature (1)..(2931): Ceres Seq. ID no. 12711235
  misc_feature (1)..(2931): Ortholog of  Ceres SEQ ID NO 13654989 as cited in SEQ ID NO 63117
  misc_feature (1)..(2931): Ortholog of  Ceres SEQ ID NO 13584744 as cited in SEQ ID NO 69137

SEQ ID NO: 92394 - protein, 976 aa, Arabidopsis thaliana; identical to SEQ ID NO: 88638
  peptide (1)..(976): Ceres Seq. ID no. 12711236

SEQ ID NO: 92395 - protein, 947 aa, Arabidopsis thaliana; identical to SEQ ID NO: 88639
  peptide (1)..(947): Ceres Seq. ID no. 12711237

SEQ ID NO: 92396 - protein, 751 aa, Arabidopsis thaliana; identical to SEQ ID NO: 88640
  peptide (1)..(751): Ceres Seq. ID no. 12711238

SEQ ID NO: 92397 - DNA, 2886 bp, Arabidopsis thaliana; identical to SEQ ID NO: 88641
  misc_feature (1)..(2886): Ceres Seq. ID no. 12711239
  misc_feature (1)..(2886): Ortholog of  Ceres SEQ ID NO 13654989 as cited in SEQ ID NO 63117
  misc_feature (1)..(2886): Ortholog of  Ceres SEQ ID NO 13584744 as cited in SEQ ID NO 69137

SEQ ID NO: 92398 - protein, 961 aa, Arabidopsis thaliana; identical to SEQ ID NO: 88642
  peptide (1)..(961): Ceres Seq. ID no. 12711240

SEQ ID NO: 92399 - protein, 932 aa, Arabidopsis thaliana; identical to SEQ ID NO: 88643
  peptide (1)..(932): Ceres Seq. ID no. 12711241

SEQ ID NO: 92400 - protein, 751 aa, Arabidopsis thaliana; identical to SEQ ID NO: 88640
  peptide (1)..(751): Ceres Seq. ID no. 12711242

SEQ ID NO: 92401 - DNA, 1201 bp, Arabidopsis thaliana; identical to SEQ ID NO: 88645
  misc_feature (1)..(1201): Ceres Seq. ID no. 12711274
  misc_feature (1)..(1201): Ortholog of  Ceres SEQ ID NO 14304170 as cited in SEQ ID NO 53453
  misc_feature (1)..(1201): Ortholog of  Ceres SEQ ID NO 14315911 as cited in SEQ ID NO 56998
  misc_feature (1)..(1201): Ortholog of  Ceres SEQ ID NO 13656028 as cited in SEQ ID NO 64728

SEQ ID NO: 92402 - protein, 348 aa, Arabidopsis thaliana; identical to SEQ ID NO: 24112
  peptide (1)..(348): Ceres Seq. ID no. 12711275

SEQ ID NO: 92403 - protein, 339 aa, Arabidopsis thaliana; identical to SEQ ID NO: 24113
  peptide (1)..(339): Ceres Seq. ID no. 12711276

SEQ ID NO: 92404 - protein, 307 aa, Arabidopsis thaliana; identical to SEQ ID NO: 24114
  peptide (1)..(307): Ceres Seq. ID no. 12711277

SEQ ID NO: 92405 - DNA, 4056 bp, Arabidopsis thaliana; identical to SEQ ID NO: 88649
  misc_feature (1)..(4056): Ceres Seq. ID no. 12711320
  misc_feature (1)..(4056): Ortholog of  Ceres SEQ ID NO 13597129 as cited in SEQ ID NO 64175

SEQ ID NO: 92406 - protein, 1351 aa, Arabidopsis thaliana; identical to SEQ ID NO: 88650
  peptide (1)..(1351): Ceres Seq. ID no. 12711321

SEQ ID NO: 92407 - protein, 1106 aa, Arabidopsis thaliana; identical to SEQ ID NO: 88651
  peptide (1)..(1106): Ceres Seq. ID no. 12711322

SEQ ID NO: 92408 - protein, 1100 aa, Arabidopsis thaliana; identical to SEQ ID NO: 88652
  peptide (1)..(1100): Ceres Seq. ID no. 12711323

SEQ ID NO: 92409 - DNA, 1257 bp, Arabidopsis thaliana; identical to SEQ ID NO: 88653
  misc_feature (1)..(1257): Ceres Seq. ID no. 12711324
  misc_feature (1)..(1257): Ortholog of  Ceres SEQ ID NO 13598373 as cited in SEQ ID NO 62185
  misc_feature (1)..(1257): Ortholog of  Ceres SEQ ID NO 12584664 as cited in SEQ ID NO 62232
  misc_feature (1)..(1257): Ortholog of  Ceres SEQ ID NO 15169537 as cited in SEQ ID NO 64197

SEQ ID NO: 92410 - protein, 310 aa, Arabidopsis thaliana; identical to SEQ ID NO: 22430
  peptide (1)..(310): Ceres Seq. ID no. 12711325

SEQ ID NO: 92411 - protein, 272 aa, Arabidopsis thaliana; identical to SEQ ID NO: 22431
  peptide (1)..(272): Ceres Seq. ID no. 12711326

SEQ ID NO: 92412 - protein, 250 aa, Arabidopsis thaliana; identical to SEQ ID NO: 22432
  peptide (1)..(250): Ceres Seq. ID no. 12711327

SEQ ID NO: 92413 - DNA, 2793 bp, Arabidopsis thaliana; identical to SEQ ID NO: 88657
  misc_feature (1)..(2793): Ceres Seq. ID no. 12711399
  misc_feature (1)..(2793): Ortholog of  Ceres SEQ ID NO 13657677 as cited in SEQ ID NO 66119

SEQ ID NO: 92414 - protein, 930 aa, Arabidopsis thaliana; identical to SEQ ID NO: 88658
  peptide (1)..(930): Ceres Seq. ID no. 12711400

SEQ ID NO: 92415 - protein, 732 aa, Arabidopsis thaliana; identical to SEQ ID NO: 85077
  peptide (1)..(732): Ceres Seq. ID no. 12711401

SEQ ID NO: 92416 - protein, 687 aa, Arabidopsis thaliana; identical to SEQ ID NO: 85078
  peptide (1)..(687): Ceres Seq. ID no. 12711402

SEQ ID NO: 92417 - DNA, 1663 bp, Arabidopsis thaliana; identical to SEQ ID NO: 88661
  misc_feature (1)..(1663): Ceres Seq. ID no. 12711421
  misc_feature (1)..(1663): Ortholog of  Ceres SEQ ID NO 15179007 as cited in SEQ ID NO 1038
  misc_feature (1)..(1663): Ortholog of  Ceres SEQ ID NO 15226449 as cited in SEQ ID NO 58879
  misc_feature (1)..(1663): Ortholog of  Ceres SEQ ID NO 13597146 as cited in SEQ ID NO 63311

SEQ ID NO: 92418 - protein, 476 aa, Arabidopsis thaliana; identical to SEQ ID NO: 88662
  peptide (1)..(476): Ceres Seq. ID no. 12711422

SEQ ID NO: 92419 - protein, 391 aa, Arabidopsis thaliana; identical to SEQ ID NO: 88663
  peptide (1)..(391): Ceres Seq. ID no. 12711423

SEQ ID NO: 92420 - protein, 327 aa, Arabidopsis thaliana; identical to SEQ ID NO: 88664
  peptide (1)..(327): Ceres Seq. ID no. 12711424

SEQ ID NO: 92421 - DNA, 1944 bp, Arabidopsis thaliana; identical to SEQ ID NO: 88665
  misc_feature (1)..(1944): Ceres Seq. ID no. 12711432
  misc_feature (1)..(1944): Ortholog of  Ceres SEQ ID NO 13600301 as cited in SEQ ID NO 1010

SEQ ID NO: 92422 - protein, 647 aa, Arabidopsis thaliana; identical to SEQ ID NO: 88666
  peptide (1)..(647): Ceres Seq. ID no. 12711433

SEQ ID NO: 92423 - protein, 639 aa, Arabidopsis thaliana; identical to SEQ ID NO: 88667
  peptide (1)..(639): Ceres Seq. ID no. 12711434

SEQ ID NO: 92424 - protein, 630 aa, Arabidopsis thaliana; identical to SEQ ID NO: 88668
  peptide (1)..(630): Ceres Seq. ID no. 12711435

SEQ ID NO: 92425 - DNA, 1913 bp, Arabidopsis thaliana; identical to SEQ ID NO: 88669
  misc_feature (1)..(1913): Ceres Seq. ID no. 12711436
  misc_feature (1)..(1913): Ortholog of  Ceres SEQ ID NO 15177304 as cited in SEQ ID NO 52668

SEQ ID NO: 92426 - protein, 534 aa, Arabidopsis thaliana; identical to SEQ ID NO: 26151
  peptide (1)..(534): Ceres Seq. ID no. 12711437

SEQ ID NO: 92427 - protein, 511 aa, Arabidopsis thaliana; identical to SEQ ID NO: 26152
  peptide (1)..(511): Ceres Seq. ID no. 12711438

SEQ ID NO: 92428 - protein, 446 aa, Arabidopsis thaliana; identical to SEQ ID NO: 26153
  peptide (1)..(446): Ceres Seq. ID no. 12711439

SEQ ID NO: 92429 - DNA, 2328 bp, Arabidopsis thaliana; identical to SEQ ID NO: 88673
  misc_feature (1)..(2328): Ceres Seq. ID no. 12711463
  misc_feature (1)..(2328): Ortholog of  Ceres SEQ ID NO 12586556 as cited in SEQ ID NO 64667
  misc_feature (1)..(2328): Ortholog of  Ceres SEQ ID NO 13660894 as cited in SEQ ID NO 67475

SEQ ID NO: 92430 - protein, 775 aa, Arabidopsis thaliana; identical to SEQ ID NO: 88674
  peptide (1)..(775): Ceres Seq. ID no. 12711464

SEQ ID NO: 92431 - protein, 660 aa, Arabidopsis thaliana; identical to SEQ ID NO: 88675
  peptide (1)..(660): Ceres Seq. ID no. 12711465

SEQ ID NO: 92432 - protein, 646 aa, Arabidopsis thaliana; identical to SEQ ID NO: 88676
  peptide (1)..(646): Ceres Seq. ID no. 12711466

SEQ ID NO: 92433 - DNA, 1064 bp, Arabidopsis thaliana; identical to SEQ ID NO: 88677
  misc_feature (1)..(1064): Ceres Seq. ID no. 12711515
  misc_feature (1)..(1064): Ortholog of  Ceres SEQ ID NO 14304791 as cited in SEQ ID NO 53562
  misc_feature (1)..(1064): Ortholog of  Ceres SEQ ID NO 13594298 as cited in SEQ ID NO 57803
  misc_feature (1)..(1064): Ortholog of  Ceres SEQ ID NO 14301894 as cited in SEQ ID NO 61677
  misc_feature (1)..(1064): Ortholog of  Ceres SEQ ID NO 13503476 as cited in SEQ ID NO 61978
  misc_feature (1)..(1064): Ortholog of  Ceres SEQ ID NO 12578438 as cited in SEQ ID NO 62201
  misc_feature (1)..(1064): Ortholog of  Ceres SEQ ID NO 12617675 as cited in SEQ ID NO 64656

SEQ ID NO: 92434 - protein, 317 aa, Arabidopsis thaliana; identical to SEQ ID NO: 88678
  peptide (1)..(317): Ceres Seq. ID no. 12711516

SEQ ID NO: 92435 - protein, 289 aa, Arabidopsis thaliana; identical to SEQ ID NO: 88679
  peptide (1)..(289): Ceres Seq. ID no. 12711517

SEQ ID NO: 92436 - protein, 241 aa, Arabidopsis thaliana; identical to SEQ ID NO: 88680
  peptide (1)..(241): Ceres Seq. ID no. 12711518

SEQ ID NO: 92437 - DNA, 1434 bp, Arabidopsis thaliana; identical to SEQ ID NO: 88681
  misc_feature (1)..(1434): Ceres Seq. ID no. 12711531
  misc_feature (1)..(1434): Ortholog of  Ceres SEQ ID NO 12586556 as cited in SEQ ID NO 64667
  misc_feature (1)..(1434): Ortholog of  Ceres SEQ ID NO 13660894 as cited in SEQ ID NO 67475

SEQ ID NO: 92438 - protein, 477 aa, Arabidopsis thaliana; identical to SEQ ID NO: 88682
  peptide (1)..(477): Ceres Seq. ID no. 12711532

SEQ ID NO: 92439 - protein, 458 aa, Arabidopsis thaliana; identical to SEQ ID NO: 88683
  peptide (1)..(458): Ceres Seq. ID no. 12711533

SEQ ID NO: 92440 - protein, 385 aa, Arabidopsis thaliana; identical to SEQ ID NO: 88684
  peptide (1)..(385): Ceres Seq. ID no. 12711534

SEQ ID NO: 92441 - DNA, 687 bp, Arabidopsis thaliana; identical to SEQ ID NO: 88685
  misc_feature (1)..(687): Ceres Seq. ID no. 12711546
  misc_feature (1)..(687): Ortholog of  Ceres SEQ ID NO 13599232 as cited in SEQ ID NO 991

SEQ ID NO: 92442 - protein, 143 aa, Arabidopsis thaliana; identical to SEQ ID NO: 21510
  peptide (1)..(143): Ceres Seq. ID no. 12711547

SEQ ID NO: 92443 - protein, 78 aa, Arabidopsis thaliana; identical to SEQ ID NO: 21511
  peptide (1)..(78): Ceres Seq. ID no. 12711548

SEQ ID NO: 92444 - protein, 71 aa, Arabidopsis thaliana; identical to SEQ ID NO: 21512
  peptide (1)..(71): Ceres Seq. ID no. 12711549

SEQ ID NO: 92445 - DNA, 558 bp, Arabidopsis thaliana; identical to SEQ ID NO: 88689
  misc_feature (1)..(558): Ceres Seq. ID no. 12711560
  misc_feature (1)..(558): Ortholog of  Ceres SEQ ID NO 14309599 as cited in SEQ ID NO 52625
  misc_feature (1)..(558): Ortholog of  Ceres SEQ ID NO 13661426 as cited in SEQ ID NO 61254

SEQ ID NO: 92446 - protein, 185 aa, Arabidopsis thaliana; identical to SEQ ID NO: 88690
  peptide (1)..(185): Ceres Seq. ID no. 12711561

SEQ ID NO: 92447 - protein, 129 aa, Arabidopsis thaliana; identical to SEQ ID NO: 88691
  peptide (1)..(129): Ceres Seq. ID no. 12711562

SEQ ID NO: 92448 - protein, 111 aa, Arabidopsis thaliana; identical to SEQ ID NO: 88692
  peptide (1)..(111): Ceres Seq. ID no. 12711563

SEQ ID NO: 92449 - DNA, 2130 bp, Arabidopsis thaliana; identical to SEQ ID NO: 88693
  misc_feature (1)..(2130): Ceres Seq. ID no. 12711630
  misc_feature (1)..(2130): Ortholog of  Ceres SEQ ID NO 15171224 as cited in SEQ ID NO 52348

SEQ ID NO: 92450 - protein, 709 aa, Arabidopsis thaliana; identical to SEQ ID NO: 88694
  peptide (1)..(709): Ceres Seq. ID no. 12711631

SEQ ID NO: 92451 - protein, 680 aa, Arabidopsis thaliana; identical to SEQ ID NO: 88695
  peptide (1)..(680): Ceres Seq. ID no. 12711632

SEQ ID NO: 92452 - protein, 633 aa, Arabidopsis thaliana; identical to SEQ ID NO: 88696
  peptide (1)..(633): Ceres Seq. ID no. 12711633

SEQ ID NO: 92453 - DNA, 2117 bp, Arabidopsis thaliana; identical to SEQ ID NO: 88697
  misc_feature (1)..(2117): Ceres Seq. ID no. 12711647
  misc_feature (1)..(2117): Ortholog of  Ceres SEQ ID NO 14302419 as cited in SEQ ID NO 66752

SEQ ID NO: 92454 - protein, 628 aa, Arabidopsis thaliana; identical to SEQ ID NO: 88698
  peptide (1)..(628): Ceres Seq. ID no. 12711648

SEQ ID NO: 92455 - protein, 609 aa, Arabidopsis thaliana; identical to SEQ ID NO: 26334
  peptide (1)..(609): Ceres Seq. ID no. 12711649

SEQ ID NO: 92456 - protein, 606 aa, Arabidopsis thaliana; identical to SEQ ID NO: 26335
  peptide (1)..(606): Ceres Seq. ID no. 12711650

SEQ ID NO: 92457 - DNA, 1053 bp, Arabidopsis thaliana; identical to SEQ ID NO: 88701
  misc_feature (1)..(1053): Ceres Seq. ID no. 12711675
  misc_feature (1)..(1053): Ortholog of  Ceres SEQ ID NO 14312844 as cited in SEQ ID NO 55601
  misc_feature (1)..(1053): Ortholog of  Ceres SEQ ID NO 14312866 as cited in SEQ ID NO 55630
  misc_feature (1)..(1053): Ortholog of  Ceres SEQ ID NO 13597376 as cited in SEQ ID NO 64002
  misc_feature (1)..(1053): Ortholog of  Ceres SEQ ID NO 13503573 as cited in SEQ ID NO 65402
  misc_feature (1)..(1053): Ortholog of  Ceres SEQ ID NO 13659615 as cited in SEQ ID NO 67248

SEQ ID NO: 92458 - protein, 350 aa, Arabidopsis thaliana; identical to SEQ ID NO: 29867
  peptide (1)..(350): Ceres Seq. ID no. 12711676

SEQ ID NO: 92459 - protein, 235 aa, Arabidopsis thaliana; identical to SEQ ID NO: 88703
  peptide (1)..(235): Ceres Seq. ID no. 12711677

SEQ ID NO: 92460 - DNA, 693 bp, Arabidopsis thaliana; identical to SEQ ID NO: 88704
  misc_feature (1)..(693): Ceres Seq. ID no. 12711694
  misc_feature (1)..(693): Ortholog of  Ceres SEQ ID NO 15179607 as cited in SEQ ID NO 0

SEQ ID NO: 92461 - protein, 230 aa, Arabidopsis thaliana; identical to SEQ ID NO: 88705
  peptide (1)..(230): Ceres Seq. ID no. 12711695

SEQ ID NO: 92462 - protein, 126 aa, Arabidopsis thaliana; identical to SEQ ID NO: 88706
  peptide (1)..(126): Ceres Seq. ID no. 12711696

SEQ ID NO: 92463 - DNA, 2790 bp, Arabidopsis thaliana; identical to SEQ ID NO: 88707
  misc_feature (1)..(2790): Ceres Seq. ID no. 12711701
  misc_feature (1)..(2790): Ortholog of  Ceres SEQ ID NO 15224874 as cited in SEQ ID NO 55015

SEQ ID NO: 92464 - protein, 929 aa, Arabidopsis thaliana; identical to SEQ ID NO: 88708
  peptide (1)..(929): Ceres Seq. ID no. 12711702

SEQ ID NO: 92465 - protein, 825 aa, Arabidopsis thaliana; identical to SEQ ID NO: 88709
  peptide (1)..(825): Ceres Seq. ID no. 12711703

SEQ ID NO: 92466 - protein, 811 aa, Arabidopsis thaliana; identical to SEQ ID NO: 88710
  peptide (1)..(811): Ceres Seq. ID no. 12711704

SEQ ID NO: 92467 - DNA, 2829 bp, Arabidopsis thaliana; identical to SEQ ID NO: 88711
  misc_feature (1)..(2829): Ceres Seq. ID no. 12711713
  misc_feature (1)..(2829): Ortholog of  Ceres SEQ ID NO 14309727 as cited in SEQ ID NO 1030
  misc_feature (1)..(2829): Ortholog of  Ceres SEQ ID NO 13581686 as cited in SEQ ID NO 57695

SEQ ID NO: 92468 - protein, 942 aa, Arabidopsis thaliana; identical to SEQ ID NO: 88712
  peptide (1)..(942): Ceres Seq. ID no. 12711714

SEQ ID NO: 92469 - protein, 940 aa, Arabidopsis thaliana; identical to SEQ ID NO: 88713
  peptide (1)..(940): Ceres Seq. ID no. 12711715

SEQ ID NO: 92470 - protein, 708 aa, Arabidopsis thaliana; identical to SEQ ID NO: 88714
  peptide (1)..(708): Ceres Seq. ID no. 12711716

SEQ ID NO: 92471 - DNA, 954 bp, Arabidopsis thaliana; identical to SEQ ID NO: 88715
  misc_feature (1)..(954): Ceres Seq. ID no. 12711753
  misc_feature (1)..(954): Ortholog of  Ceres SEQ ID NO 15169372 as cited in SEQ ID NO 58778

SEQ ID NO: 92472 - protein, 317 aa, Arabidopsis thaliana; identical to SEQ ID NO: 88716
  peptide (1)..(317): Ceres Seq. ID no. 12711754

SEQ ID NO: 92473 - protein, 260 aa, Arabidopsis thaliana; identical to SEQ ID NO: 88717
  peptide (1)..(260): Ceres Seq. ID no. 12711755

SEQ ID NO: 92474 - protein, 233 aa, Arabidopsis thaliana; identical to SEQ ID NO: 88718
  peptide (1)..(233): Ceres Seq. ID no. 12711756

SEQ ID NO: 92475 - DNA, 2094 bp, Arabidopsis thaliana; identical to SEQ ID NO: 88719
  misc_feature (1)..(2094): Ceres Seq. ID no. 12711764
  misc_feature (1)..(2094): Ortholog of  Ceres SEQ ID NO 13655640 as cited in SEQ ID NO 63844

SEQ ID NO: 92476 - protein, 697 aa, Arabidopsis thaliana; identical to SEQ ID NO: 88720
  peptide (1)..(697): Ceres Seq. ID no. 12711765

SEQ ID NO: 92477 - protein, 622 aa, Arabidopsis thaliana; identical to SEQ ID NO: 88721
  peptide (1)..(622): Ceres Seq. ID no. 12711766

SEQ ID NO: 92478 - protein, 620 aa, Arabidopsis thaliana; identical to SEQ ID NO: 88722
  peptide (1)..(620): Ceres Seq. ID no. 12711767

SEQ ID NO: 92479 - DNA, 2007 bp, Arabidopsis thaliana; identical to SEQ ID NO: 88723
  misc_feature (1)..(2007): Ceres Seq. ID no. 12711778
  misc_feature (1)..(2007): Ortholog of  Ceres SEQ ID NO 13655640 as cited in SEQ ID NO 63844
  misc_feature (1)..(2007): Ortholog of  Ceres SEQ ID NO 15180683 as cited in SEQ ID NO 0

SEQ ID NO: 92480 - protein, 668 aa, Arabidopsis thaliana; identical to SEQ ID NO: 88724
  peptide (1)..(668): Ceres Seq. ID no. 12711779

SEQ ID NO: 92481 - protein, 580 aa, Arabidopsis thaliana; identical to SEQ ID NO: 88725
  peptide (1)..(580): Ceres Seq. ID no. 12711780

SEQ ID NO: 92482 - protein, 541 aa, Arabidopsis thaliana; identical to SEQ ID NO: 88726
  peptide (1)..(541): Ceres Seq. ID no. 12711781

SEQ ID NO: 92483 - DNA, 624 bp, Arabidopsis thaliana; identical to SEQ ID NO: 88727
  misc_feature (1)..(624): Ceres Seq. ID no. 12711851
  misc_feature (1)..(624): Ortholog of  Ceres SEQ ID NO 12609803 as cited in SEQ ID NO 51959

SEQ ID NO: 92484 - protein, 207 aa, Arabidopsis thaliana; identical to SEQ ID NO: 88728
  peptide (1)..(207): Ceres Seq. ID no. 12711852

SEQ ID NO: 92485 - protein, 158 aa, Arabidopsis thaliana; identical to SEQ ID NO: 88729
  peptide (1)..(158): Ceres Seq. ID no. 12711853

SEQ ID NO: 92486 - protein, 125 aa, Arabidopsis thaliana; identical to SEQ ID NO: 88730
  peptide (1)..(125): Ceres Seq. ID no. 12711854

SEQ ID NO: 92487 - DNA, 1153 bp, Arabidopsis thaliana; identical to SEQ ID NO: 88731
  misc_feature (1)..(1153): Ceres Seq. ID no. 12711908
  misc_feature (1)..(1153): Ortholog of  Ceres SEQ ID NO 14312262 as cited in SEQ ID NO 57108

SEQ ID NO: 92488 - protein, 211 aa, Arabidopsis thaliana; identical to SEQ ID NO: 43692
  peptide (1)..(211): Ceres Seq. ID no. 12711909

SEQ ID NO: 92489 - protein, 201 aa, Arabidopsis thaliana; identical to SEQ ID NO: 43693
  peptide (1)..(201): Ceres Seq. ID no. 12711910

SEQ ID NO: 92490 - protein, 196 aa, Arabidopsis thaliana; identical to SEQ ID NO: 43694
  peptide (1)..(196): Ceres Seq. ID no. 12711911

SEQ ID NO: 92491 - DNA, 918 bp, Arabidopsis thaliana; identical to SEQ ID NO: 88735
  misc_feature (1)..(918): Ceres Seq. ID no. 12711931
  misc_feature (1)..(918): Ortholog of  Ceres SEQ ID NO 13594193 as cited in SEQ ID NO 58558

SEQ ID NO: 92492 - protein, 305 aa, Arabidopsis thaliana; identical to SEQ ID NO: 88736
  peptide (1)..(305): Ceres Seq. ID no. 12711932

SEQ ID NO: 92493 - protein, 182 aa, Arabidopsis thaliana; identical to SEQ ID NO: 88737
  peptide (1)..(182): Ceres Seq. ID no. 12711933

SEQ ID NO: 92494 - DNA, 1734 bp, Arabidopsis thaliana; identical to SEQ ID NO: 88738
  misc_feature (1)..(1734): Ceres Seq. ID no. 12712097
  misc_feature (1)..(1734): Ortholog of  Ceres SEQ ID NO 15170885 as cited in SEQ ID NO 54326
  misc_feature (1)..(1734): Ortholog of  Ceres SEQ ID NO 14311609 as cited in SEQ ID NO 58341

SEQ ID NO: 92495 - protein, 577 aa, Arabidopsis thaliana; identical to SEQ ID NO: 88739
  peptide (1)..(577): Ceres Seq. ID no. 12712098

SEQ ID NO: 92496 - protein, 499 aa, Arabidopsis thaliana; identical to SEQ ID NO: 88740
  peptide (1)..(499): Ceres Seq. ID no. 12712099

SEQ ID NO: 92497 - protein, 495 aa, Arabidopsis thaliana; identical to SEQ ID NO: 88741
  peptide (1)..(495): Ceres Seq. ID no. 12712100

SEQ ID NO: 92498 - DNA, 1202 bp, Arabidopsis thaliana; identical to SEQ ID NO: 88742
  misc_feature (1)..(1202): Ceres Seq. ID no. 12712124
  misc_feature (1)..(1202): Ortholog of  Ceres SEQ ID NO 12609041 as cited in SEQ ID NO 51310
  misc_feature (1)..(1202): Ortholog of  Ceres SEQ ID NO 13594966 as cited in SEQ ID NO 56152
  misc_feature (1)..(1202): Ortholog of  Ceres SEQ ID NO 12582457 as cited in SEQ ID NO 57530
  misc_feature (1)..(1202): Ortholog of  Ceres SEQ ID NO 13655804 as cited in SEQ ID NO 64881

SEQ ID NO: 92499 - protein, 182 aa, Arabidopsis thaliana; identical to SEQ ID NO: 28006
  peptide (1)..(182): Ceres Seq. ID no. 12712125

SEQ ID NO: 92500 - protein, 177 aa, Arabidopsis thaliana; identical to SEQ ID NO: 28007
  peptide (1)..(177): Ceres Seq. ID no. 12712126

SEQ ID NO: 92501 - protein, 122 aa, Arabidopsis thaliana; identical to SEQ ID NO: 28008
  peptide (1)..(122): Ceres Seq. ID no. 12712127

SEQ ID NO: 92502 - DNA, 1491 bp, Arabidopsis thaliana; identical to SEQ ID NO: 88746
  misc_feature (1)..(1491): Ceres Seq. ID no. 12712203
  misc_feature (1)..(1491): Ortholog of  Ceres SEQ ID NO 12581802 as cited in SEQ ID NO 54880

SEQ ID NO: 92503 - protein, 496 aa, Arabidopsis thaliana; identical to SEQ ID NO: 88747
  peptide (1)..(496): Ceres Seq. ID no. 12712204

SEQ ID NO: 92504 - protein, 415 aa, Arabidopsis thaliana; identical to SEQ ID NO: 88748
  peptide (1)..(415): Ceres Seq. ID no. 12712205

SEQ ID NO: 92505 - protein, 266 aa, Arabidopsis thaliana; identical to SEQ ID NO: 88749
  peptide (1)..(266): Ceres Seq. ID no. 12712206

SEQ ID NO: 92506 - DNA, 941 bp, Arabidopsis thaliana; identical to SEQ ID NO: 88750
  misc_feature (1)..(941): Ceres Seq. ID no. 12712232
  misc_feature (1)..(941): Ortholog of  Ceres SEQ ID NO 14301423 as cited in SEQ ID NO 52204
  misc_feature (1)..(941): Ortholog of  Ceres SEQ ID NO 12621037 as cited in SEQ ID NO 66448
  misc_feature (1)..(941): Ortholog of  Ceres SEQ ID NO 12635639 as cited in SEQ ID NO 0
  misc_feature (1)..(941): Ortholog of  Ceres SEQ ID NO 14305144 as cited in SEQ ID NO 0

SEQ ID NO: 92507 - protein, 275 aa, Arabidopsis thaliana; identical to SEQ ID NO: 26595
  peptide (1)..(275): Ceres Seq. ID no. 12712233

SEQ ID NO: 92508 - protein, 267 aa, Arabidopsis thaliana; identical to SEQ ID NO: 26596
  peptide (1)..(267): Ceres Seq. ID no. 12712234

SEQ ID NO: 92509 - protein, 220 aa, Arabidopsis thaliana; identical to SEQ ID NO: 26597
  peptide (1)..(220): Ceres Seq. ID no. 12712235

SEQ ID NO: 92510 - DNA, 1143 bp, Arabidopsis thaliana; identical to SEQ ID NO: 88754
  misc_feature (1)..(1143): Ceres Seq. ID no. 12712236
  misc_feature (1)..(1143): Ortholog of  Ceres SEQ ID NO 13593963 as cited in SEQ ID NO 59580

SEQ ID NO: 92511 - protein, 380 aa, Arabidopsis thaliana; identical to SEQ ID NO: 88755
  peptide (1)..(380): Ceres Seq. ID no. 12712237

SEQ ID NO: 92512 - protein, 342 aa, Arabidopsis thaliana; identical to SEQ ID NO: 88756
  peptide (1)..(342): Ceres Seq. ID no. 12712238

SEQ ID NO: 92513 - protein, 293 aa, Arabidopsis thaliana; identical to SEQ ID NO: 88757
  peptide (1)..(293): Ceres Seq. ID no. 12712239

SEQ ID NO: 92514 - DNA, 894 bp, Arabidopsis thaliana; identical to SEQ ID NO: 88758
  misc_feature (1)..(894): Ceres Seq. ID no. 12712240
  misc_feature (1)..(894): Ortholog of  Ceres SEQ ID NO 13594482 as cited in SEQ ID NO 51285
  misc_feature (1)..(894): Ortholog of  Ceres SEQ ID NO 13655381 as cited in SEQ ID NO 63359

SEQ ID NO: 92515 - protein, 297 aa, Arabidopsis thaliana; identical to SEQ ID NO: 77114
  peptide (1)..(297): Ceres Seq. ID no. 12712241

SEQ ID NO: 92516 - protein, 274 aa, Arabidopsis thaliana; identical to SEQ ID NO: 77115
  peptide (1)..(274): Ceres Seq. ID no. 12712242

SEQ ID NO: 92517 - protein, 270 aa, Arabidopsis thaliana; identical to SEQ ID NO: 88761
  peptide (1)..(270): Ceres Seq. ID no. 12712243

SEQ ID NO: 92518 - DNA, 1061 bp, Arabidopsis thaliana; identical to SEQ ID NO: 88762
  misc_feature (1)..(1061): Ceres Seq. ID no. 12712255
  misc_feature (1)..(1061): Ortholog of  Ceres SEQ ID NO 13594482 as cited in SEQ ID NO 51285
  misc_feature (1)..(1061): Ortholog of  Ceres SEQ ID NO 13655381 as cited in SEQ ID NO 63359

SEQ ID NO: 92519 - protein, 299 aa, Arabidopsis thaliana; identical to SEQ ID NO: 88763
  peptide (1)..(299): Ceres Seq. ID no. 12712256

SEQ ID NO: 92520 - protein, 276 aa, Arabidopsis thaliana; identical to SEQ ID NO: 88764
  peptide (1)..(276): Ceres Seq. ID no. 12712257

SEQ ID NO: 92521 - protein, 272 aa, Arabidopsis thaliana; identical to SEQ ID NO: 88765
  peptide (1)..(272): Ceres Seq. ID no. 12712258

SEQ ID NO: 92522 - DNA, 2169 bp, Arabidopsis thaliana; identical to SEQ ID NO: 88766
  misc_feature (1)..(2169): Ceres Seq. ID no. 12712287
  misc_feature (1)..(2169): Ortholog of  Ceres SEQ ID NO 12586556 as cited in SEQ ID NO 64667
  misc_feature (1)..(2169): Ortholog of  Ceres SEQ ID NO 13660894 as cited in SEQ ID NO 67475

SEQ ID NO: 92523 - protein, 722 aa, Arabidopsis thaliana; identical to SEQ ID NO: 88767
  peptide (1)..(722): Ceres Seq. ID no. 12712288

SEQ ID NO: 92524 - protein, 638 aa, Arabidopsis thaliana; identical to SEQ ID NO: 88768
  peptide (1)..(638): Ceres Seq. ID no. 12712289

SEQ ID NO: 92525 - protein, 618 aa, Arabidopsis thaliana; identical to SEQ ID NO: 88769
  peptide (1)..(618): Ceres Seq. ID no. 12712290

SEQ ID NO: 92526 - DNA, 1908 bp, Arabidopsis thaliana; identical to SEQ ID NO: 88770
  misc_feature (1)..(1908): Ceres Seq. ID no. 12712302
  misc_feature (1)..(1908): Ortholog of  Ceres SEQ ID NO 12586556 as cited in SEQ ID NO 64667
  misc_feature (1)..(1908): Ortholog of  Ceres SEQ ID NO 13660894 as cited in SEQ ID NO 67475

SEQ ID NO: 92527 - protein, 635 aa, Arabidopsis thaliana; identical to SEQ ID NO: 88771
  peptide (1)..(635): Ceres Seq. ID no. 12712303

SEQ ID NO: 92528 - protein, 501 aa, Arabidopsis thaliana; identical to SEQ ID NO: 88772
  peptide (1)..(501): Ceres Seq. ID no. 12712304

SEQ ID NO: 92529 - protein, 448 aa, Arabidopsis thaliana; identical to SEQ ID NO: 88773
  peptide (1)..(448): Ceres Seq. ID no. 12712305

SEQ ID NO: 92530 - DNA, 1932 bp, Arabidopsis thaliana; identical to SEQ ID NO: 88774
  misc_feature (1)..(1932): Ceres Seq. ID no. 12712309
  misc_feature (1)..(1932): Ortholog of  Ceres SEQ ID NO 13598532 as cited in SEQ ID NO 65204
  misc_feature (1)..(1932): Ortholog of  Ceres SEQ ID NO 13656849 as cited in SEQ ID NO 65764
  misc_feature (1)..(1932): Ortholog of  Ceres SEQ ID NO 13656501 as cited in SEQ ID NO 69206

SEQ ID NO: 92531 - protein, 643 aa, Arabidopsis thaliana; identical to SEQ ID NO: 88775
  peptide (1)..(643): Ceres Seq. ID no. 12712310

SEQ ID NO: 92532 - protein, 481 aa, Arabidopsis thaliana; identical to SEQ ID NO: 70663
  peptide (1)..(481): Ceres Seq. ID no. 12712311

SEQ ID NO: 92533 - protein, 473 aa, Arabidopsis thaliana; identical to SEQ ID NO: 70664
  peptide (1)..(473): Ceres Seq. ID no. 12712312

SEQ ID NO: 92534 - DNA, 1248 bp, Arabidopsis thaliana; identical to SEQ ID NO: 88778
  misc_feature (1)..(1248): Ceres Seq. ID no. 12712313
  misc_feature (1)..(1248): Ortholog of  Ceres SEQ ID NO 13594727 as cited in SEQ ID NO 52169
  misc_feature (1)..(1248): Ortholog of  Ceres SEQ ID NO 14301430 as cited in SEQ ID NO 56553
  misc_feature (1)..(1248): Ortholog of  Ceres SEQ ID NO 13596474 as cited in SEQ ID NO 62169
  misc_feature (1)..(1248): Ortholog of  Ceres SEQ ID NO 13596969 as cited in SEQ ID NO 63375
  misc_feature (1)..(1248): Ortholog of  Ceres SEQ ID NO 14302240 as cited in SEQ ID NO 64162
  misc_feature (1)..(1248): Ortholog of  Ceres SEQ ID NO 13584480 as cited in SEQ ID NO 64751
  misc_feature (1)..(1248): Ortholog of  Ceres SEQ ID NO 13597519 as cited in SEQ ID NO 64759
  misc_feature (1)..(1248): Ortholog of  Ceres SEQ ID NO 15170183 as cited in SEQ ID NO 65667
  misc_feature (1)..(1248): Ortholog of  Ceres SEQ ID NO 13595926 as cited in SEQ ID NO 67778
  misc_feature (1)..(1248): Ortholog of  Ceres SEQ ID NO 13596362 as cited in SEQ ID NO 67877

SEQ ID NO: 92535 - protein, 358 aa, Arabidopsis thaliana; identical to SEQ ID NO: 25159
  peptide (1)..(358): Ceres Seq. ID no. 12712314

SEQ ID NO: 92536 - protein, 340 aa, Arabidopsis thaliana; identical to SEQ ID NO: 25160
  peptide (1)..(340): Ceres Seq. ID no. 12712315

SEQ ID NO: 92537 - DNA, 1497 bp, Arabidopsis thaliana; identical to SEQ ID NO: 88781
  misc_feature (1)..(1497): Ceres Seq. ID no. 12712335
  misc_feature (1)..(1497): Ortholog of  Ceres SEQ ID NO 14302875 as cited in SEQ ID NO 66242
  misc_feature (1)..(1497): Ortholog of  Ceres SEQ ID NO 13660287 as cited in SEQ ID NO 67316

SEQ ID NO: 92538 - protein, 498 aa, Arabidopsis thaliana; identical to SEQ ID NO: 88782
  peptide (1)..(498): Ceres Seq. ID no. 12712336

SEQ ID NO: 92539 - protein, 468 aa, Arabidopsis thaliana; identical to SEQ ID NO: 88783
  peptide (1)..(468): Ceres Seq. ID no. 12712337

SEQ ID NO: 92540 - protein, 461 aa, Arabidopsis thaliana; identical to SEQ ID NO: 88784
  peptide (1)..(461): Ceres Seq. ID no. 12712338

SEQ ID NO: 92541 - DNA, 1477 bp, Arabidopsis thaliana; identical to SEQ ID NO: 88785
  misc_feature (1)..(1477): Ceres Seq. ID no. 12712446
  misc_feature (1)..(1477): Ortholog of  Ceres SEQ ID NO 13659033 as cited in SEQ ID NO 66372
  misc_feature (1)..(1477): Ortholog of  Ceres SEQ ID NO 12625899 as cited in SEQ ID NO 69079

SEQ ID NO: 92542 - protein, 434 aa, Arabidopsis thaliana; identical to SEQ ID NO: 42955
  peptide (1)..(434): Ceres Seq. ID no. 12712447

SEQ ID NO: 92543 - protein, 407 aa, Arabidopsis thaliana; identical to SEQ ID NO: 42956
  peptide (1)..(407): Ceres Seq. ID no. 12712448

SEQ ID NO: 92544 - protein, 311 aa, Arabidopsis thaliana; identical to SEQ ID NO: 42957
  peptide (1)..(311): Ceres Seq. ID no. 12712449

SEQ ID NO: 92545 - DNA, 1065 bp, Arabidopsis thaliana; identical to SEQ ID NO: 88789
  misc_feature (1)..(1065): Ceres Seq. ID no. 12712466
  misc_feature (1)..(1065): Ortholog of  Ceres SEQ ID NO 13581701 as cited in SEQ ID NO 51151
  misc_feature (1)..(1065): Ortholog of  Ceres SEQ ID NO 14315491 as cited in SEQ ID NO 57026

SEQ ID NO: 92546 - protein, 354 aa, Arabidopsis thaliana; identical to SEQ ID NO: 88790
  peptide (1)..(354): Ceres Seq. ID no. 12712467

SEQ ID NO: 92547 - protein, 349 aa, Arabidopsis thaliana; identical to SEQ ID NO: 88791
  peptide (1)..(349): Ceres Seq. ID no. 12712468

SEQ ID NO: 92548 - DNA, 1125 bp, Arabidopsis thaliana; identical to SEQ ID NO: 88792
  misc_feature (1)..(1125): Ceres Seq. ID no. 12712511
  misc_feature (1)..(1125): Ortholog of  Ceres SEQ ID NO 12474685 as cited in SEQ ID NO 88
  misc_feature (1)..(1125): Ortholog of  Ceres SEQ ID NO 13638574 as cited in SEQ ID NO 51223
  misc_feature (1)..(1125): Ortholog of  Ceres SEQ ID NO 12610790 as cited in SEQ ID NO 56123
  misc_feature (1)..(1125): Ortholog of  Ceres SEQ ID NO 13655636 as cited in SEQ ID NO 63519
  misc_feature (1)..(1125): Ortholog of  Ceres SEQ ID NO 13655896 as cited in SEQ ID NO 64970

SEQ ID NO: 92549 - protein, 374 aa, Arabidopsis thaliana; identical to SEQ ID NO: 88793
  peptide (1)..(374): Ceres Seq. ID no. 12712512

SEQ ID NO: 92550 - protein, 366 aa, Arabidopsis thaliana; identical to SEQ ID NO: 88794
  peptide (1)..(366): Ceres Seq. ID no. 12712513

SEQ ID NO: 92551 - protein, 350 aa, Arabidopsis thaliana; identical to SEQ ID NO: 88795
  peptide (1)..(350): Ceres Seq. ID no. 12712514

SEQ ID NO: 92552 - DNA, 777 bp, Arabidopsis thaliana; identical to SEQ ID NO: 88796
  misc_feature (1)..(777): Ceres Seq. ID no. 12712591
  misc_feature (1)..(777): Ortholog of  Ceres SEQ ID NO 13656783 as cited in SEQ ID NO 69218

SEQ ID NO: 92553 - protein, 258 aa, Arabidopsis thaliana; identical to SEQ ID NO: 88797
  peptide (1)..(258): Ceres Seq. ID no. 12712592

SEQ ID NO: 92554 - protein, 181 aa, Arabidopsis thaliana; identical to SEQ ID NO: 88798
  peptide (1)..(181): Ceres Seq. ID no. 12712593

SEQ ID NO: 92555 - protein, 178 aa, Arabidopsis thaliana; identical to SEQ ID NO: 88799
  peptide (1)..(178): Ceres Seq. ID no. 12712594

SEQ ID NO: 92556 - DNA, 897 bp, Arabidopsis thaliana; identical to SEQ ID NO: 88800
  misc_feature (1)..(897): Ceres Seq. ID no. 12712605
  misc_feature (1)..(897): Ortholog of  Ceres SEQ ID NO 14304838 as cited in SEQ ID NO 59750

SEQ ID NO: 92557 - protein, 298 aa, Arabidopsis thaliana; identical to SEQ ID NO: 88801
  peptide (1)..(298): Ceres Seq. ID no. 12712606

SEQ ID NO: 92558 - protein, 285 aa, Arabidopsis thaliana; identical to SEQ ID NO: 88802
  peptide (1)..(285): Ceres Seq. ID no. 12712607

SEQ ID NO: 92559 - protein, 234 aa, Arabidopsis thaliana; identical to SEQ ID NO: 88803
  peptide (1)..(234): Ceres Seq. ID no. 12712608

SEQ ID NO: 92560 - DNA, 1230 bp, Arabidopsis thaliana; identical to SEQ ID NO: 88804
  misc_feature (1)..(1230): Ceres Seq. ID no. 12712635
  misc_feature (1)..(1230): Ortholog of  Ceres SEQ ID NO 14310616 as cited in SEQ ID NO 55699
  misc_feature (1)..(1230): Ortholog of  Ceres SEQ ID NO 15173907 as cited in SEQ ID NO 62356
  misc_feature (1)..(1230): Ortholog of  Ceres SEQ ID NO 13596519 as cited in SEQ ID NO 62572
  misc_feature (1)..(1230): Ortholog of  Ceres SEQ ID NO 12625108 as cited in SEQ ID NO 68102

SEQ ID NO: 92561 - protein, 280 aa, Arabidopsis thaliana; identical to SEQ ID NO: 34928
  peptide (1)..(280): Ceres Seq. ID no. 12712636

SEQ ID NO: 92562 - protein, 258 aa, Arabidopsis thaliana; identical to SEQ ID NO: 34929
  peptide (1)..(258): Ceres Seq. ID no. 12712637

SEQ ID NO: 92563 - protein, 250 aa, Arabidopsis thaliana; identical to SEQ ID NO: 34930
  peptide (1)..(250): Ceres Seq. ID no. 12712638

SEQ ID NO: 92564 - DNA, 2255 bp, Arabidopsis thaliana; identical to SEQ ID NO: 88808
  misc_feature (1)..(2255): Ceres Seq. ID no. 12712671
  misc_feature (1)..(2255): Ortholog of  Ceres SEQ ID NO 14303276 as cited in SEQ ID NO 1264
  misc_feature (1)..(2255): Ortholog of  Ceres SEQ ID NO 15170536 as cited in SEQ ID NO 52791
  misc_feature (1)..(2255): Ortholog of  Ceres SEQ ID NO 15171813 as cited in SEQ ID NO 57309
  misc_feature (1)..(2255): Ortholog of  Ceres SEQ ID NO 14314378 as cited in SEQ ID NO 57601
  misc_feature (1)..(2255): Ortholog of  Ceres SEQ ID NO 12465083 as cited in SEQ ID NO 68239

SEQ ID NO: 92565 - protein, 651 aa, Arabidopsis thaliana; identical to SEQ ID NO: 22039
  peptide (1)..(651): Ceres Seq. ID no. 12712672

SEQ ID NO: 92566 - protein, 588 aa, Arabidopsis thaliana; identical to SEQ ID NO: 22040
  peptide (1)..(588): Ceres Seq. ID no. 12712673

SEQ ID NO: 92567 - protein, 562 aa, Arabidopsis thaliana; identical to SEQ ID NO: 22041
  peptide (1)..(562): Ceres Seq. ID no. 12712674

SEQ ID NO: 92568 - DNA, 1278 bp, Arabidopsis thaliana; identical to SEQ ID NO: 88812
  misc_feature (1)..(1278): Ceres Seq. ID no. 12712683
  misc_feature (1)..(1278): Ortholog of  Ceres SEQ ID NO 15169372 as cited in SEQ ID NO 58778

SEQ ID NO: 92569 - protein, 358 aa, Arabidopsis thaliana; identical to SEQ ID NO: 88813
  peptide (1)..(358): Ceres Seq. ID no. 12712684

SEQ ID NO: 92570 - protein, 331 aa, Arabidopsis thaliana; identical to SEQ ID NO: 88814
  peptide (1)..(331): Ceres Seq. ID no. 12712685

SEQ ID NO: 92571 - protein, 285 aa, Arabidopsis thaliana; identical to SEQ ID NO: 36159
  peptide (1)..(285): Ceres Seq. ID no. 12712686

SEQ ID NO: 92572 - DNA, 1659 bp, Arabidopsis thaliana; identical to SEQ ID NO: 88816
  misc_feature (1)..(1659): Ceres Seq. ID no. 12712705
  misc_feature (1)..(1659): Ortholog of  Ceres SEQ ID NO 13581273 as cited in SEQ ID NO 54551
  misc_feature (1)..(1659): Ortholog of  Ceres SEQ ID NO 13594209 as cited in SEQ ID NO 59089
  misc_feature (1)..(1659): Ortholog of  Ceres SEQ ID NO 15169611 as cited in SEQ ID NO 65939
  misc_feature (1)..(1659): Ortholog of  Ceres SEQ ID NO 13502874 as cited in SEQ ID NO 66298
  misc_feature (1)..(1659): Ortholog of  Ceres SEQ ID NO 12614124 as cited in SEQ ID NO 68392

SEQ ID NO: 92573 - protein, 519 aa, Arabidopsis thaliana; identical to SEQ ID NO: 22364
  peptide (1)..(519): Ceres Seq. ID no. 12712706

SEQ ID NO: 92574 - protein, 500 aa, Arabidopsis thaliana; identical to SEQ ID NO: 22365
  peptide (1)..(500): Ceres Seq. ID no. 12712707

SEQ ID NO: 92575 - protein, 457 aa, Arabidopsis thaliana; identical to SEQ ID NO: 22366
  peptide (1)..(457): Ceres Seq. ID no. 12712708

SEQ ID NO: 92576 - DNA, 1065 bp, Arabidopsis thaliana; identical to SEQ ID NO: 88820
  misc_feature (1)..(1065): Ceres Seq. ID no. 12712778
  misc_feature (1)..(1065): Ortholog of  Ceres SEQ ID NO 13655640 as cited in SEQ ID NO 63844
  misc_feature (1)..(1065): Ortholog of  Ceres SEQ ID NO 13584744 as cited in SEQ ID NO 69137

SEQ ID NO: 92577 - protein, 354 aa, Arabidopsis thaliana; identical to SEQ ID NO: 88821
  peptide (1)..(354): Ceres Seq. ID no. 12712779

SEQ ID NO: 92578 - protein, 239 aa, Arabidopsis thaliana; identical to SEQ ID NO: 69755
  peptide (1)..(239): Ceres Seq. ID no. 12712780

SEQ ID NO: 92579 - protein, 217 aa, Arabidopsis thaliana; identical to SEQ ID NO: 69756
  peptide (1)..(217): Ceres Seq. ID no. 12712781

SEQ ID NO: 92580 - DNA, 5487 bp, Arabidopsis thaliana; identical to SEQ ID NO: 88824
  misc_feature (1)..(5487): Ceres Seq. ID no. 12712790
  misc_feature (1)..(5487): Ortholog of  Ceres SEQ ID NO 13596198 as cited in SEQ ID NO 68488

SEQ ID NO: 92581 - protein, 1828 aa, Arabidopsis thaliana; identical to SEQ ID NO: 88825
  peptide (1)..(1828): Ceres Seq. ID no. 12712791

SEQ ID NO: 92582 - protein, 1660 aa, Arabidopsis thaliana; identical to SEQ ID NO: 88826
  peptide (1)..(1660): Ceres Seq. ID no. 12712792

SEQ ID NO: 92583 - protein, 1614 aa, Arabidopsis thaliana; identical to SEQ ID NO: 88827
  peptide (1)..(1614): Ceres Seq. ID no. 12712793

SEQ ID NO: 92584 - DNA, 390 bp, Arabidopsis thaliana; identical to SEQ ID NO: 88828
  misc_feature (1)..(390): Ceres Seq. ID no. 12712862
  misc_feature (1)..(390): Ortholog of  Ceres SEQ ID NO 13598157 as cited in SEQ ID NO 61570

SEQ ID NO: 92585 - protein, 129 aa, Arabidopsis thaliana; identical to SEQ ID NO: 83969
  peptide (1)..(129): Ceres Seq. ID no. 12712863

SEQ ID NO: 92586 - DNA, 1728 bp, Arabidopsis thaliana; identical to SEQ ID NO: 88830
  misc_feature (1)..(1728): Ceres Seq. ID no. 12712883
  misc_feature (1)..(1728): Ortholog of  Ceres SEQ ID NO 14303201 as cited in SEQ ID NO 67304

SEQ ID NO: 92587 - protein, 575 aa, Arabidopsis thaliana; identical to SEQ ID NO: 88831
  peptide (1)..(575): Ceres Seq. ID no. 12712884

SEQ ID NO: 92588 - protein, 463 aa, Arabidopsis thaliana; identical to SEQ ID NO: 88832
  peptide (1)..(463): Ceres Seq. ID no. 12712885

SEQ ID NO: 92589 - protein, 415 aa, Arabidopsis thaliana; identical to SEQ ID NO: 84462
  peptide (1)..(415): Ceres Seq. ID no. 12712886

SEQ ID NO: 92590 - DNA, 1133 bp, Arabidopsis thaliana; identical to SEQ ID NO: 88834
  misc_feature (1)..(1133): Ceres Seq. ID no. 12712887
  misc_feature (1)..(1133): Ortholog of  Ceres SEQ ID NO 14315989 as cited in SEQ ID NO 57571

SEQ ID NO: 92591 - protein, 285 aa, Arabidopsis thaliana; identical to SEQ ID NO: 29057
  peptide (1)..(285): Ceres Seq. ID no. 12712888

SEQ ID NO: 92592 - protein, 251 aa, Arabidopsis thaliana; identical to SEQ ID NO: 29058
  peptide (1)..(251): Ceres Seq. ID no. 12712889

SEQ ID NO: 92593 - protein, 235 aa, Arabidopsis thaliana; identical to SEQ ID NO: 29059
  peptide (1)..(235): Ceres Seq. ID no. 12712890

SEQ ID NO: 92594 - DNA, 1041 bp, Arabidopsis thaliana; identical to SEQ ID NO: 88838
  misc_feature (1)..(1041): Ceres Seq. ID no. 12712903
  misc_feature (1)..(1041): Ortholog of  Ceres SEQ ID NO 14309755 as cited in SEQ ID NO 20741
  misc_feature (1)..(1041): Ortholog of  Ceres SEQ ID NO 13594727 as cited in SEQ ID NO 52169
  misc_feature (1)..(1041): Ortholog of  Ceres SEQ ID NO 13596474 as cited in SEQ ID NO 62169
  misc_feature (1)..(1041): Ortholog of  Ceres SEQ ID NO 13598714 as cited in SEQ ID NO 62656
  misc_feature (1)..(1041): Ortholog of  Ceres SEQ ID NO 13596969 as cited in SEQ ID NO 63375
  misc_feature (1)..(1041): Ortholog of  Ceres SEQ ID NO 13597519 as cited in SEQ ID NO 64759
  misc_feature (1)..(1041): Ortholog of  Ceres SEQ ID NO 13587054 as cited in SEQ ID NO 0

SEQ ID NO: 92595 - protein, 346 aa, Arabidopsis thaliana; identical to SEQ ID NO: 88839
  peptide (1)..(346): Ceres Seq. ID no. 12712904

SEQ ID NO: 92596 - protein, 242 aa, Arabidopsis thaliana; identical to SEQ ID NO: 88840
  peptide (1)..(242): Ceres Seq. ID no. 12712905

SEQ ID NO: 92597 - protein, 225 aa, Arabidopsis thaliana; identical to SEQ ID NO: 88841
  peptide (1)..(225): Ceres Seq. ID no. 12712906

SEQ ID NO: 92598 - DNA, 3249 bp, Arabidopsis thaliana; identical to SEQ ID NO: 88842
  misc_feature (1)..(3249): Ceres Seq. ID no. 12713004
  misc_feature (1)..(3249): Ortholog of  Ceres SEQ ID NO 15224539 as cited in SEQ ID NO 0

SEQ ID NO: 92599 - protein, 1082 aa, Arabidopsis thaliana; identical to SEQ ID NO: 88843
  peptide (1)..(1082): Ceres Seq. ID no. 12713005

SEQ ID NO: 92600 - protein, 1007 aa, Arabidopsis thaliana; identical to SEQ ID NO: 88844
  peptide (1)..(1007): Ceres Seq. ID no. 12713006

SEQ ID NO: 92601 - protein, 967 aa, Arabidopsis thaliana; identical to SEQ ID NO: 88845
  peptide (1)..(967): Ceres Seq. ID no. 12713007

SEQ ID NO: 92602 - DNA, 690 bp, Arabidopsis thaliana; identical to SEQ ID NO: 88846
  misc_feature (1)..(690): Ceres Seq. ID no. 12713044
  misc_feature (1)..(690): Ortholog of  Ceres SEQ ID NO 13658400 as cited in SEQ ID NO 66403

SEQ ID NO: 92603 - protein, 229 aa, Arabidopsis thaliana; identical to SEQ ID NO: 88847
  peptide (1)..(229): Ceres Seq. ID no. 12713045

SEQ ID NO: 92604 - protein, 198 aa, Arabidopsis thaliana; identical to SEQ ID NO: 88848
  peptide (1)..(198): Ceres Seq. ID no. 12713046

SEQ ID NO: 92605 - protein, 193 aa, Arabidopsis thaliana; identical to SEQ ID NO: 88849
  peptide (1)..(193): Ceres Seq. ID no. 12713047

SEQ ID NO: 92606 - DNA, 450 bp, Arabidopsis thaliana; identical to SEQ ID NO: 88850
  misc_feature (1)..(450): Ceres Seq. ID no. 12713059
  misc_feature (1)..(450): Ortholog of  Ceres SEQ ID NO 14310057 as cited in SEQ ID NO 225
  misc_feature (1)..(450): Ortholog of  Ceres SEQ ID NO 15225572 as cited in SEQ ID NO 61651

SEQ ID NO: 92607 - protein, 149 aa, Arabidopsis thaliana; identical to SEQ ID NO: 21514
  peptide (1)..(149): Ceres Seq. ID no. 12713060

SEQ ID NO: 92608 - protein, 143 aa, Arabidopsis thaliana; identical to SEQ ID NO: 21515
  peptide (1)..(143): Ceres Seq. ID no. 12713061

SEQ ID NO: 92609 - protein, 77 aa, Arabidopsis thaliana; identical to SEQ ID NO: 21516
  peptide (1)..(77): Ceres Seq. ID no. 12713062

SEQ ID NO: 92610 - DNA, 1227 bp, Arabidopsis thaliana; identical to SEQ ID NO: 88854
  misc_feature (1)..(1227): Ceres Seq. ID no. 12713115
  misc_feature (1)..(1227): Ortholog of  Ceres SEQ ID NO 14313893 as cited in SEQ ID NO 54646
  misc_feature (1)..(1227): Ortholog of  Ceres SEQ ID NO 13656797 as cited in SEQ ID NO 65756
  misc_feature (1)..(1227): Ortholog of  Ceres SEQ ID NO 13658498 as cited in SEQ ID NO 66557
  misc_feature (1)..(1227): Ortholog of  Ceres SEQ ID NO 15227053 as cited in SEQ ID NO 0

SEQ ID NO: 92611 - protein, 408 aa, Arabidopsis thaliana; identical to SEQ ID NO: 88855
  peptide (1)..(408): Ceres Seq. ID no. 12713116

SEQ ID NO: 92612 - protein, 213 aa, Arabidopsis thaliana; identical to SEQ ID NO: 88856
  peptide (1)..(213): Ceres Seq. ID no. 12713117

SEQ ID NO: 92613 - protein, 206 aa, Arabidopsis thaliana; identical to SEQ ID NO: 88857
  peptide (1)..(206): Ceres Seq. ID no. 12713118

SEQ ID NO: 92614 - DNA, 496 bp, Arabidopsis thaliana; identical to SEQ ID NO: 88858
  misc_feature (1)..(496): Ceres Seq. ID no. 12713134
  misc_feature (1)..(496): Ortholog of  Ceres SEQ ID NO 12476115 as cited in SEQ ID NO 107

SEQ ID NO: 92615 - protein, 94 aa, Arabidopsis thaliana; identical to SEQ ID NO: 88859
  peptide (1)..(94): Ceres Seq. ID no. 12713135

SEQ ID NO: 92616 - protein, 77 aa, Arabidopsis thaliana; identical to SEQ ID NO: 25733
  peptide (1)..(77): Ceres Seq. ID no. 12713136

SEQ ID NO: 92617 - protein, 62 aa, Arabidopsis thaliana; identical to SEQ ID NO: 25734
  peptide (1)..(62): Ceres Seq. ID no. 12713137

SEQ ID NO: 92618 - protein, 50 aa, Arabidopsis thaliana; identical to SEQ ID NO: 88862
  peptide (1)..(50): Ceres Seq. ID no. 12713138

SEQ ID NO: 92619 - DNA, 2016 bp, Arabidopsis thaliana; identical to SEQ ID NO: 88863
  misc_feature (1)..(2016): Ceres Seq. ID no. 12713178
  misc_feature (1)..(2016): Ortholog of  Ceres SEQ ID NO 14310639 as cited in SEQ ID NO 53858
  misc_feature (1)..(2016): Ortholog of  Ceres SEQ ID NO 14312851 as cited in SEQ ID NO 58364

SEQ ID NO: 92620 - protein, 671 aa, Arabidopsis thaliana; identical to SEQ ID NO: 88864
  peptide (1)..(671): Ceres Seq. ID no. 12713179

SEQ ID NO: 92621 - protein, 644 aa, Arabidopsis thaliana; identical to SEQ ID NO: 88865
  peptide (1)..(644): Ceres Seq. ID no. 12713180

SEQ ID NO: 92622 - protein, 643 aa, Arabidopsis thaliana; identical to SEQ ID NO: 88866
  peptide (1)..(643): Ceres Seq. ID no. 12713181

SEQ ID NO: 92623 - DNA, 890 bp, Arabidopsis thaliana; identical to SEQ ID NO: 88867
  misc_feature (1)..(890): Ceres Seq. ID no. 12713249
  misc_feature (1)..(890): Ortholog of  Ceres SEQ ID NO 13638931 as cited in SEQ ID NO 52200
  misc_feature (1)..(890): Ortholog of  Ceres SEQ ID NO 14304209 as cited in SEQ ID NO 56460
  misc_feature (1)..(890): Ortholog of  Ceres SEQ ID NO 12615635 as cited in SEQ ID NO 63133
  misc_feature (1)..(890): Ortholog of  Ceres SEQ ID NO 12586351 as cited in SEQ ID NO 64028
  misc_feature (1)..(890): Ortholog of  Ceres SEQ ID NO 14301603 as cited in SEQ ID NO 67721
  misc_feature (1)..(890): Ortholog of  Ceres SEQ ID NO 15177482 as cited in SEQ ID NO 0

SEQ ID NO: 92624 - protein, 217 aa, Arabidopsis thaliana; identical to SEQ ID NO: 21617
  peptide (1)..(217): Ceres Seq. ID no. 12713250

SEQ ID NO: 92625 - protein, 204 aa, Arabidopsis thaliana; identical to SEQ ID NO: 21618
  peptide (1)..(204): Ceres Seq. ID no. 12713251

SEQ ID NO: 92626 - protein, 201 aa, Arabidopsis thaliana; identical to SEQ ID NO: 21619
  peptide (1)..(201): Ceres Seq. ID no. 12713252

SEQ ID NO: 92627 - DNA, 981 bp, Arabidopsis thaliana; identical to SEQ ID NO: 88871
  misc_feature (1)..(981): Ceres Seq. ID no. 12713253
  misc_feature (1)..(981): Ortholog of  Ceres SEQ ID NO 14304209 as cited in SEQ ID NO 56460
  misc_feature (1)..(981): Ortholog of  Ceres SEQ ID NO 12586351 as cited in SEQ ID NO 64028
  misc_feature (1)..(981): Ortholog of  Ceres SEQ ID NO 15177482 as cited in SEQ ID NO 0

SEQ ID NO: 92628 - protein, 219 aa, Arabidopsis thaliana; identical to SEQ ID NO: 21639
  peptide (1)..(219): Ceres Seq. ID no. 12713254

SEQ ID NO: 92629 - protein, 206 aa, Arabidopsis thaliana; identical to SEQ ID NO: 21640
  peptide (1)..(206): Ceres Seq. ID no. 12713255

SEQ ID NO: 92630 - protein, 203 aa, Arabidopsis thaliana; identical to SEQ ID NO: 21641
  peptide (1)..(203): Ceres Seq. ID no. 12713256

SEQ ID NO: 92631 - DNA, 1003 bp, Arabidopsis thaliana; identical to SEQ ID NO: 88875
  misc_feature (1)..(1003): Ceres Seq. ID no. 12713341
  misc_feature (1)..(1003): Ortholog of  Ceres SEQ ID NO 13595187 as cited in SEQ ID NO 56052
  misc_feature (1)..(1003): Ortholog of  Ceres SEQ ID NO 13662053 as cited in SEQ ID NO 61547
  misc_feature (1)..(1003): Ortholog of  Ceres SEQ ID NO 13624283 as cited in SEQ ID NO 0

SEQ ID NO: 92632 - protein, 195 aa, Arabidopsis thaliana; identical to SEQ ID NO: 88876
  peptide (1)..(195): Ceres Seq. ID no. 12713342

SEQ ID NO: 92633 - DNA, 450 bp, Arabidopsis thaliana; identical to SEQ ID NO: 88877
  misc_feature (1)..(450): Ceres Seq. ID no. 12713370
  misc_feature (1)..(450): Ortholog of  Ceres SEQ ID NO 14308991 as cited in SEQ ID NO 0

SEQ ID NO: 92634 - protein, 149 aa, Arabidopsis thaliana; identical to SEQ ID NO: 88878
  peptide (1)..(149): Ceres Seq. ID no. 12713371

SEQ ID NO: 92635 - protein, 144 aa, Arabidopsis thaliana; identical to SEQ ID NO: 88879
  peptide (1)..(144): Ceres Seq. ID no. 12713372

SEQ ID NO: 92636 - protein, 91 aa, Arabidopsis thaliana; identical to SEQ ID NO: 88880
  peptide (1)..(91): Ceres Seq. ID no. 12713373

SEQ ID NO: 92637 - DNA, 1092 bp, Arabidopsis thaliana; identical to SEQ ID NO: 88881
  misc_feature (1)..(1092): Ceres Seq. ID no. 12713449
  misc_feature (1)..(1092): Ortholog of  Ceres SEQ ID NO 15169114 as cited in SEQ ID NO 58596

SEQ ID NO: 92638 - protein, 363 aa, Arabidopsis thaliana; identical to SEQ ID NO: 88882
  peptide (1)..(363): Ceres Seq. ID no. 12713450

SEQ ID NO: 92639 - protein, 241 aa, Arabidopsis thaliana; identical to SEQ ID NO: 70722
  peptide (1)..(241): Ceres Seq. ID no. 12713451

SEQ ID NO: 92640 - protein, 181 aa, Arabidopsis thaliana; identical to SEQ ID NO: 88884
  peptide (1)..(181): Ceres Seq. ID no. 12713452

SEQ ID NO: 92641 - DNA, 1047 bp, Arabidopsis thaliana; identical to SEQ ID NO: 88885
  misc_feature (1)..(1047): Ceres Seq. ID no. 12713453
  misc_feature (1)..(1047): Ortholog of  Ceres SEQ ID NO 13585587 as cited in SEQ ID NO 65515

SEQ ID NO: 92642 - protein, 348 aa, Arabidopsis thaliana; identical to SEQ ID NO: 88886
  peptide (1)..(348): Ceres Seq. ID no. 12713454

SEQ ID NO: 92643 - protein, 306 aa, Arabidopsis thaliana; identical to SEQ ID NO: 88887
  peptide (1)..(306): Ceres Seq. ID no. 12713455

SEQ ID NO: 92644 - protein, 274 aa, Arabidopsis thaliana; identical to SEQ ID NO: 88888
  peptide (1)..(274): Ceres Seq. ID no. 12713456

SEQ ID NO: 92645 - DNA, 1029 bp, Arabidopsis thaliana; identical to SEQ ID NO: 88889
  misc_feature (1)..(1029): Ceres Seq. ID no. 12713457
  misc_feature (1)..(1029): Ortholog of  Ceres SEQ ID NO 13595351 as cited in SEQ ID NO 55934
  misc_feature (1)..(1029): Ortholog of  Ceres SEQ ID NO 13639645 as cited in SEQ ID NO 57488

SEQ ID NO: 92646 - protein, 342 aa, Arabidopsis thaliana; identical to SEQ ID NO: 88890
  peptide (1)..(342): Ceres Seq. ID no. 12713458

SEQ ID NO: 92647 - protein, 336 aa, Arabidopsis thaliana; identical to SEQ ID NO: 88891
  peptide (1)..(336): Ceres Seq. ID no. 12713459

SEQ ID NO: 92648 - protein, 332 aa, Arabidopsis thaliana; identical to SEQ ID NO: 88892
  peptide (1)..(332): Ceres Seq. ID no. 12713460

SEQ ID NO: 92649 - DNA, 1293 bp, Arabidopsis thaliana; identical to SEQ ID NO: 88893
  misc_feature (1)..(1293): Ceres Seq. ID no. 12713545
  misc_feature (1)..(1293): Ortholog of  Ceres SEQ ID NO 14313743 as cited in SEQ ID NO 59555

SEQ ID NO: 92650 - protein, 430 aa, Arabidopsis thaliana; identical to SEQ ID NO: 47881
  peptide (1)..(430): Ceres Seq. ID no. 12713546

SEQ ID NO: 92651 - protein, 395 aa, Arabidopsis thaliana; identical to SEQ ID NO: 47882
  peptide (1)..(395): Ceres Seq. ID no. 12713547

SEQ ID NO: 92652 - protein, 338 aa, Arabidopsis thaliana; identical to SEQ ID NO: 88896
  peptide (1)..(338): Ceres Seq. ID no. 12713548

SEQ ID NO: 92653 - DNA, 2226 bp, Arabidopsis thaliana; identical to SEQ ID NO: 88897
  misc_feature (1)..(2226): Ceres Seq. ID no. 12713632
  misc_feature (1)..(2226): Ortholog of  Ceres SEQ ID NO 12586556 as cited in SEQ ID NO 64667
  misc_feature (1)..(2226): Ortholog of  Ceres SEQ ID NO 13660894 as cited in SEQ ID NO 67475

SEQ ID NO: 92654 - protein, 741 aa, Arabidopsis thaliana; identical to SEQ ID NO: 88898
  peptide (1)..(741): Ceres Seq. ID no. 12713633

SEQ ID NO: 92655 - protein, 721 aa, Arabidopsis thaliana; identical to SEQ ID NO: 88899
  peptide (1)..(721): Ceres Seq. ID no. 12713634

SEQ ID NO: 92656 - protein, 643 aa, Arabidopsis thaliana; identical to SEQ ID NO: 88900
  peptide (1)..(643): Ceres Seq. ID no. 12713635

SEQ ID NO: 92657 - DNA, 1153 bp, Arabidopsis thaliana; identical to SEQ ID NO: 88901
  misc_feature (1)..(1153): Ceres Seq. ID no. 12713671
  misc_feature (1)..(1153): Ortholog of  Ceres SEQ ID NO 14309271 as cited in SEQ ID NO 0

SEQ ID NO: 92658 - protein, 252 aa, Arabidopsis thaliana; identical to SEQ ID NO: 41677
  peptide (1)..(252): Ceres Seq. ID no. 12713672

SEQ ID NO: 92659 - protein, 180 aa, Arabidopsis thaliana; identical to SEQ ID NO: 41678
  peptide (1)..(180): Ceres Seq. ID no. 12713673

SEQ ID NO: 92660 - protein, 162 aa, Arabidopsis thaliana; identical to SEQ ID NO: 41679
  peptide (1)..(162): Ceres Seq. ID no. 12713674

SEQ ID NO: 92661 - DNA, 1188 bp, Arabidopsis thaliana; identical to SEQ ID NO: 88905
  misc_feature (1)..(1188): Ceres Seq. ID no. 12713680
  misc_feature (1)..(1188): Ortholog of  Ceres SEQ ID NO 14314371 as cited in SEQ ID NO 52260

SEQ ID NO: 92662 - protein, 298 aa, Arabidopsis thaliana; identical to SEQ ID NO: 88906
  peptide (1)..(298): Ceres Seq. ID no. 12713681

SEQ ID NO: 92663 - protein, 284 aa, Arabidopsis thaliana; identical to SEQ ID NO: 88907
  peptide (1)..(284): Ceres Seq. ID no. 12713682

SEQ ID NO: 92664 - protein, 260 aa, Arabidopsis thaliana; identical to SEQ ID NO: 88908
  peptide (1)..(260): Ceres Seq. ID no. 12713683

SEQ ID NO: 92665 - DNA, 3153 bp, Arabidopsis thaliana; identical to SEQ ID NO: 88909
  misc_feature (1)..(3153): Ceres Seq. ID no. 12713760
  misc_feature (1)..(3153): Ortholog of  Ceres SEQ ID NO 13658778 as cited in SEQ ID NO 66511

SEQ ID NO: 92666 - protein, 1050 aa, Arabidopsis thaliana; identical to SEQ ID NO: 88910
  peptide (1)..(1050): Ceres Seq. ID no. 12713761

SEQ ID NO: 92667 - protein, 984 aa, Arabidopsis thaliana; identical to SEQ ID NO: 88911
  peptide (1)..(984): Ceres Seq. ID no. 12713762

SEQ ID NO: 92668 - protein, 957 aa, Arabidopsis thaliana; identical to SEQ ID NO: 88912
  peptide (1)..(957): Ceres Seq. ID no. 12713763

SEQ ID NO: 92669 - DNA, 651 bp, Arabidopsis thaliana; identical to SEQ ID NO: 88913
  misc_feature (1)..(651): Ceres Seq. ID no. 12713807
  misc_feature (1)..(651): Ortholog of  Ceres SEQ ID NO 15226238 as cited in SEQ ID NO 68840
  misc_feature (1)..(651): Ortholog of  Ceres SEQ ID NO 12635175 as cited in SEQ ID NO 0
  misc_feature (1)..(651): Ortholog of  Ceres SEQ ID NO 14306100 as cited in SEQ ID NO 0

SEQ ID NO: 92670 - protein, 216 aa, Arabidopsis thaliana; identical to SEQ ID NO: 24745
  peptide (1)..(216): Ceres Seq. ID no. 12713808

SEQ ID NO: 92671 - protein, 149 aa, Arabidopsis thaliana; identical to SEQ ID NO: 24746
  peptide (1)..(149): Ceres Seq. ID no. 12713809

SEQ ID NO: 92672 - protein, 116 aa, Arabidopsis thaliana; identical to SEQ ID NO: 88916
  peptide (1)..(116): Ceres Seq. ID no. 12713810

SEQ ID NO: 92673 - DNA, 2814 bp, Arabidopsis thaliana; identical to SEQ ID NO: 88917
  misc_feature (1)..(2814): Ceres Seq. ID no. 12713826
  misc_feature (1)..(2814): Ortholog of  Ceres SEQ ID NO 13600595 as cited in SEQ ID NO 629

SEQ ID NO: 92674 - protein, 937 aa, Arabidopsis thaliana; identical to SEQ ID NO: 88918
  peptide (1)..(937): Ceres Seq. ID no. 12713827

SEQ ID NO: 92675 - protein, 833 aa, Arabidopsis thaliana; identical to SEQ ID NO: 88919
  peptide (1)..(833): Ceres Seq. ID no. 12713828

SEQ ID NO: 92676 - protein, 832 aa, Arabidopsis thaliana; identical to SEQ ID NO: 88920
  peptide (1)..(832): Ceres Seq. ID no. 12713829

SEQ ID NO: 92677 - DNA, 3813 bp, Arabidopsis thaliana; identical to SEQ ID NO: 88921
  misc_feature (1)..(3813): Ceres Seq. ID no. 12713844
  misc_feature (1)..(3813): Ortholog of  Ceres SEQ ID NO 15173069 as cited in SEQ ID NO 64846

SEQ ID NO: 92678 - protein, 1270 aa, Arabidopsis thaliana; identical to SEQ ID NO: 88922
  peptide (1)..(1270): Ceres Seq. ID no. 12713845

SEQ ID NO: 92679 - protein, 1233 aa, Arabidopsis thaliana; identical to SEQ ID NO: 88923
  peptide (1)..(1233): Ceres Seq. ID no. 12713846

SEQ ID NO: 92680 - protein, 1221 aa, Arabidopsis thaliana; identical to SEQ ID NO: 88924
  peptide (1)..(1221): Ceres Seq. ID no. 12713847

SEQ ID NO: 92681 - DNA, 930 bp, Arabidopsis thaliana; identical to SEQ ID NO: 88925
  misc_feature (1)..(930): Ceres Seq. ID no. 12713863
  misc_feature (1)..(930): Ortholog of  Ceres SEQ ID NO 14307265 as cited in SEQ ID NO 54298

SEQ ID NO: 92682 - protein, 309 aa, Arabidopsis thaliana; identical to SEQ ID NO: 88926
  peptide (1)..(309): Ceres Seq. ID no. 12713864

SEQ ID NO: 92683 - protein, 272 aa, Arabidopsis thaliana; identical to SEQ ID NO: 88927
  peptide (1)..(272): Ceres Seq. ID no. 12713865

SEQ ID NO: 92684 - protein, 255 aa, Arabidopsis thaliana; identical to SEQ ID NO: 88928
  peptide (1)..(255): Ceres Seq. ID no. 12713866

SEQ ID NO: 92685 - DNA, 2328 bp, Arabidopsis thaliana; identical to SEQ ID NO: 88929
  misc_feature (1)..(2328): Ceres Seq. ID no. 12713915
  misc_feature (1)..(2328): Ortholog of  Ceres SEQ ID NO 13518411 as cited in SEQ ID NO 55230
  misc_feature (1)..(2328): Ortholog of  Ceres SEQ ID NO 13598724 as cited in SEQ ID NO 61069

SEQ ID NO: 92686 - protein, 775 aa, Arabidopsis thaliana; identical to SEQ ID NO: 88930
  peptide (1)..(775): Ceres Seq. ID no. 12713916

SEQ ID NO: 92687 - protein, 542 aa, Arabidopsis thaliana; identical to SEQ ID NO: 88931
  peptide (1)..(542): Ceres Seq. ID no. 12713917

SEQ ID NO: 92688 - protein, 466 aa, Arabidopsis thaliana; identical to SEQ ID NO: 88932
  peptide (1)..(466): Ceres Seq. ID no. 12713918

SEQ ID NO: 92689 - DNA, 1724 bp, Arabidopsis thaliana; identical to SEQ ID NO: 88933
  misc_feature (1)..(1724): Ceres Seq. ID no. 12713945
  misc_feature (1)..(1724): Ortholog of  Ceres SEQ ID NO 14308003 as cited in SEQ ID NO 65919

SEQ ID NO: 92690 - protein, 516 aa, Arabidopsis thaliana; identical to SEQ ID NO: 88934
  peptide (1)..(516): Ceres Seq. ID no. 12713946

SEQ ID NO: 92691 - protein, 476 aa, Arabidopsis thaliana; identical to SEQ ID NO: 88935
  peptide (1)..(476): Ceres Seq. ID no. 12713947

SEQ ID NO: 92692 - protein, 438 aa, Arabidopsis thaliana; identical to SEQ ID NO: 88936
  peptide (1)..(438): Ceres Seq. ID no. 12713948

SEQ ID NO: 92693 - DNA, 1437 bp, Arabidopsis thaliana; identical to SEQ ID NO: 88937
  misc_feature (1)..(1437): Ceres Seq. ID no. 12714053
  misc_feature (1)..(1437): Ortholog of  Ceres SEQ ID NO 15171476 as cited in SEQ ID NO 55569

SEQ ID NO: 92694 - protein, 478 aa, Arabidopsis thaliana; identical to SEQ ID NO: 88938
  peptide (1)..(478): Ceres Seq. ID no. 12714054

SEQ ID NO: 92695 - protein, 471 aa, Arabidopsis thaliana; identical to SEQ ID NO: 88939
  peptide (1)..(471): Ceres Seq. ID no. 12714055

SEQ ID NO: 92696 - protein, 467 aa, Arabidopsis thaliana; identical to SEQ ID NO: 88940
  peptide (1)..(467): Ceres Seq. ID no. 12714056

SEQ ID NO: 92697 - DNA, 1361 bp, Arabidopsis thaliana; identical to SEQ ID NO: 88941
  misc_feature (1)..(1361): Ceres Seq. ID no. 12714097
  misc_feature (1)..(1361): Ortholog of  Ceres SEQ ID NO 13599613 as cited in SEQ ID NO 0
  misc_feature (1)..(1361): Ortholog of  Ceres SEQ ID NO 15179570 as cited in SEQ ID NO 0

SEQ ID NO: 92698 - protein, 349 aa, Arabidopsis thaliana; identical to SEQ ID NO: 88942
  peptide (1)..(349): Ceres Seq. ID no. 12714098

SEQ ID NO: 92699 - protein, 342 aa, Arabidopsis thaliana; identical to SEQ ID NO: 88943
  peptide (1)..(342): Ceres Seq. ID no. 12714099

SEQ ID NO: 92700 - protein, 302 aa, Arabidopsis thaliana; identical to SEQ ID NO: 88944
  peptide (1)..(302): Ceres Seq. ID no. 12714100

SEQ ID NO: 92701 - DNA, 876 bp, Arabidopsis thaliana; identical to SEQ ID NO: 88945
  misc_feature (1)..(876): Ceres Seq. ID no. 12714246
  misc_feature (1)..(876): Ortholog of  Ceres SEQ ID NO 13581701 as cited in SEQ ID NO 51151
  misc_feature (1)..(876): Ortholog of  Ceres SEQ ID NO 14315491 as cited in SEQ ID NO 57026

SEQ ID NO: 92702 - protein, 291 aa, Arabidopsis thaliana; identical to SEQ ID NO: 88946
  peptide (1)..(291): Ceres Seq. ID no. 12714247

SEQ ID NO: 92703 - protein, 240 aa, Arabidopsis thaliana; identical to SEQ ID NO: 88947
  peptide (1)..(240): Ceres Seq. ID no. 12714248

SEQ ID NO: 92704 - protein, 205 aa, Arabidopsis thaliana; identical to SEQ ID NO: 88948
  peptide (1)..(205): Ceres Seq. ID no. 12714249

SEQ ID NO: 92705 - DNA, 522 bp, Arabidopsis thaliana; identical to SEQ ID NO: 88949
  misc_feature (1)..(522): Ceres Seq. ID no. 12714298
  misc_feature (1)..(522): Ortholog of  Ceres SEQ ID NO 13623325 as cited in SEQ ID NO 357
  misc_feature (1)..(522): Ortholog of  Ceres SEQ ID NO 13635680 as cited in SEQ ID NO 578

SEQ ID NO: 92706 - protein, 173 aa, Arabidopsis thaliana; identical to SEQ ID NO: 88950
  peptide (1)..(173): Ceres Seq. ID no. 12714299

SEQ ID NO: 92707 - protein, 167 aa, Arabidopsis thaliana; identical to SEQ ID NO: 88951
  peptide (1)..(167): Ceres Seq. ID no. 12714300

SEQ ID NO: 92708 - DNA, 1287 bp, Arabidopsis thaliana; identical to SEQ ID NO: 88952
  misc_feature (1)..(1287): Ceres Seq. ID no. 12714383
  misc_feature (1)..(1287): Ortholog of  Ceres SEQ ID NO 13659759 as cited in SEQ ID NO 67663

SEQ ID NO: 92709 - protein, 418 aa, Arabidopsis thaliana; identical to SEQ ID NO: 41313
  peptide (1)..(418): Ceres Seq. ID no. 12714384

SEQ ID NO: 92710 - protein, 390 aa, Arabidopsis thaliana; identical to SEQ ID NO: 41314
  peptide (1)..(390): Ceres Seq. ID no. 12714385

SEQ ID NO: 92711 - protein, 308 aa, Arabidopsis thaliana; identical to SEQ ID NO: 88955
  peptide (1)..(308): Ceres Seq. ID no. 12714386

SEQ ID NO: 92712 - DNA, 1599 bp, Arabidopsis thaliana; identical to SEQ ID NO: 88956
  misc_feature (1)..(1599): Ceres Seq. ID no. 12714405
  misc_feature (1)..(1599): Ortholog of  Ceres SEQ ID NO 15179641 as cited in SEQ ID NO 56414
  misc_feature (1)..(1599): Ortholog of  Ceres SEQ ID NO 15176851 as cited in SEQ ID NO 61348
  misc_feature (1)..(1599): Ortholog of  Ceres SEQ ID NO 14316049 as cited in SEQ ID NO 67036
  misc_feature (1)..(1599): Ortholog of  Ceres SEQ ID NO 14313252 as cited in SEQ ID NO 67134
  misc_feature (1)..(1599): Ortholog of  Ceres SEQ ID NO 14302220 as cited in SEQ ID NO 69121

SEQ ID NO: 92713 - protein, 422 aa, Arabidopsis thaliana; identical to SEQ ID NO: 28404
  peptide (1)..(422): Ceres Seq. ID no. 12714406

SEQ ID NO: 92714 - protein, 297 aa, Arabidopsis thaliana; identical to SEQ ID NO: 28405
  peptide (1)..(297): Ceres Seq. ID no. 12714407

SEQ ID NO: 92715 - protein, 294 aa, Arabidopsis thaliana; identical to SEQ ID NO: 28406
  peptide (1)..(294): Ceres Seq. ID no. 12714408

SEQ ID NO: 92716 - DNA, 1887 bp, Arabidopsis thaliana; identical to SEQ ID NO: 88960
  misc_feature (1)..(1887): Ceres Seq. ID no. 12714409
  misc_feature (1)..(1887): Ortholog of  Ceres SEQ ID NO 13657677 as cited in SEQ ID NO 66119

SEQ ID NO: 92717 - protein, 628 aa, Arabidopsis thaliana; identical to SEQ ID NO: 88961
  peptide (1)..(628): Ceres Seq. ID no. 12714410

SEQ ID NO: 92718 - protein, 609 aa, Arabidopsis thaliana; identical to SEQ ID NO: 88962
  peptide (1)..(609): Ceres Seq. ID no. 12714411

SEQ ID NO: 92719 - protein, 608 aa, Arabidopsis thaliana; identical to SEQ ID NO: 88963
  peptide (1)..(608): Ceres Seq. ID no. 12714412

SEQ ID NO: 92720 - DNA, 4464 bp, Arabidopsis thaliana; identical to SEQ ID NO: 88964
  misc_feature (1)..(4464): Ceres Seq. ID no. 12714439
  misc_feature (1)..(4464): Ortholog of  Ceres SEQ ID NO 14304565 as cited in SEQ ID NO 53297
  misc_feature (1)..(4464): Ortholog of  Ceres SEQ ID NO 15172170 as cited in SEQ ID NO 58957
  misc_feature (1)..(4464): Ortholog of  Ceres SEQ ID NO 13654989 as cited in SEQ ID NO 63117
  misc_feature (1)..(4464): Ortholog of  Ceres SEQ ID NO 13584744 as cited in SEQ ID NO 69137

SEQ ID NO: 92721 - protein, 1487 aa, Arabidopsis thaliana; identical to SEQ ID NO: 88965
  peptide (1)..(1487): Ceres Seq. ID no. 12714440

SEQ ID NO: 92722 - protein, 1409 aa, Arabidopsis thaliana; identical to SEQ ID NO: 88966
  peptide (1)..(1409): Ceres Seq. ID no. 12714441

SEQ ID NO: 92723 - protein, 1373 aa, Arabidopsis thaliana; identical to SEQ ID NO: 88967
  peptide (1)..(1373): Ceres Seq. ID no. 12714442

SEQ ID NO: 92724 - DNA, 933 bp, Arabidopsis thaliana; identical to SEQ ID NO: 88968
  misc_feature (1)..(933): Ceres Seq. ID no. 12714443
  misc_feature (1)..(933): Ortholog of  Ceres SEQ ID NO 14315275 as cited in SEQ ID NO 52556
  misc_feature (1)..(933): Ortholog of  Ceres SEQ ID NO 13597260 as cited in SEQ ID NO 63885

SEQ ID NO: 92725 - protein, 310 aa, Arabidopsis thaliana; identical to SEQ ID NO: 88969
  peptide (1)..(310): Ceres Seq. ID no. 12714444

SEQ ID NO: 92726 - protein, 185 aa, Arabidopsis thaliana; identical to SEQ ID NO: 88970
  peptide (1)..(185): Ceres Seq. ID no. 12714445

SEQ ID NO: 92727 - DNA, 1212 bp, Arabidopsis thaliana; identical to SEQ ID NO: 88971
  misc_feature (1)..(1212): Ceres Seq. ID no. 12714465
  misc_feature (1)..(1212): Ortholog of  Ceres SEQ ID NO 13597407 as cited in SEQ ID NO 64106

SEQ ID NO: 92728 - protein, 403 aa, Arabidopsis thaliana; identical to SEQ ID NO: 88972
  peptide (1)..(403): Ceres Seq. ID no. 12714466

SEQ ID NO: 92729 - protein, 363 aa, Arabidopsis thaliana; identical to SEQ ID NO: 88973
  peptide (1)..(363): Ceres Seq. ID no. 12714467

SEQ ID NO: 92730 - protein, 349 aa, Arabidopsis thaliana; identical to SEQ ID NO: 88974
  peptide (1)..(349): Ceres Seq. ID no. 12714468

SEQ ID NO: 92731 - DNA, 2496 bp, Arabidopsis thaliana; identical to SEQ ID NO: 88975
  misc_feature (1)..(2496): Ceres Seq. ID no. 12714500
  misc_feature (1)..(2496): Ortholog of  Ceres SEQ ID NO 12465083 as cited in SEQ ID NO 68239

SEQ ID NO: 92732 - protein, 831 aa, Arabidopsis thaliana; identical to SEQ ID NO: 78067
  peptide (1)..(831): Ceres Seq. ID no. 12714501

SEQ ID NO: 92733 - protein, 775 aa, Arabidopsis thaliana; identical to SEQ ID NO: 78068
  peptide (1)..(775): Ceres Seq. ID no. 12714502

SEQ ID NO: 92734 - protein, 774 aa, Arabidopsis thaliana; identical to SEQ ID NO: 78069
  peptide (1)..(774): Ceres Seq. ID no. 12714503

SEQ ID NO: 92735 - DNA, 2115 bp, Arabidopsis thaliana; identical to SEQ ID NO: 88979
  misc_feature (1)..(2115): Ceres Seq. ID no. 12714588
  misc_feature (1)..(2115): Ortholog of  Ceres SEQ ID NO 15170269 as cited in SEQ ID NO 54916
  misc_feature (1)..(2115): Ortholog of  Ceres SEQ ID NO 13663060 as cited in SEQ ID NO 60964
  misc_feature (1)..(2115): Ortholog of  Ceres SEQ ID NO 13598532 as cited in SEQ ID NO 65204
  misc_feature (1)..(2115): Ortholog of  Ceres SEQ ID NO 13656849 as cited in SEQ ID NO 65764
  misc_feature (1)..(2115): Ortholog of  Ceres SEQ ID NO 13656501 as cited in SEQ ID NO 69206

SEQ ID NO: 92736 - protein, 704 aa, Arabidopsis thaliana; identical to SEQ ID NO: 88980
  peptide (1)..(704): Ceres Seq. ID no. 12714589

SEQ ID NO: 92737 - protein, 540 aa, Arabidopsis thaliana; identical to SEQ ID NO: 88981
  peptide (1)..(540): Ceres Seq. ID no. 12714590

SEQ ID NO: 92738 - protein, 503 aa, Arabidopsis thaliana; identical to SEQ ID NO: 88982
  peptide (1)..(503): Ceres Seq. ID no. 12714591

SEQ ID NO: 92739 - DNA, 1114 bp, Arabidopsis thaliana; identical to SEQ ID NO: 88983
  misc_feature (1)..(1114): Ceres Seq. ID no. 12714596
  misc_feature (1)..(1114): Ortholog of  Ceres SEQ ID NO 15178317 as cited in SEQ ID NO 52489
  misc_feature (1)..(1114): Ortholog of  Ceres SEQ ID NO 14314415 as cited in SEQ ID NO 57442

SEQ ID NO: 92740 - protein, 261 aa, Arabidopsis thaliana; identical to SEQ ID NO: 88984
  peptide (1)..(261): Ceres Seq. ID no. 12714597

SEQ ID NO: 92741 - protein, 136 aa, Arabidopsis thaliana; identical to SEQ ID NO: 88985
  peptide (1)..(136): Ceres Seq. ID no. 12714598

SEQ ID NO: 92742 - protein, 132 aa, Arabidopsis thaliana; identical to SEQ ID NO: 88986
  peptide (1)..(132): Ceres Seq. ID no. 12714599

SEQ ID NO: 92743 - DNA, 3780 bp, Arabidopsis thaliana; identical to SEQ ID NO: 88987
  misc_feature (1)..(3780): Ceres Seq. ID no. 12714653
  misc_feature (1)..(3780): Ortholog of  Ceres SEQ ID NO 14316302 as cited in SEQ ID NO 55232
  misc_feature (1)..(3780): Ortholog of  Ceres SEQ ID NO 14308274 as cited in SEQ ID NO 55597
  misc_feature (1)..(3780): Ortholog of  Ceres SEQ ID NO 13659710 as cited in SEQ ID NO 60808

SEQ ID NO: 92744 - protein, 1259 aa, Arabidopsis thaliana; identical to SEQ ID NO: 88988
  peptide (1)..(1259): Ceres Seq. ID no. 12714654

SEQ ID NO: 92745 - protein, 1101 aa, Arabidopsis thaliana; identical to SEQ ID NO: 88989
  peptide (1)..(1101): Ceres Seq. ID no. 12714655

SEQ ID NO: 92746 - protein, 1067 aa, Arabidopsis thaliana; identical to SEQ ID NO: 88990
  peptide (1)..(1067): Ceres Seq. ID no. 12714656

SEQ ID NO: 92747 - DNA, 1177 bp, Arabidopsis thaliana; identical to SEQ ID NO: 88991
  misc_feature (1)..(1177): Ceres Seq. ID no. 12714661
  misc_feature (1)..(1177): Ortholog of  Ceres SEQ ID NO 14311934 as cited in SEQ ID NO 51605

SEQ ID NO: 92748 - protein, 265 aa, Arabidopsis thaliana; identical to SEQ ID NO: 40934
  peptide (1)..(265): Ceres Seq. ID no. 12714662

SEQ ID NO: 92749 - protein, 241 aa, Arabidopsis thaliana; identical to SEQ ID NO: 40935
  peptide (1)..(241): Ceres Seq. ID no. 12714663

SEQ ID NO: 92750 - protein, 230 aa, Arabidopsis thaliana; identical to SEQ ID NO: 40936
  peptide (1)..(230): Ceres Seq. ID no. 12714664

SEQ ID NO: 92751 - DNA, 663 bp, Arabidopsis thaliana; identical to SEQ ID NO: 88995
  misc_feature (1)..(663): Ceres Seq. ID no. 12714690
  misc_feature (1)..(663): Ortholog of  Ceres SEQ ID NO 15179271 as cited in SEQ ID NO 0

SEQ ID NO: 92752 - protein, 220 aa, Arabidopsis thaliana; identical to SEQ ID NO: 88996
  peptide (1)..(220): Ceres Seq. ID no. 12714691

SEQ ID NO: 92753 - protein, 175 aa, Arabidopsis thaliana; identical to SEQ ID NO: 88997
  peptide (1)..(175): Ceres Seq. ID no. 12714692

SEQ ID NO: 92754 - protein, 158 aa, Arabidopsis thaliana; identical to SEQ ID NO: 88998
  peptide (1)..(158): Ceres Seq. ID no. 12714693

SEQ ID NO: 92755 - DNA, 741 bp, Arabidopsis thaliana; identical to SEQ ID NO: 88999
  misc_feature (1)..(741): Ceres Seq. ID no. 12714698
  misc_feature (1)..(741): Ortholog of  Ceres SEQ ID NO 13595658 as cited in SEQ ID NO 59888
  misc_feature (1)..(741): Ortholog of  Ceres SEQ ID NO 13661330 as cited in SEQ ID NO 61614
  misc_feature (1)..(741): Ortholog of  Ceres SEQ ID NO 13596025 as cited in SEQ ID NO 62024
  misc_feature (1)..(741): Ortholog of  Ceres SEQ ID NO 13662324 as cited in SEQ ID NO 62162
  misc_feature (1)..(741): Ortholog of  Ceres SEQ ID NO 12625713 as cited in SEQ ID NO 64160
  misc_feature (1)..(741): Ortholog of  Ceres SEQ ID NO 15174373 as cited in SEQ ID NO 0

SEQ ID NO: 92756 - protein, 246 aa, Arabidopsis thaliana; identical to SEQ ID NO: 89000
  peptide (1)..(246): Ceres Seq. ID no. 12714699

SEQ ID NO: 92757 - DNA, 1197 bp, Arabidopsis thaliana; identical to SEQ ID NO: 89001
  misc_feature (1)..(1197): Ceres Seq. ID no. 12714706
  misc_feature (1)..(1197): Ortholog of  Ceres SEQ ID NO 14303355 as cited in SEQ ID NO 59746
  misc_feature (1)..(1197): Ortholog of  Ceres SEQ ID NO 14302415 as cited in SEQ ID NO 62781

SEQ ID NO: 92758 - protein, 73 aa, Arabidopsis thaliana; identical to SEQ ID NO: 89002
  peptide (1)..(73): Ceres Seq. ID no. 12714707

SEQ ID NO: 92759 - protein, 72 aa, Arabidopsis thaliana; identical to SEQ ID NO: 89003
  peptide (1)..(72): Ceres Seq. ID no. 12714708

SEQ ID NO: 92760 - protein, 38 aa, Arabidopsis thaliana; identical to SEQ ID NO: 89004
  peptide (1)..(38): Ceres Seq. ID no. 12714709

SEQ ID NO: 92761 - DNA, 1042 bp, Arabidopsis thaliana; identical to SEQ ID NO: 89005
  misc_feature (1)..(1042): Ceres Seq. ID no. 12714710
  misc_feature (1)..(1042): Ortholog of  Ceres SEQ ID NO 13662367 as cited in SEQ ID NO 67774

SEQ ID NO: 92762 - protein, 336 aa, Arabidopsis thaliana; identical to SEQ ID NO: 89006
  peptide (1)..(336): Ceres Seq. ID no. 12714711

SEQ ID NO: 92763 - protein, 333 aa, Arabidopsis thaliana; identical to SEQ ID NO: 89007
  peptide (1)..(333): Ceres Seq. ID no. 12714712

SEQ ID NO: 92764 - protein, 331 aa, Arabidopsis thaliana; identical to SEQ ID NO: 89008
  peptide (1)..(331): Ceres Seq. ID no. 12714713

SEQ ID NO: 92765 - DNA, 2221 bp, Arabidopsis thaliana; identical to SEQ ID NO: 89009
  misc_feature (1)..(2221): Ceres Seq. ID no. 12714714
  misc_feature (1)..(2221): Ortholog of  Ceres SEQ ID NO 13600595 as cited in SEQ ID NO 629
  misc_feature (1)..(2221): Ortholog of  Ceres SEQ ID NO 13593379 as cited in SEQ ID NO 20573

SEQ ID NO: 92766 - protein, 728 aa, Arabidopsis thaliana; identical to SEQ ID NO: 89010
  peptide (1)..(728): Ceres Seq. ID no. 12714715

SEQ ID NO: 92767 - protein, 670 aa, Arabidopsis thaliana; identical to SEQ ID NO: 89011
  peptide (1)..(670): Ceres Seq. ID no. 12714716

SEQ ID NO: 92768 - protein, 589 aa, Arabidopsis thaliana; identical to SEQ ID NO: 89012
  peptide (1)..(589): Ceres Seq. ID no. 12714717

SEQ ID NO: 92769 - DNA, 1472 bp, Arabidopsis thaliana; identical to SEQ ID NO: 89013
  misc_feature (1)..(1472): Ceres Seq. ID no. 12714735
  misc_feature (1)..(1472): Ortholog of  Ceres SEQ ID NO 13596392 as cited in SEQ ID NO 62136
  misc_feature (1)..(1472): Ortholog of  Ceres SEQ ID NO 14313244 as cited in SEQ ID NO 66802
  misc_feature (1)..(1472): Ortholog of  Ceres SEQ ID NO 13654360 as cited in SEQ ID NO 67980
  misc_feature (1)..(1472): Ortholog of  Ceres SEQ ID NO 13596394 as cited in SEQ ID NO 68561

SEQ ID NO: 92770 - protein, 159 aa, Arabidopsis thaliana; identical to SEQ ID NO: 89014
  peptide (1)..(159): Ceres Seq. ID no. 12714736

SEQ ID NO: 92771 - protein, 137 aa, Arabidopsis thaliana; identical to SEQ ID NO: 89015
  peptide (1)..(137): Ceres Seq. ID no. 12714737

SEQ ID NO: 92772 - protein, 119 aa, Arabidopsis thaliana; identical to SEQ ID NO: 89016
  peptide (1)..(119): Ceres Seq. ID no. 12714738

SEQ ID NO: 92773 - DNA, 1484 bp, Arabidopsis thaliana; identical to SEQ ID NO: 89017
  misc_feature (1)..(1484): Ceres Seq. ID no. 12714754
  misc_feature (1)..(1484): Ortholog of  Ceres SEQ ID NO 13594536 as cited in SEQ ID NO 51382

SEQ ID NO: 92774 - protein, 415 aa, Arabidopsis thaliana; identical to SEQ ID NO: 89018
  peptide (1)..(415): Ceres Seq. ID no. 12714755

SEQ ID NO: 92775 - protein, 365 aa, Arabidopsis thaliana; identical to SEQ ID NO: 89019
  peptide (1)..(365): Ceres Seq. ID no. 12714756

SEQ ID NO: 92776 - protein, 225 aa, Arabidopsis thaliana; identical to SEQ ID NO: 89020
  peptide (1)..(225): Ceres Seq. ID no. 12714757

SEQ ID NO: 92777 - DNA, 983 bp, Arabidopsis thaliana; identical to SEQ ID NO: 89021
  misc_feature (1)..(983): Ceres Seq. ID no. 12714758
  misc_feature (1)..(983): Ortholog of  Ceres SEQ ID NO 12609566 as cited in SEQ ID NO 52161

SEQ ID NO: 92778 - protein, 208 aa, Arabidopsis thaliana; identical to SEQ ID NO: 89022
  peptide (1)..(208): Ceres Seq. ID no. 12714759

SEQ ID NO: 92779 - protein, 184 aa, Arabidopsis thaliana; identical to SEQ ID NO: 89023
  peptide (1)..(184): Ceres Seq. ID no. 12714760

SEQ ID NO: 92780 - protein, 154 aa, Arabidopsis thaliana; identical to SEQ ID NO: 89024
  peptide (1)..(154): Ceres Seq. ID no. 12714761

SEQ ID NO: 92781 - DNA, 1096 bp, Arabidopsis thaliana; identical to SEQ ID NO: 89025
  misc_feature (1)..(1096): Ceres Seq. ID no. 12714770
  misc_feature (1)..(1096): Ortholog of  Ceres SEQ ID NO 15169380 as cited in SEQ ID NO 58483
  misc_feature (1)..(1096): Ortholog of  Ceres SEQ ID NO 15177787 as cited in SEQ ID NO 59431
  misc_feature (1)..(1096): Ortholog of  Ceres SEQ ID NO 12617197 as cited in SEQ ID NO 63406
  misc_feature (1)..(1096): Ortholog of  Ceres SEQ ID NO 14301622 as cited in SEQ ID NO 65156
  misc_feature (1)..(1096): Ortholog of  Ceres SEQ ID NO 13596284 as cited in SEQ ID NO 68273

SEQ ID NO: 92782 - protein, 354 aa, Arabidopsis thaliana; identical to SEQ ID NO: 89026
  peptide (1)..(354): Ceres Seq. ID no. 12714771

SEQ ID NO: 92783 - protein, 265 aa, Arabidopsis thaliana; identical to SEQ ID NO: 89027
  peptide (1)..(265): Ceres Seq. ID no. 12714772

SEQ ID NO: 92784 - protein, 204 aa, Arabidopsis thaliana; identical to SEQ ID NO: 89028
  peptide (1)..(204): Ceres Seq. ID no. 12714773

SEQ ID NO: 92785 - DNA, 1168 bp, Arabidopsis thaliana; identical to SEQ ID NO: 89029
  misc_feature (1)..(1168): Ceres Seq. ID no. 12714782
  misc_feature (1)..(1168): Ortholog of  Ceres SEQ ID NO 14314939 as cited in SEQ ID NO 58010

SEQ ID NO: 92786 - protein, 278 aa, Arabidopsis thaliana; identical to SEQ ID NO: 23190
  peptide (1)..(278): Ceres Seq. ID no. 12714783

SEQ ID NO: 92787 - protein, 222 aa, Arabidopsis thaliana; identical to SEQ ID NO: 23191
  peptide (1)..(222): Ceres Seq. ID no. 12714784

SEQ ID NO: 92788 - protein, 220 aa, Arabidopsis thaliana; identical to SEQ ID NO: 23192
  peptide (1)..(220): Ceres Seq. ID no. 12714785

SEQ ID NO: 92789 - DNA, 1487 bp, Arabidopsis thaliana; identical to SEQ ID NO: 89033
  misc_feature (1)..(1487): Ceres Seq. ID no. 12714790
  misc_feature (1)..(1487): Ortholog of  Ceres SEQ ID NO 13654468 as cited in SEQ ID NO 68094

SEQ ID NO: 92790 - protein, 421 aa, Arabidopsis thaliana; identical to SEQ ID NO: 89034
  peptide (1)..(421): Ceres Seq. ID no. 12714791

SEQ ID NO: 92791 - protein, 411 aa, Arabidopsis thaliana; identical to SEQ ID NO: 34823
  peptide (1)..(411): Ceres Seq. ID no. 12714792

SEQ ID NO: 92792 - protein, 253 aa, Arabidopsis thaliana; identical to SEQ ID NO: 34824
  peptide (1)..(253): Ceres Seq. ID no. 12714793

SEQ ID NO: 92793 - DNA, 1500 bp, Arabidopsis thaliana; identical to SEQ ID NO: 89037
  misc_feature (1)..(1500): Ceres Seq. ID no. 12714802
  misc_feature (1)..(1500): Ortholog of  Ceres SEQ ID NO 13595870 as cited in SEQ ID NO 62101
  misc_feature (1)..(1500): Ortholog of  Ceres SEQ ID NO 13590241 as cited in SEQ ID NO 63878
  misc_feature (1)..(1500): Ortholog of  Ceres SEQ ID NO 13657939 as cited in SEQ ID NO 66349
  misc_feature (1)..(1500): Ortholog of  Ceres SEQ ID NO 13660597 as cited in SEQ ID NO 67655

SEQ ID NO: 92794 - protein, 398 aa, Arabidopsis thaliana; identical to SEQ ID NO: 42203
  peptide (1)..(398): Ceres Seq. ID no. 12714803

SEQ ID NO: 92795 - protein, 265 aa, Arabidopsis thaliana; identical to SEQ ID NO: 42204
  peptide (1)..(265): Ceres Seq. ID no. 12714804

SEQ ID NO: 92796 - protein, 243 aa, Arabidopsis thaliana; identical to SEQ ID NO: 42205
  peptide (1)..(243): Ceres Seq. ID no. 12714805

SEQ ID NO: 92797 - DNA, 1616 bp, Arabidopsis thaliana; identical to SEQ ID NO: 89041
  misc_feature (1)..(1616): Ceres Seq. ID no. 12714839
  misc_feature (1)..(1616): Ortholog of  Ceres SEQ ID NO 13518411 as cited in SEQ ID NO 55230
  misc_feature (1)..(1616): Ortholog of  Ceres SEQ ID NO 13654989 as cited in SEQ ID NO 63117
  misc_feature (1)..(1616): Ortholog of  Ceres SEQ ID NO 13584744 as cited in SEQ ID NO 69137

SEQ ID NO: 92798 - protein, 465 aa, Arabidopsis thaliana; identical to SEQ ID NO: 89042
  peptide (1)..(465): Ceres Seq. ID no. 12714840

SEQ ID NO: 92799 - protein, 388 aa, Arabidopsis thaliana; identical to SEQ ID NO: 80299
  peptide (1)..(388): Ceres Seq. ID no. 12714841

SEQ ID NO: 92800 - protein, 360 aa, Arabidopsis thaliana; identical to SEQ ID NO: 89044
  peptide (1)..(360): Ceres Seq. ID no. 12714842

SEQ ID NO: 92801 - DNA, 1029 bp, Arabidopsis thaliana; identical to SEQ ID NO: 89045
  misc_feature (1)..(1029): Ceres Seq. ID no. 12714859
  misc_feature (1)..(1029): Ortholog of  Ceres SEQ ID NO 15170866 as cited in SEQ ID NO 54810

SEQ ID NO: 92802 - protein, 342 aa, Arabidopsis thaliana; identical to SEQ ID NO: 89046
  peptide (1)..(342): Ceres Seq. ID no. 12714860

SEQ ID NO: 92803 - protein, 339 aa, Arabidopsis thaliana; identical to SEQ ID NO: 89047
  peptide (1)..(339): Ceres Seq. ID no. 12714861

SEQ ID NO: 92804 - protein, 185 aa, Arabidopsis thaliana; identical to SEQ ID NO: 89048
  peptide (1)..(185): Ceres Seq. ID no. 12714862

SEQ ID NO: 92805 - DNA, 1536 bp, Arabidopsis thaliana; identical to SEQ ID NO: 89049
  misc_feature (1)..(1536): Ceres Seq. ID no. 12714870
  misc_feature (1)..(1536): Ortholog of  Ceres SEQ ID NO 13594037 as cited in SEQ ID NO 55666
  misc_feature (1)..(1536): Ortholog of  Ceres SEQ ID NO 13657707 as cited in SEQ ID NO 66407

SEQ ID NO: 92806 - protein, 511 aa, Arabidopsis thaliana; identical to SEQ ID NO: 89050
  peptide (1)..(511): Ceres Seq. ID no. 12714871

SEQ ID NO: 92807 - protein, 500 aa, Arabidopsis thaliana; identical to SEQ ID NO: 89051
  peptide (1)..(500): Ceres Seq. ID no. 12714872

SEQ ID NO: 92808 - protein, 404 aa, Arabidopsis thaliana; identical to SEQ ID NO: 89052
  peptide (1)..(404): Ceres Seq. ID no. 12714873

SEQ ID NO: 92809 - DNA, 2451 bp, Arabidopsis thaliana; identical to SEQ ID NO: 89053
  misc_feature (1)..(2451): Ceres Seq. ID no. 12714886
  misc_feature (1)..(2451): Ortholog of  Ceres SEQ ID NO 14307030 as cited in SEQ ID NO 54041
  misc_feature (1)..(2451): Ortholog of  Ceres SEQ ID NO 14302891 as cited in SEQ ID NO 66282

SEQ ID NO: 92810 - protein, 816 aa, Arabidopsis thaliana; identical to SEQ ID NO: 89054
  peptide (1)..(816): Ceres Seq. ID no. 12714887

SEQ ID NO: 92811 - protein, 750 aa, Arabidopsis thaliana; identical to SEQ ID NO: 89055
  peptide (1)..(750): Ceres Seq. ID no. 12714888

SEQ ID NO: 92812 - protein, 717 aa, Arabidopsis thaliana; identical to SEQ ID NO: 89056
  peptide (1)..(717): Ceres Seq. ID no. 12714889

SEQ ID NO: 92813 - DNA, 945 bp, Arabidopsis thaliana; identical to SEQ ID NO: 89057
  misc_feature (1)..(945): Ceres Seq. ID no. 12714906
  misc_feature (1)..(945): Ortholog of  Ceres SEQ ID NO 13639124 as cited in SEQ ID NO 56718
  misc_feature (1)..(945): Ortholog of  Ceres SEQ ID NO 13596474 as cited in SEQ ID NO 62169
  misc_feature (1)..(945): Ortholog of  Ceres SEQ ID NO 13598714 as cited in SEQ ID NO 62656
  misc_feature (1)..(945): Ortholog of  Ceres SEQ ID NO 13596969 as cited in SEQ ID NO 63375
  misc_feature (1)..(945): Ortholog of  Ceres SEQ ID NO 14302240 as cited in SEQ ID NO 64162
  misc_feature (1)..(945): Ortholog of  Ceres SEQ ID NO 13584480 as cited in SEQ ID NO 64751
  misc_feature (1)..(945): Ortholog of  Ceres SEQ ID NO 13597519 as cited in SEQ ID NO 64759
  misc_feature (1)..(945): Ortholog of  Ceres SEQ ID NO 13595926 as cited in SEQ ID NO 67778
  misc_feature (1)..(945): Ortholog of  Ceres SEQ ID NO 13596362 as cited in SEQ ID NO 67877
  misc_feature (1)..(945): Ortholog of  Ceres SEQ ID NO 13587054 as cited in SEQ ID NO 0

SEQ ID NO: 92814 - protein, 314 aa, Arabidopsis thaliana; identical to SEQ ID NO: 21993
  peptide (1)..(314): Ceres Seq. ID no. 12714907

SEQ ID NO: 92815 - protein, 306 aa, Arabidopsis thaliana; identical to SEQ ID NO: 21994
  peptide (1)..(306): Ceres Seq. ID no. 12714908

SEQ ID NO: 92816 - protein, 302 aa, Arabidopsis thaliana; identical to SEQ ID NO: 21995
  peptide (1)..(302): Ceres Seq. ID no. 12714909

SEQ ID NO: 92817 - DNA, 1482 bp, Arabidopsis thaliana; identical to SEQ ID NO: 89061
  misc_feature (1)..(1482): Ceres Seq. ID no. 12714914
  misc_feature (1)..(1482): Ortholog of  Ceres SEQ ID NO 14315862 as cited in SEQ ID NO 60207
  misc_feature (1)..(1482): Ortholog of  Ceres SEQ ID NO 13660129 as cited in SEQ ID NO 67547

SEQ ID NO: 92818 - protein, 493 aa, Arabidopsis thaliana; identical to SEQ ID NO: 77351
  peptide (1)..(493): Ceres Seq. ID no. 12714915

SEQ ID NO: 92819 - protein, 472 aa, Arabidopsis thaliana; identical to SEQ ID NO: 77352
  peptide (1)..(472): Ceres Seq. ID no. 12714916

SEQ ID NO: 92820 - protein, 338 aa, Arabidopsis thaliana; identical to SEQ ID NO: 89064
  peptide (1)..(338): Ceres Seq. ID no. 12714917

SEQ ID NO: 92821 - DNA, 1736 bp, Arabidopsis thaliana; identical to SEQ ID NO: 89065
  misc_feature (1)..(1736): Ceres Seq. ID no. 12714918
  misc_feature (1)..(1736): Ortholog of  Ceres SEQ ID NO 15174547 as cited in SEQ ID NO 59586
  misc_feature (1)..(1736): Ortholog of  Ceres SEQ ID NO 15169470 as cited in SEQ ID NO 66036

SEQ ID NO: 92822 - protein, 523 aa, Arabidopsis thaliana; identical to SEQ ID NO: 24003
  peptide (1)..(523): Ceres Seq. ID no. 12714919

SEQ ID NO: 92823 - protein, 507 aa, Arabidopsis thaliana; identical to SEQ ID NO: 24004
  peptide (1)..(507): Ceres Seq. ID no. 12714920

SEQ ID NO: 92824 - protein, 403 aa, Arabidopsis thaliana; identical to SEQ ID NO: 24005
  peptide (1)..(403): Ceres Seq. ID no. 12714921

SEQ ID NO: 92825 - DNA, 1220 bp, Arabidopsis thaliana; identical to SEQ ID NO: 89069
  misc_feature (1)..(1220): Ceres Seq. ID no. 12714933
  misc_feature (1)..(1220): Ortholog of  Ceres SEQ ID NO 13597590 as cited in SEQ ID NO 60707
  misc_feature (1)..(1220): Ortholog of  Ceres SEQ ID NO 14309283 as cited in SEQ ID NO 0

SEQ ID NO: 92826 - protein, 319 aa, Arabidopsis thaliana; identical to SEQ ID NO: 21407
  peptide (1)..(319): Ceres Seq. ID no. 12714934

SEQ ID NO: 92827 - protein, 253 aa, Arabidopsis thaliana; identical to SEQ ID NO: 21408
  peptide (1)..(253): Ceres Seq. ID no. 12714935

SEQ ID NO: 92828 - DNA, 1482 bp, Arabidopsis thaliana; identical to SEQ ID NO: 89072
  misc_feature (1)..(1482): Ceres Seq. ID no. 12714949
  misc_feature (1)..(1482): Ortholog of  Ceres SEQ ID NO 15174599 as cited in SEQ ID NO 53646
  misc_feature (1)..(1482): Ortholog of  Ceres SEQ ID NO 15174646 as cited in SEQ ID NO 54499

SEQ ID NO: 92829 - protein, 493 aa, Arabidopsis thaliana; identical to SEQ ID NO: 89073
  peptide (1)..(493): Ceres Seq. ID no. 12714950

SEQ ID NO: 92830 - protein, 489 aa, Arabidopsis thaliana; identical to SEQ ID NO: 89074
  peptide (1)..(489): Ceres Seq. ID no. 12714951

SEQ ID NO: 92831 - protein, 380 aa, Arabidopsis thaliana; identical to SEQ ID NO: 27534
  peptide (1)..(380): Ceres Seq. ID no. 12714952

SEQ ID NO: 92832 - DNA, 1710 bp, Arabidopsis thaliana; identical to SEQ ID NO: 89076
  misc_feature (1)..(1710): Ceres Seq. ID no. 12714956
  misc_feature (1)..(1710): Ortholog of  Ceres SEQ ID NO 14313288 as cited in SEQ ID NO 67419

SEQ ID NO: 92833 - protein, 569 aa, Arabidopsis thaliana; identical to SEQ ID NO: 89077
  peptide (1)..(569): Ceres Seq. ID no. 12714957

SEQ ID NO: 92834 - protein, 558 aa, Arabidopsis thaliana; identical to SEQ ID NO: 89078
  peptide (1)..(558): Ceres Seq. ID no. 12714958

SEQ ID NO: 92835 - protein, 529 aa, Arabidopsis thaliana; identical to SEQ ID NO: 89079
  peptide (1)..(529): Ceres Seq. ID no. 12714959

SEQ ID NO: 92836 - DNA, 2271 bp, Arabidopsis thaliana; identical to SEQ ID NO: 89080
  misc_feature (1)..(2271): Ceres Seq. ID no. 12715026
  misc_feature (1)..(2271): Ortholog of  Ceres SEQ ID NO 15168900 as cited in SEQ ID NO 217

SEQ ID NO: 92837 - protein, 756 aa, Arabidopsis thaliana; identical to SEQ ID NO: 89081
  peptide (1)..(756): Ceres Seq. ID no. 12715027

SEQ ID NO: 92838 - protein, 679 aa, Arabidopsis thaliana; identical to SEQ ID NO: 89082
  peptide (1)..(679): Ceres Seq. ID no. 12715028

SEQ ID NO: 92839 - DNA, 1971 bp, Arabidopsis thaliana; identical to SEQ ID NO: 89083
  misc_feature (1)..(1971): Ceres Seq. ID no. 12715074
  misc_feature (1)..(1971): Ortholog of  Ceres SEQ ID NO 13655640 as cited in SEQ ID NO 63844
  misc_feature (1)..(1971): Ortholog of  Ceres SEQ ID NO 13584744 as cited in SEQ ID NO 69137

SEQ ID NO: 92840 - protein, 656 aa, Arabidopsis thaliana; identical to SEQ ID NO: 89084
  peptide (1)..(656): Ceres Seq. ID no. 12715075

SEQ ID NO: 92841 - protein, 457 aa, Arabidopsis thaliana; identical to SEQ ID NO: 89085
  peptide (1)..(457): Ceres Seq. ID no. 12715076

SEQ ID NO: 92842 - protein, 427 aa, Arabidopsis thaliana; identical to SEQ ID NO: 89086
  peptide (1)..(427): Ceres Seq. ID no. 12715077

SEQ ID NO: 92843 - DNA, 921 bp, Arabidopsis thaliana; identical to SEQ ID NO: 89087
  misc_feature (1)..(921): Ceres Seq. ID no. 12715098
  misc_feature (1)..(921): Ortholog of  Ceres SEQ ID NO 14316324 as cited in SEQ ID NO 55612
  misc_feature (1)..(921): Ortholog of  Ceres SEQ ID NO 14316378 as cited in SEQ ID NO 57746
  misc_feature (1)..(921): Ortholog of  Ceres SEQ ID NO 13596097 as cited in SEQ ID NO 68421
  misc_feature (1)..(921): Ortholog of  Ceres SEQ ID NO 13598439 as cited in SEQ ID NO 69016
  misc_feature (1)..(921): Ortholog of  Ceres SEQ ID NO 13599524 as cited in SEQ ID NO 0

SEQ ID NO: 92844 - protein, 306 aa, Arabidopsis thaliana; identical to SEQ ID NO: 89088
  peptide (1)..(306): Ceres Seq. ID no. 12715099

SEQ ID NO: 92845 - protein, 170 aa, Arabidopsis thaliana; identical to SEQ ID NO: 89089
  peptide (1)..(170): Ceres Seq. ID no. 12715100

SEQ ID NO: 92846 - protein, 153 aa, Arabidopsis thaliana; identical to SEQ ID NO: 89090
  peptide (1)..(153): Ceres Seq. ID no. 12715101

SEQ ID NO: 92847 - DNA, 1710 bp, Arabidopsis thaliana; identical to SEQ ID NO: 89091
  misc_feature (1)..(1710): Ceres Seq. ID no. 12715104
  misc_feature (1)..(1710): Ortholog of  Ceres SEQ ID NO 15175771 as cited in SEQ ID NO 55443

SEQ ID NO: 92848 - protein, 569 aa, Arabidopsis thaliana; identical to SEQ ID NO: 89092
  peptide (1)..(569): Ceres Seq. ID no. 12715105

SEQ ID NO: 92849 - protein, 560 aa, Arabidopsis thaliana; identical to SEQ ID NO: 89093
  peptide (1)..(560): Ceres Seq. ID no. 12715106

SEQ ID NO: 92850 - protein, 520 aa, Arabidopsis thaliana; identical to SEQ ID NO: 89094
  peptide (1)..(520): Ceres Seq. ID no. 12715107

SEQ ID NO: 92851 - DNA, 1239 bp, Arabidopsis thaliana; identical to SEQ ID NO: 89095
  misc_feature (1)..(1239): Ceres Seq. ID no. 12715115
  misc_feature (1)..(1239): Ortholog of  Ceres SEQ ID NO 12617887 as cited in SEQ ID NO 65526

SEQ ID NO: 92852 - protein, 412 aa, Arabidopsis thaliana; identical to SEQ ID NO: 89096
  peptide (1)..(412): Ceres Seq. ID no. 12715116

SEQ ID NO: 92853 - protein, 295 aa, Arabidopsis thaliana; identical to SEQ ID NO: 89097
  peptide (1)..(295): Ceres Seq. ID no. 12715117

SEQ ID NO: 92854 - protein, 267 aa, Arabidopsis thaliana; identical to SEQ ID NO: 89098
  peptide (1)..(267): Ceres Seq. ID no. 12715118

SEQ ID NO: 92855 - DNA, 1866 bp, Arabidopsis thaliana; identical to SEQ ID NO: 89099
  misc_feature (1)..(1866): Ceres Seq. ID no. 12715348
  misc_feature (1)..(1866): Ortholog of  Ceres SEQ ID NO 12586556 as cited in SEQ ID NO 64667
  misc_feature (1)..(1866): Ortholog of  Ceres SEQ ID NO 13660894 as cited in SEQ ID NO 67475

SEQ ID NO: 92856 - protein, 621 aa, Arabidopsis thaliana; identical to SEQ ID NO: 89100
  peptide (1)..(621): Ceres Seq. ID no. 12715349

SEQ ID NO: 92857 - protein, 610 aa, Arabidopsis thaliana; identical to SEQ ID NO: 89101
  peptide (1)..(610): Ceres Seq. ID no. 12715350

SEQ ID NO: 92858 - protein, 590 aa, Arabidopsis thaliana; identical to SEQ ID NO: 89102
  peptide (1)..(590): Ceres Seq. ID no. 12715351

SEQ ID NO: 92859 - DNA, 1122 bp, Arabidopsis thaliana; identical to SEQ ID NO: 89103
  misc_feature (1)..(1122): Ceres Seq. ID no. 12715364
  misc_feature (1)..(1122): Ortholog of  Ceres SEQ ID NO 13595351 as cited in SEQ ID NO 55934
  misc_feature (1)..(1122): Ortholog of  Ceres SEQ ID NO 13639645 as cited in SEQ ID NO 57488

SEQ ID NO: 92860 - protein, 373 aa, Arabidopsis thaliana; identical to SEQ ID NO: 89104
  peptide (1)..(373): Ceres Seq. ID no. 12715365

SEQ ID NO: 92861 - protein, 368 aa, Arabidopsis thaliana; identical to SEQ ID NO: 82203
  peptide (1)..(368): Ceres Seq. ID no. 12715366

SEQ ID NO: 92862 - protein, 349 aa, Arabidopsis thaliana; identical to SEQ ID NO: 82204
  peptide (1)..(349): Ceres Seq. ID no. 12715367

SEQ ID NO: 92863 - DNA, 1441 bp, Arabidopsis thaliana; identical to SEQ ID NO: 89107
  misc_feature (1)..(1441): Ceres Seq. ID no. 12715372
  misc_feature (1)..(1441): Ortholog of  Ceres SEQ ID NO 13595351 as cited in SEQ ID NO 55934
  misc_feature (1)..(1441): Ortholog of  Ceres SEQ ID NO 13639645 as cited in SEQ ID NO 57488

SEQ ID NO: 92864 - protein, 384 aa, Arabidopsis thaliana; identical to SEQ ID NO: 89108
  peptide (1)..(384): Ceres Seq. ID no. 12715373

SEQ ID NO: 92865 - protein, 377 aa, Arabidopsis thaliana; identical to SEQ ID NO: 89109
  peptide (1)..(377): Ceres Seq. ID no. 12715374

SEQ ID NO: 92866 - protein, 368 aa, Arabidopsis thaliana; identical to SEQ ID NO: 89110
  peptide (1)..(368): Ceres Seq. ID no. 12715375

SEQ ID NO: 92867 - DNA, 1515 bp, Arabidopsis thaliana; identical to SEQ ID NO: 89111
  misc_feature (1)..(1515): Ceres Seq. ID no. 12715401
  misc_feature (1)..(1515): Ortholog of  Ceres SEQ ID NO 13638292 as cited in SEQ ID NO 57738

SEQ ID NO: 92868 - protein, 504 aa, Arabidopsis thaliana; identical to SEQ ID NO: 69894
  peptide (1)..(504): Ceres Seq. ID no. 12715402

SEQ ID NO: 92869 - protein, 498 aa, Arabidopsis thaliana; identical to SEQ ID NO: 69895
  peptide (1)..(498): Ceres Seq. ID no. 12715403

SEQ ID NO: 92870 - protein, 380 aa, Arabidopsis thaliana; identical to SEQ ID NO: 69896
  peptide (1)..(380): Ceres Seq. ID no. 12715404

SEQ ID NO: 92871 - DNA, 2043 bp, Arabidopsis thaliana; identical to SEQ ID NO: 89115
  misc_feature (1)..(2043): Ceres Seq. ID no. 12715412
  misc_feature (1)..(2043): Ortholog of  Ceres SEQ ID NO 13638292 as cited in SEQ ID NO 57738

SEQ ID NO: 92872 - protein, 680 aa, Arabidopsis thaliana; identical to SEQ ID NO: 89116
  peptide (1)..(680): Ceres Seq. ID no. 12715413

SEQ ID NO: 92873 - protein, 674 aa, Arabidopsis thaliana; identical to SEQ ID NO: 89117
  peptide (1)..(674): Ceres Seq. ID no. 12715414

SEQ ID NO: 92874 - protein, 643 aa, Arabidopsis thaliana; identical to SEQ ID NO: 69877
  peptide (1)..(643): Ceres Seq. ID no. 12715415

SEQ ID NO: 92875 - DNA, 2286 bp, Arabidopsis thaliana; identical to SEQ ID NO: 89119
  misc_feature (1)..(2286): Ceres Seq. ID no. 12715433
  misc_feature (1)..(2286): Ortholog of  Ceres SEQ ID NO 13596198 as cited in SEQ ID NO 68488

SEQ ID NO: 92876 - protein, 761 aa, Arabidopsis thaliana; identical to SEQ ID NO: 89120
  peptide (1)..(761): Ceres Seq. ID no. 12715434

SEQ ID NO: 92877 - protein, 718 aa, Arabidopsis thaliana; identical to SEQ ID NO: 89121
  peptide (1)..(718): Ceres Seq. ID no. 12715435

SEQ ID NO: 92878 - protein, 655 aa, Arabidopsis thaliana; identical to SEQ ID NO: 89122
  peptide (1)..(655): Ceres Seq. ID no. 12715436

SEQ ID NO: 92879 - DNA, 1446 bp, Arabidopsis thaliana; identical to SEQ ID NO: 89123
  misc_feature (1)..(1446): Ceres Seq. ID no. 12715518
  misc_feature (1)..(1446): Ortholog of  Ceres SEQ ID NO 12614670 as cited in SEQ ID NO 68565

SEQ ID NO: 92880 - protein, 481 aa, Arabidopsis thaliana; identical to SEQ ID NO: 89124
  peptide (1)..(481): Ceres Seq. ID no. 12715519

SEQ ID NO: 92881 - protein, 347 aa, Arabidopsis thaliana; identical to SEQ ID NO: 50028
  peptide (1)..(347): Ceres Seq. ID no. 12715520

SEQ ID NO: 92882 - protein, 337 aa, Arabidopsis thaliana; identical to SEQ ID NO: 89126
  peptide (1)..(337): Ceres Seq. ID no. 12715521

SEQ ID NO: 92883 - DNA, 836 bp, Arabidopsis thaliana; identical to SEQ ID NO: 89127
  misc_feature (1)..(836): Ceres Seq. ID no. 12715584
  misc_feature (1)..(836): Ortholog of  Ceres SEQ ID NO 13597821 as cited in SEQ ID NO 64462
  misc_feature (1)..(836): Ortholog of  Ceres SEQ ID NO 12618069 as cited in SEQ ID NO 65387

SEQ ID NO: 92884 - protein, 261 aa, Arabidopsis thaliana; identical to SEQ ID NO: 35607
  peptide (1)..(261): Ceres Seq. ID no. 12715585

SEQ ID NO: 92885 - protein, 243 aa, Arabidopsis thaliana; identical to SEQ ID NO: 35608
  peptide (1)..(243): Ceres Seq. ID no. 12715586

SEQ ID NO: 92886 - protein, 213 aa, Arabidopsis thaliana; identical to SEQ ID NO: 77698
  peptide (1)..(213): Ceres Seq. ID no. 12715587

SEQ ID NO: 92887 - DNA, 1405 bp, Arabidopsis thaliana; identical to SEQ ID NO: 89131
  misc_feature (1)..(1405): Ceres Seq. ID no. 12715596
  misc_feature (1)..(1405): Ortholog of  Ceres SEQ ID NO 15178142 as cited in SEQ ID NO 1163

SEQ ID NO: 92888 - protein, 257 aa, Arabidopsis thaliana; identical to SEQ ID NO: 39512
  peptide (1)..(257): Ceres Seq. ID no. 12715597

SEQ ID NO: 92889 - protein, 254 aa, Arabidopsis thaliana; identical to SEQ ID NO: 39513
  peptide (1)..(254): Ceres Seq. ID no. 12715598

SEQ ID NO: 92890 - protein, 229 aa, Arabidopsis thaliana; identical to SEQ ID NO: 39514
  peptide (1)..(229): Ceres Seq. ID no. 12715599

SEQ ID NO: 92891 - DNA, 411 bp, Arabidopsis thaliana; identical to SEQ ID NO: 89135
  misc_feature (1)..(411): Ceres Seq. ID no. 12715604
  misc_feature (1)..(411): Ortholog of  Ceres SEQ ID NO 13581889 as cited in SEQ ID NO 50900

SEQ ID NO: 92892 - protein, 136 aa, Arabidopsis thaliana; identical to SEQ ID NO: 89136
  peptide (1)..(136): Ceres Seq. ID no. 12715605

SEQ ID NO: 92893 - DNA, 1199 bp, Arabidopsis thaliana; identical to SEQ ID NO: 89137
  misc_feature (1)..(1199): Ceres Seq. ID no. 12715636
  misc_feature (1)..(1199): Ortholog of  Ceres SEQ ID NO 13593955 as cited in SEQ ID NO 54278
  misc_feature (1)..(1199): Ortholog of  Ceres SEQ ID NO 13597380 as cited in SEQ ID NO 64054
  misc_feature (1)..(1199): Ortholog of  Ceres SEQ ID NO 12625474 as cited in SEQ ID NO 64169

SEQ ID NO: 92894 - protein, 343 aa, Arabidopsis thaliana; identical to SEQ ID NO: 89138
  peptide (1)..(343): Ceres Seq. ID no. 12715637

SEQ ID NO: 92895 - protein, 338 aa, Arabidopsis thaliana; identical to SEQ ID NO: 89139
  peptide (1)..(338): Ceres Seq. ID no. 12715638

SEQ ID NO: 92896 - protein, 307 aa, Arabidopsis thaliana; identical to SEQ ID NO: 89140
  peptide (1)..(307): Ceres Seq. ID no. 12715639

SEQ ID NO: 92897 - DNA, 2604 bp, Arabidopsis thaliana; identical to SEQ ID NO: 89141
  misc_feature (1)..(2604): Ceres Seq. ID no. 12715643
  misc_feature (1)..(2604): Ortholog of  Ceres SEQ ID NO 13597380 as cited in SEQ ID NO 64054
  misc_feature (1)..(2604): Ortholog of  Ceres SEQ ID NO 12625474 as cited in SEQ ID NO 64169
  misc_feature (1)..(2604): Ortholog of  Ceres SEQ ID NO 13600220 as cited in SEQ ID NO 0

SEQ ID NO: 92898 - protein, 867 aa, Arabidopsis thaliana; identical to SEQ ID NO: 89142
  peptide (1)..(867): Ceres Seq. ID no. 12715644

SEQ ID NO: 92899 - protein, 675 aa, Arabidopsis thaliana; identical to SEQ ID NO: 89143
  peptide (1)..(675): Ceres Seq. ID no. 12715645

SEQ ID NO: 92900 - protein, 653 aa, Arabidopsis thaliana; identical to SEQ ID NO: 89144
  peptide (1)..(653): Ceres Seq. ID no. 12715646

SEQ ID NO: 92901 - DNA, 561 bp, Arabidopsis thaliana; identical to SEQ ID NO: 89145
  misc_feature (1)..(561): Ceres Seq. ID no. 12715779
  misc_feature (1)..(561): Ortholog of  Ceres SEQ ID NO 13661143 as cited in SEQ ID NO 61139
  misc_feature (1)..(561): Ortholog of  Ceres SEQ ID NO 13597234 as cited in SEQ ID NO 64118

SEQ ID NO: 92902 - protein, 186 aa, Arabidopsis thaliana; identical to SEQ ID NO: 77756
  peptide (1)..(186): Ceres Seq. ID no. 12715780

SEQ ID NO: 92903 - DNA, 1808 bp, Arabidopsis thaliana; identical to SEQ ID NO: 89147
  misc_feature (1)..(1808): Ceres Seq. ID no. 12715867
  misc_feature (1)..(1808): Ortholog of  Ceres SEQ ID NO 13594037 as cited in SEQ ID NO 55666
  misc_feature (1)..(1808): Ortholog of  Ceres SEQ ID NO 13657707 as cited in SEQ ID NO 66407

SEQ ID NO: 92904 - protein, 404 aa, Arabidopsis thaliana; identical to SEQ ID NO: 89052
  peptide (1)..(404): Ceres Seq. ID no. 12715868

SEQ ID NO: 92905 - protein, 380 aa, Arabidopsis thaliana; identical to SEQ ID NO: 89149
  peptide (1)..(380): Ceres Seq. ID no. 12715869

SEQ ID NO: 92906 - protein, 299 aa, Arabidopsis thaliana; identical to SEQ ID NO: 89150
  peptide (1)..(299): Ceres Seq. ID no. 12715870

SEQ ID NO: 92907 - DNA, 2821 bp, Arabidopsis thaliana; identical to SEQ ID NO: 89151
  misc_feature (1)..(2821): Ceres Seq. ID no. 12715871
  misc_feature (1)..(2821): Ortholog of  Ceres SEQ ID NO 13590691 as cited in SEQ ID NO 66290

SEQ ID NO: 92908 - protein, 519 aa, Arabidopsis thaliana; identical to SEQ ID NO: 89152
  peptide (1)..(519): Ceres Seq. ID no. 12715872

SEQ ID NO: 92909 - protein, 480 aa, Arabidopsis thaliana; identical to SEQ ID NO: 89153
  peptide (1)..(480): Ceres Seq. ID no. 12715873

SEQ ID NO: 92910 - protein, 332 aa, Arabidopsis thaliana; identical to SEQ ID NO: 89154
  peptide (1)..(332): Ceres Seq. ID no. 12715874

SEQ ID NO: 92911 - DNA, 1586 bp, Arabidopsis thaliana; identical to SEQ ID NO: 89155
  misc_feature (1)..(1586): Ceres Seq. ID no. 12715879
  misc_feature (1)..(1586): Ortholog of  Ceres SEQ ID NO 15171805 as cited in SEQ ID NO 57433
  misc_feature (1)..(1586): Ortholog of  Ceres SEQ ID NO 13596743 as cited in SEQ ID NO 62731

SEQ ID NO: 92912 - protein, 477 aa, Arabidopsis thaliana; identical to SEQ ID NO: 89156
  peptide (1)..(477): Ceres Seq. ID no. 12715880

SEQ ID NO: 92913 - protein, 461 aa, Arabidopsis thaliana [sequence omitted]

SEQ ID NO: 92914 - protein, 451 aa, Arabidopsis thaliana; identical to SEQ ID NO: 76835
  peptide (1)..(451): Ceres Seq. ID no. 12715882

SEQ ID NO: 92915 - DNA, 737 bp, Arabidopsis thaliana; identical to SEQ ID NO: 89159
  misc_feature (1)..(737): Ceres Seq. ID no. 12715887
  misc_feature (1)..(737): Ortholog of  Ceres SEQ ID NO 13622393 as cited in SEQ ID NO 1256

SEQ ID NO: 92916 - protein, 194 aa, Arabidopsis thaliana; identical to SEQ ID NO: 89160
  peptide (1)..(194): Ceres Seq. ID no. 12715888

SEQ ID NO: 92917 - protein, 172 aa, Arabidopsis thaliana; identical to SEQ ID NO: 89161
  peptide (1)..(172): Ceres Seq. ID no. 12715889

SEQ ID NO: 92918 - protein, 110 aa, Arabidopsis thaliana; identical to SEQ ID NO: 89162
  peptide (1)..(110): Ceres Seq. ID no. 12715890

SEQ ID NO: 92919 - DNA, 1501 bp, Arabidopsis thaliana; identical to SEQ ID NO: 89163
  misc_feature (1)..(1501): Ceres Seq. ID no. 12715895
  misc_feature (1)..(1501): Ortholog of  Ceres SEQ ID NO 15171805 as cited in SEQ ID NO 57433
  misc_feature (1)..(1501): Ortholog of  Ceres SEQ ID NO 13596743 as cited in SEQ ID NO 62731

SEQ ID NO: 92920 - protein, 454 aa, Arabidopsis thaliana; identical to SEQ ID NO: 89164
  peptide (1)..(454): Ceres Seq. ID no. 12715896

SEQ ID NO: 92921 - protein, 438 aa, Arabidopsis thaliana; identical to SEQ ID NO: 89165
  peptide (1)..(438): Ceres Seq. ID no. 12715897

SEQ ID NO: 92922 - protein, 428 aa, Arabidopsis thaliana; identical to SEQ ID NO: 89166
  peptide (1)..(428): Ceres Seq. ID no. 12715898

SEQ ID NO: 92923 - DNA, 1645 bp, Arabidopsis thaliana; identical to SEQ ID NO: 89167
  misc_feature (1)..(1645): Ceres Seq. ID no. 12715909
  misc_feature (1)..(1645): Ortholog of  Ceres SEQ ID NO 15174599 as cited in SEQ ID NO 53646
  misc_feature (1)..(1645): Ortholog of  Ceres SEQ ID NO 15174646 as cited in SEQ ID NO 54499

SEQ ID NO: 92924 - protein, 510 aa, Arabidopsis thaliana; identical to SEQ ID NO: 89168
  peptide (1)..(510): Ceres Seq. ID no. 12715910

SEQ ID NO: 92925 - protein, 380 aa, Arabidopsis thaliana; identical to SEQ ID NO: 27534
  peptide (1)..(380): Ceres Seq. ID no. 12715911

SEQ ID NO: 92926 - protein, 316 aa, Arabidopsis thaliana; identical to SEQ ID NO: 89170
  peptide (1)..(316): Ceres Seq. ID no. 12715912

SEQ ID NO: 92927 - DNA, 1055 bp, Arabidopsis thaliana; identical to SEQ ID NO: 89171
  misc_feature (1)..(1055): Ceres Seq. ID no. 12715924
  misc_feature (1)..(1055): Ortholog of  Ceres SEQ ID NO 14304689 as cited in SEQ ID NO 53265
  misc_feature (1)..(1055): Ortholog of  Ceres SEQ ID NO 14307820 as cited in SEQ ID NO 53938
  misc_feature (1)..(1055): Ortholog of  Ceres SEQ ID NO 15177137 as cited in SEQ ID NO 55030
  misc_feature (1)..(1055): Ortholog of  Ceres SEQ ID NO 14302407 as cited in SEQ ID NO 66891
  misc_feature (1)..(1055): Ortholog of  Ceres SEQ ID NO 13599557 as cited in SEQ ID NO 0

SEQ ID NO: 92928 - protein, 255 aa, Arabidopsis thaliana; identical to SEQ ID NO: 28120
  peptide (1)..(255): Ceres Seq. ID no. 12715925

SEQ ID NO: 92929 - protein, 185 aa, Arabidopsis thaliana; identical to SEQ ID NO: 28121
  peptide (1)..(185): Ceres Seq. ID no. 12715926

SEQ ID NO: 92930 - protein, 174 aa, Arabidopsis thaliana; identical to SEQ ID NO: 28122
  peptide (1)..(174): Ceres Seq. ID no. 12715927

SEQ ID NO: 92931 - DNA, 1075 bp, Arabidopsis thaliana; identical to SEQ ID NO: 89175
  misc_feature (1)..(1075): Ceres Seq. ID no. 12715936
  misc_feature (1)..(1075): Ortholog of  Ceres SEQ ID NO 15169972 as cited in SEQ ID NO 51692

SEQ ID NO: 92932 - protein, 290 aa, Arabidopsis thaliana; identical to SEQ ID NO: 80566
  peptide (1)..(290): Ceres Seq. ID no. 12715937

SEQ ID NO: 92933 - protein, 231 aa, Arabidopsis thaliana; identical to SEQ ID NO: 80567
  peptide (1)..(231): Ceres Seq. ID no. 12715938

SEQ ID NO: 92934 - DNA, 708 bp, Arabidopsis thaliana; identical to SEQ ID NO: 89178
  misc_feature (1)..(708): Ceres Seq. ID no. 12715939
  misc_feature (1)..(708): Ortholog of  Ceres SEQ ID NO 14307883 as cited in SEQ ID NO 67277

SEQ ID NO: 92935 - protein, 89 aa, Arabidopsis thaliana; identical to SEQ ID NO: 89179
  peptide (1)..(89): Ceres Seq. ID no. 12715940

SEQ ID NO: 92936 - protein, 60 aa, Arabidopsis thaliana; identical to SEQ ID NO: 89180
  peptide (1)..(60): Ceres Seq. ID no. 12715941

SEQ ID NO: 92937 - protein, 57 aa, Arabidopsis thaliana; identical to SEQ ID NO: 89181
  peptide (1)..(57): Ceres Seq. ID no. 12715942

SEQ ID NO: 92938 - DNA, 1204 bp, Arabidopsis thaliana; identical to SEQ ID NO: 89182
  misc_feature (1)..(1204): Ceres Seq. ID no. 12715964
  misc_feature (1)..(1204): Ortholog of  Ceres SEQ ID NO 12617887 as cited in SEQ ID NO 65526

SEQ ID NO: 92939 - protein, 378 aa, Arabidopsis thaliana; identical to SEQ ID NO: 89183
  peptide (1)..(378): Ceres Seq. ID no. 12715965

SEQ ID NO: 92940 - protein, 295 aa, Arabidopsis thaliana; identical to SEQ ID NO: 89097
  peptide (1)..(295): Ceres Seq. ID no. 12715966

SEQ ID NO: 92941 - protein, 267 aa, Arabidopsis thaliana; identical to SEQ ID NO: 89098
  peptide (1)..(267): Ceres Seq. ID no. 12715967

SEQ ID NO: 92942 - DNA, 603 bp, Arabidopsis thaliana; identical to SEQ ID NO: 89186
  misc_feature (1)..(603): Ceres Seq. ID no. 12715999
  misc_feature (1)..(603): Ortholog of  Ceres SEQ ID NO 13599102 as cited in SEQ ID NO 1347
  misc_feature (1)..(603): Ortholog of  Ceres SEQ ID NO 15176238 as cited in SEQ ID NO 55058
  misc_feature (1)..(603): Ortholog of  Ceres SEQ ID NO 13598630 as cited in SEQ ID NO 65440

SEQ ID NO: 92943 - protein, 200 aa, Arabidopsis thaliana; identical to SEQ ID NO: 89187
  peptide (1)..(200): Ceres Seq. ID no. 12716000

SEQ ID NO: 92944 - protein, 113 aa, Arabidopsis thaliana; identical to SEQ ID NO: 89188
  peptide (1)..(113): Ceres Seq. ID no. 12716001

SEQ ID NO: 92945 - DNA, 2784 bp, Arabidopsis thaliana; identical to SEQ ID NO: 89189
  misc_feature (1)..(2784): Ceres Seq. ID no. 12716041
  misc_feature (1)..(2784): Ortholog of  Ceres SEQ ID NO 12586556 as cited in SEQ ID NO 64667
  misc_feature (1)..(2784): Ortholog of  Ceres SEQ ID NO 13660894 as cited in SEQ ID NO 67475

SEQ ID NO: 92946 - protein, 927 aa, Arabidopsis thaliana; identical to SEQ ID NO: 89190
  peptide (1)..(927): Ceres Seq. ID no. 12716042

SEQ ID NO: 92947 - protein, 848 aa, Arabidopsis thaliana; identical to SEQ ID NO: 89191
  peptide (1)..(848): Ceres Seq. ID no. 12716043

SEQ ID NO: 92948 - protein, 838 aa, Arabidopsis thaliana; identical to SEQ ID NO: 89192
  peptide (1)..(838): Ceres Seq. ID no. 12716044

SEQ ID NO: 92949 - DNA, 1089 bp, Arabidopsis thaliana; identical to SEQ ID NO: 89193
  misc_feature (1)..(1089): Ceres Seq. ID no. 12716049
  misc_feature (1)..(1089): Ortholog of  Ceres SEQ ID NO 14304148 as cited in SEQ ID NO 57313
  misc_feature (1)..(1089): Ortholog of  Ceres SEQ ID NO 13598513 as cited in SEQ ID NO 64102
  misc_feature (1)..(1089): Ortholog of  Ceres SEQ ID NO 14302224 as cited in SEQ ID NO 64268

SEQ ID NO: 92950 - protein, 362 aa, Arabidopsis thaliana; identical to SEQ ID NO: 89194
  peptide (1)..(362): Ceres Seq. ID no. 12716050

SEQ ID NO: 92951 - protein, 290 aa, Arabidopsis thaliana; identical to SEQ ID NO: 89195
  peptide (1)..(290): Ceres Seq. ID no. 12716051

SEQ ID NO: 92952 - protein, 259 aa, Arabidopsis thaliana; identical to SEQ ID NO: 89196
  peptide (1)..(259): Ceres Seq. ID no. 12716052

SEQ ID NO: 92953 - DNA, 1353 bp, Arabidopsis thaliana; identical to SEQ ID NO: 89197
  misc_feature (1)..(1353): Ceres Seq. ID no. 12716053
  misc_feature (1)..(1353): Ortholog of  Ceres SEQ ID NO 14306569 as cited in SEQ ID NO 53008

SEQ ID NO: 92954 - protein, 450 aa, Arabidopsis thaliana; identical to SEQ ID NO: 89198
  peptide (1)..(450): Ceres Seq. ID no. 12716054

SEQ ID NO: 92955 - protein, 409 aa, Arabidopsis thaliana; identical to SEQ ID NO: 89199
  peptide (1)..(409): Ceres Seq. ID no. 12716055

SEQ ID NO: 92956 - DNA, 1708 bp, Arabidopsis thaliana; identical to SEQ ID NO: 89200
  misc_feature (1)..(1708): Ceres Seq. ID no. 12716089
  misc_feature (1)..(1708): Ortholog of  Ceres SEQ ID NO 13590904 as cited in SEQ ID NO 66072

SEQ ID NO: 92957 - protein, 392 aa, Arabidopsis thaliana; identical to SEQ ID NO: 22646
  peptide (1)..(392): Ceres Seq. ID no. 12716090

SEQ ID NO: 92958 - protein, 303 aa, Arabidopsis thaliana; identical to SEQ ID NO: 22647
  peptide (1)..(303): Ceres Seq. ID no. 12716091

SEQ ID NO: 92959 - protein, 293 aa, Arabidopsis thaliana; identical to SEQ ID NO: 22648
  peptide (1)..(293): Ceres Seq. ID no. 12716092

SEQ ID NO: 92960 - DNA, 1139 bp, Arabidopsis thaliana; identical to SEQ ID NO: 89204
  misc_feature (1)..(1139): Ceres Seq. ID no. 12716093
  misc_feature (1)..(1139): Ortholog of  Ceres SEQ ID NO 14308225 as cited in SEQ ID NO 59062
  misc_feature (1)..(1139): Ortholog of  Ceres SEQ ID NO 15176615 as cited in SEQ ID NO 0

SEQ ID NO: 92961 - protein, 227 aa, Arabidopsis thaliana; identical to SEQ ID NO: 89205
  peptide (1)..(227): Ceres Seq. ID no. 12716094

SEQ ID NO: 92962 - protein, 225 aa, Arabidopsis thaliana; identical to SEQ ID NO: 89206
  peptide (1)..(225): Ceres Seq. ID no. 12716095

SEQ ID NO: 92963 - protein, 148 aa, Arabidopsis thaliana; identical to SEQ ID NO: 89207
  peptide (1)..(148): Ceres Seq. ID no. 12716096

SEQ ID NO: 92964 - DNA, 1042 bp, Arabidopsis thaliana; identical to SEQ ID NO: 89208
  misc_feature (1)..(1042): Ceres Seq. ID no. 12716097
  misc_feature (1)..(1042): Ortholog of  Ceres SEQ ID NO 13594474 as cited in SEQ ID NO 51277
  misc_feature (1)..(1042): Ortholog of  Ceres SEQ ID NO 12635560 as cited in SEQ ID NO 0

SEQ ID NO: 92965 - protein, 233 aa, Arabidopsis thaliana; identical to SEQ ID NO: 25662
  peptide (1)..(233): Ceres Seq. ID no. 12716098

SEQ ID NO: 92966 - protein, 223 aa, Arabidopsis thaliana; identical to SEQ ID NO: 25663
  peptide (1)..(223): Ceres Seq. ID no. 12716099

SEQ ID NO: 92967 - protein, 198 aa, Arabidopsis thaliana; identical to SEQ ID NO: 25664
  peptide (1)..(198): Ceres Seq. ID no. 12716100

SEQ ID NO: 92968 - DNA, 1177 bp, Arabidopsis thaliana; identical to SEQ ID NO: 89212
  misc_feature (1)..(1177): Ceres Seq. ID no. 12716125
  misc_feature (1)..(1177): Ortholog of  Ceres SEQ ID NO 15171366 as cited in SEQ ID NO 51578
  misc_feature (1)..(1177): Ortholog of  Ceres SEQ ID NO 14306949 as cited in SEQ ID NO 54919
  misc_feature (1)..(1177): Ortholog of  Ceres SEQ ID NO 14308536 as cited in SEQ ID NO 55469
  misc_feature (1)..(1177): Ortholog of  Ceres SEQ ID NO 15175723 as cited in SEQ ID NO 57875
  misc_feature (1)..(1177): Ortholog of  Ceres SEQ ID NO 14314909 as cited in SEQ ID NO 58002
  misc_feature (1)..(1177): Ortholog of  Ceres SEQ ID NO 15179772 as cited in SEQ ID NO 64248

SEQ ID NO: 92969 - protein, 352 aa, Arabidopsis thaliana; identical to SEQ ID NO: 89213
  peptide (1)..(352): Ceres Seq. ID no. 12716126

SEQ ID NO: 92970 - protein, 325 aa, Arabidopsis thaliana; identical to SEQ ID NO: 28793
  peptide (1)..(325): Ceres Seq. ID no. 12716127

SEQ ID NO: 92971 - protein, 320 aa, Arabidopsis thaliana; identical to SEQ ID NO: 28794
  peptide (1)..(320): Ceres Seq. ID no. 12716128

SEQ ID NO: 92972 - DNA, 1572 bp, Arabidopsis thaliana; identical to SEQ ID NO: 89216
  misc_feature (1)..(1572): Ceres Seq. ID no. 12716133
  misc_feature (1)..(1572): Ortholog of  Ceres SEQ ID NO 13648124 as cited in SEQ ID NO 20362

SEQ ID NO: 92973 - protein, 523 aa, Arabidopsis thaliana; identical to SEQ ID NO: 89217
  peptide (1)..(523): Ceres Seq. ID no. 12716134

SEQ ID NO: 92974 - protein, 431 aa, Arabidopsis thaliana; identical to SEQ ID NO: 89218
  peptide (1)..(431): Ceres Seq. ID no. 12716135

SEQ ID NO: 92975 - protein, 362 aa, Arabidopsis thaliana; identical to SEQ ID NO: 89219
  peptide (1)..(362): Ceres Seq. ID no. 12716136

SEQ ID NO: 92976 - DNA, 1836 bp, Arabidopsis thaliana; identical to SEQ ID NO: 89220
  misc_feature (1)..(1836): Ceres Seq. ID no. 12716177
  misc_feature (1)..(1836): Ortholog of  Ceres SEQ ID NO 12625388 as cited in SEQ ID NO 63299
  misc_feature (1)..(1836): Ortholog of  Ceres SEQ ID NO 15179860 as cited in SEQ ID NO 66716

SEQ ID NO: 92977 - protein, 453 aa, Arabidopsis thaliana; identical to SEQ ID NO: 39108
  peptide (1)..(453): Ceres Seq. ID no. 12716178

SEQ ID NO: 92978 - protein, 449 aa, Arabidopsis thaliana; identical to SEQ ID NO: 39109
  peptide (1)..(449): Ceres Seq. ID no. 12716179

SEQ ID NO: 92979 - protein, 410 aa, Arabidopsis thaliana; identical to SEQ ID NO: 39110
  peptide (1)..(410): Ceres Seq. ID no. 12716180

SEQ ID NO: 92980 - DNA, 2373 bp, Arabidopsis thaliana; identical to SEQ ID NO: 89224
  misc_feature (1)..(2373): Ceres Seq. ID no. 12716265
  misc_feature (1)..(2373): Ortholog of  Ceres SEQ ID NO 13600310 as cited in SEQ ID NO 5086

SEQ ID NO: 92981 - protein, 790 aa, Arabidopsis thaliana; identical to SEQ ID NO: 89225
  peptide (1)..(790): Ceres Seq. ID no. 12716266

SEQ ID NO: 92982 - protein, 699 aa, Arabidopsis thaliana; identical to SEQ ID NO: 89226
  peptide (1)..(699): Ceres Seq. ID no. 12716267

SEQ ID NO: 92983 - protein, 639 aa, Arabidopsis thaliana; identical to SEQ ID NO: 89227
  peptide (1)..(639): Ceres Seq. ID no. 12716268

SEQ ID NO: 92984 - DNA, 1320 bp, Arabidopsis thaliana; identical to SEQ ID NO: 89228
  misc_feature (1)..(1320): Ceres Seq. ID no. 12716284
  misc_feature (1)..(1320): Ortholog of  Ceres SEQ ID NO 12612314 as cited in SEQ ID NO 51420

SEQ ID NO: 92985 - protein, 439 aa, Arabidopsis thaliana; identical to SEQ ID NO: 89229
  peptide (1)..(439): Ceres Seq. ID no. 12716285

SEQ ID NO: 92986 - protein, 367 aa, Arabidopsis thaliana; identical to SEQ ID NO: 89230
  peptide (1)..(367): Ceres Seq. ID no. 12716286

SEQ ID NO: 92987 - protein, 333 aa, Arabidopsis thaliana; identical to SEQ ID NO: 89231
  peptide (1)..(333): Ceres Seq. ID no. 12716287

SEQ ID NO: 92988 - DNA, 897 bp, Arabidopsis thaliana; identical to SEQ ID NO: 89232
  misc_feature (1)..(897): Ceres Seq. ID no. 12716632
  misc_feature (1)..(897): Ortholog of  Ceres SEQ ID NO 13595651 as cited in SEQ ID NO 56804

SEQ ID NO: 92989 - protein, 298 aa, Arabidopsis thaliana; identical to SEQ ID NO: 45097
  peptide (1)..(298): Ceres Seq. ID no. 12716633

SEQ ID NO: 92990 - protein, 224 aa, Arabidopsis thaliana; identical to SEQ ID NO: 89234
  peptide (1)..(224): Ceres Seq. ID no. 12716634

SEQ ID NO: 92991 - protein, 183 aa, Arabidopsis thaliana; identical to SEQ ID NO: 89235
  peptide (1)..(183): Ceres Seq. ID no. 12716635

SEQ ID NO: 92992 - DNA, 2982 bp, Arabidopsis thaliana; identical to SEQ ID NO: 89236
  misc_feature (1)..(2982): Ceres Seq. ID no. 12716642
  misc_feature (1)..(2982): Ortholog of  Ceres SEQ ID NO 13638292 as cited in SEQ ID NO 57738

SEQ ID NO: 92993 - protein, 993 aa, Arabidopsis thaliana; identical to SEQ ID NO: 89237
  peptide (1)..(993): Ceres Seq. ID no. 12716643

SEQ ID NO: 92994 - protein, 978 aa, Arabidopsis thaliana; identical to SEQ ID NO: 89238
  peptide (1)..(978): Ceres Seq. ID no. 12716644

SEQ ID NO: 92995 - protein, 975 aa, Arabidopsis thaliana; identical to SEQ ID NO: 89239
  peptide (1)..(975): Ceres Seq. ID no. 12716645

SEQ ID NO: 92996 - DNA, 1434 bp, Arabidopsis thaliana; identical to SEQ ID NO: 89240
  misc_feature (1)..(1434): Ceres Seq. ID no. 12716650
  misc_feature (1)..(1434): Ortholog of  Ceres SEQ ID NO 12612314 as cited in SEQ ID NO 51420

SEQ ID NO: 92997 - protein, 477 aa, Arabidopsis thaliana; identical to SEQ ID NO: 89241
  peptide (1)..(477): Ceres Seq. ID no. 12716651

SEQ ID NO: 92998 - protein, 476 aa, Arabidopsis thaliana; identical to SEQ ID NO: 89242
  peptide (1)..(476): Ceres Seq. ID no. 12716652

SEQ ID NO: 92999 - protein, 475 aa, Arabidopsis thaliana; identical to SEQ ID NO: 73765
  peptide (1)..(475): Ceres Seq. ID no. 12716653

SEQ ID NO: 93000 - DNA, 921 bp, Arabidopsis thaliana; identical to SEQ ID NO: 89244
  misc_feature (1)..(921): Ceres Seq. ID no. 12716713
  misc_feature (1)..(921): Ortholog of  Ceres SEQ ID NO 15175368 as cited in SEQ ID NO 60071
  misc_feature (1)..(921): Ortholog of  Ceres SEQ ID NO 13528157 as cited in SEQ ID NO 60102
  misc_feature (1)..(921): Ortholog of  Ceres SEQ ID NO 15225423 as cited in SEQ ID NO 64689
  misc_feature (1)..(921): Ortholog of  Ceres SEQ ID NO 15179340 as cited in SEQ ID NO 0

SEQ ID NO: 93001 - protein, 306 aa, Arabidopsis thaliana; identical to SEQ ID NO: 49016
  peptide (1)..(306): Ceres Seq. ID no. 12716714

SEQ ID NO: 93002 - protein, 304 aa, Arabidopsis thaliana; identical to SEQ ID NO: 49017
  peptide (1)..(304): Ceres Seq. ID no. 12716715

SEQ ID NO: 93003 - protein, 238 aa, Arabidopsis thaliana; identical to SEQ ID NO: 89247
  peptide (1)..(238): Ceres Seq. ID no. 12716716

SEQ ID NO: 93004 - DNA, 924 bp, Arabidopsis thaliana; identical to SEQ ID NO: 89248
  misc_feature (1)..(924): Ceres Seq. ID no. 12716736
  misc_feature (1)..(924): Ortholog of  Ceres SEQ ID NO 13595983 as cited in SEQ ID NO 68329

SEQ ID NO: 93005 - protein, 307 aa, Arabidopsis thaliana; identical to SEQ ID NO: 89249
  peptide (1)..(307): Ceres Seq. ID no. 12716737

SEQ ID NO: 93006 - protein, 234 aa, Arabidopsis thaliana; identical to SEQ ID NO: 89250
  peptide (1)..(234): Ceres Seq. ID no. 12716738

SEQ ID NO: 93007 - protein, 228 aa, Arabidopsis thaliana; identical to SEQ ID NO: 89251
  peptide (1)..(228): Ceres Seq. ID no. 12716739

SEQ ID NO: 93008 - DNA, 936 bp, Arabidopsis thaliana; identical to SEQ ID NO: 89252
  misc_feature (1)..(936): Ceres Seq. ID no. 12716751
  misc_feature (1)..(936): Ortholog of  Ceres SEQ ID NO 13661768 as cited in SEQ ID NO 61427

SEQ ID NO: 93009 - protein, 311 aa, Arabidopsis thaliana; identical to SEQ ID NO: 89253
  peptide (1)..(311): Ceres Seq. ID no. 12716752

SEQ ID NO: 93010 - protein, 294 aa, Arabidopsis thaliana; identical to SEQ ID NO: 89254
  peptide (1)..(294): Ceres Seq. ID no. 12716753

SEQ ID NO: 93011 - protein, 293 aa, Arabidopsis thaliana; identical to SEQ ID NO: 89255
  peptide (1)..(293): Ceres Seq. ID no. 12716754

SEQ ID NO: 93012 - DNA, 504 bp, Arabidopsis thaliana; identical to SEQ ID NO: 89256
  misc_feature (1)..(504): Ceres Seq. ID no. 12716784
  misc_feature (1)..(504): Ortholog of  Ceres SEQ ID NO 13596163 as cited in SEQ ID NO 60864
  misc_feature (1)..(504): Ortholog of  Ceres SEQ ID NO 15226347 as cited in SEQ ID NO 61639

SEQ ID NO: 93013 - protein, 167 aa, Arabidopsis thaliana; identical to SEQ ID NO: 89257
  peptide (1)..(167): Ceres Seq. ID no. 12716785

SEQ ID NO: 93014 - protein, 113 aa, Arabidopsis thaliana; identical to SEQ ID NO: 89258
  peptide (1)..(113): Ceres Seq. ID no. 12716786

SEQ ID NO: 93015 - protein, 98 aa, Arabidopsis thaliana; identical to SEQ ID NO: 89259
  peptide (1)..(98): Ceres Seq. ID no. 12716787

SEQ ID NO: 93016 - DNA, 783 bp, Arabidopsis thaliana; identical to SEQ ID NO: 89260
  misc_feature (1)..(783): Ceres Seq. ID no. 12716831
  misc_feature (1)..(783): Ortholog of  Ceres SEQ ID NO 13594163 as cited in SEQ ID NO 60426

SEQ ID NO: 93017 - protein, 260 aa, Arabidopsis thaliana; identical to SEQ ID NO: 89261
  peptide (1)..(260): Ceres Seq. ID no. 12716832

SEQ ID NO: 93018 - protein, 166 aa, Arabidopsis thaliana; identical to SEQ ID NO: 89262
  peptide (1)..(166): Ceres Seq. ID no. 12716833

SEQ ID NO: 93019 - protein, 148 aa, Arabidopsis thaliana; identical to SEQ ID NO: 89263
  peptide (1)..(148): Ceres Seq. ID no. 12716834

SEQ ID NO: 93020 - DNA, 1794 bp, Arabidopsis thaliana; identical to SEQ ID NO: 89264
  misc_feature (1)..(1794): Ceres Seq. ID no. 12716936
  misc_feature (1)..(1794): Ortholog of  Ceres SEQ ID NO 13593889 as cited in SEQ ID NO 53305
  misc_feature (1)..(1794): Ortholog of  Ceres SEQ ID NO 13581959 as cited in SEQ ID NO 56156
  misc_feature (1)..(1794): Ortholog of  Ceres SEQ ID NO 15171809 as cited in SEQ ID NO 57329

SEQ ID NO: 93021 - protein, 412 aa, Arabidopsis thaliana; identical to SEQ ID NO: 43168
  peptide (1)..(412): Ceres Seq. ID no. 12716937

SEQ ID NO: 93022 - protein, 374 aa, Arabidopsis thaliana; identical to SEQ ID NO: 43169
  peptide (1)..(374): Ceres Seq. ID no. 12716938

SEQ ID NO: 93023 - protein, 369 aa, Arabidopsis thaliana; identical to SEQ ID NO: 43170
  peptide (1)..(369): Ceres Seq. ID no. 12716939

SEQ ID NO: 93024 - DNA, 2179 bp, Arabidopsis thaliana; identical to SEQ ID NO: 89268
  misc_feature (1)..(2179): Ceres Seq. ID no. 12716983
  misc_feature (1)..(2179): Ortholog of  Ceres SEQ ID NO 15225419 as cited in SEQ ID NO 0

SEQ ID NO: 93025 - protein, 611 aa, Arabidopsis thaliana; identical to SEQ ID NO: 45166
  peptide (1)..(611): Ceres Seq. ID no. 12716984

SEQ ID NO: 93026 - protein, 578 aa, Arabidopsis thaliana; identical to SEQ ID NO: 45167
  peptide (1)..(578): Ceres Seq. ID no. 12716985

SEQ ID NO: 93027 - protein, 537 aa, Arabidopsis thaliana; identical to SEQ ID NO: 45168
  peptide (1)..(537): Ceres Seq. ID no. 12716986

SEQ ID NO: 93028 - DNA, 948 bp, Arabidopsis thaliana; identical to SEQ ID NO: 89272
  misc_feature (1)..(948): Ceres Seq. ID no. 12717108
  misc_feature (1)..(948): Ortholog of  Ceres SEQ ID NO 14311857 as cited in SEQ ID NO 51473
  misc_feature (1)..(948): Ortholog of  Ceres SEQ ID NO 14303094 as cited in SEQ ID NO 66388

SEQ ID NO: 93029 - protein, 315 aa, Arabidopsis thaliana; identical to SEQ ID NO: 89273
  peptide (1)..(315): Ceres Seq. ID no. 12717109

SEQ ID NO: 93030 - protein, 303 aa, Arabidopsis thaliana; identical to SEQ ID NO: 89274
  peptide (1)..(303): Ceres Seq. ID no. 12717110

SEQ ID NO: 93031 - DNA, 1881 bp, Arabidopsis thaliana; identical to SEQ ID NO: 89275
  misc_feature (1)..(1881): Ceres Seq. ID no. 12717111
  misc_feature (1)..(1881): Ortholog of  Ceres SEQ ID NO 14303348 as cited in SEQ ID NO 59561

SEQ ID NO: 93032 - protein, 626 aa, Arabidopsis thaliana; identical to SEQ ID NO: 89276
  peptide (1)..(626): Ceres Seq. ID no. 12717112

SEQ ID NO: 93033 - protein, 565 aa, Arabidopsis thaliana; identical to SEQ ID NO: 89277
  peptide (1)..(565): Ceres Seq. ID no. 12717113

SEQ ID NO: 93034 - protein, 387 aa, Arabidopsis thaliana; identical to SEQ ID NO: 89278
  peptide (1)..(387): Ceres Seq. ID no. 12717114

SEQ ID NO: 93035 - DNA, 1656 bp, Arabidopsis thaliana; identical to SEQ ID NO: 89279
  misc_feature (1)..(1656): Ceres Seq. ID no. 12717172
  misc_feature (1)..(1656): Ortholog of  Ceres SEQ ID NO 15170956 as cited in SEQ ID NO 55034

SEQ ID NO: 93036 - protein, 551 aa, Arabidopsis thaliana; identical to SEQ ID NO: 89280
  peptide (1)..(551): Ceres Seq. ID no. 12717173

SEQ ID NO: 93037 - protein, 548 aa, Arabidopsis thaliana; identical to SEQ ID NO: 89281
  peptide (1)..(548): Ceres Seq. ID no. 12717174

SEQ ID NO: 93038 - protein, 544 aa, Arabidopsis thaliana; identical to SEQ ID NO: 89282
  peptide (1)..(544): Ceres Seq. ID no. 12717175

SEQ ID NO: 93039 - DNA, 1209 bp, Arabidopsis thaliana; identical to SEQ ID NO: 89283
  misc_feature (1)..(1209): Ceres Seq. ID no. 12717180
  misc_feature (1)..(1209): Ortholog of  Ceres SEQ ID NO 14307456 as cited in SEQ ID NO 54480

SEQ ID NO: 93040 - protein, 347 aa, Arabidopsis thaliana; identical to SEQ ID NO: 89284
  peptide (1)..(347): Ceres Seq. ID no. 12717181

SEQ ID NO: 93041 - protein, 331 aa, Arabidopsis thaliana; identical to SEQ ID NO: 89285
  peptide (1)..(331): Ceres Seq. ID no. 12717182

SEQ ID NO: 93042 - protein, 238 aa, Arabidopsis thaliana; identical to SEQ ID NO: 89286
  peptide (1)..(238): Ceres Seq. ID no. 12717183

SEQ ID NO: 93043 - DNA, 2748 bp, Arabidopsis thaliana; identical to SEQ ID NO: 89287
  misc_feature (1)..(2748): Ceres Seq. ID no. 12717220
  misc_feature (1)..(2748): Ortholog of  Ceres SEQ ID NO 13654989 as cited in SEQ ID NO 63117
  misc_feature (1)..(2748): Ortholog of  Ceres SEQ ID NO 13584744 as cited in SEQ ID NO 69137

SEQ ID NO: 93044 - protein, 915 aa, Arabidopsis thaliana; identical to SEQ ID NO: 89288
  peptide (1)..(915): Ceres Seq. ID no. 12717221

SEQ ID NO: 93045 - protein, 802 aa, Arabidopsis thaliana; identical to SEQ ID NO: 89289
  peptide (1)..(802): Ceres Seq. ID no. 12717222

SEQ ID NO: 93046 - protein, 733 aa, Arabidopsis thaliana; identical to SEQ ID NO: 89290
  peptide (1)..(733): Ceres Seq. ID no. 12717223

SEQ ID NO: 93047 - DNA, 1494 bp, Arabidopsis thaliana; identical to SEQ ID NO: 89291
  misc_feature (1)..(1494): Ceres Seq. ID no. 12717228
  misc_feature (1)..(1494): Ortholog of  Ceres SEQ ID NO 14311509 as cited in SEQ ID NO 51398
  misc_feature (1)..(1494): Ortholog of  Ceres SEQ ID NO 14307702 as cited in SEQ ID NO 54703
  misc_feature (1)..(1494): Ortholog of  Ceres SEQ ID NO 15176361 as cited in SEQ ID NO 55438

SEQ ID NO: 93048 - protein, 497 aa, Arabidopsis thaliana; identical to SEQ ID NO: 89292
  peptide (1)..(497): Ceres Seq. ID no. 12717229

SEQ ID NO: 93049 - protein, 339 aa, Arabidopsis thaliana; identical to SEQ ID NO: 71328
  peptide (1)..(339): Ceres Seq. ID no. 12717230

SEQ ID NO: 93050 - protein, 308 aa, Arabidopsis thaliana; identical to SEQ ID NO: 71329
  peptide (1)..(308): Ceres Seq. ID no. 12717231

SEQ ID NO: 93051 - DNA, 979 bp, Arabidopsis thaliana; identical to SEQ ID NO: 89295
  misc_feature (1)..(979): Ceres Seq. ID no. 12717396
  misc_feature (1)..(979): Ortholog of  Ceres SEQ ID NO 14311912 as cited in SEQ ID NO 51609
  misc_feature (1)..(979): Ortholog of  Ceres SEQ ID NO 14307377 as cited in SEQ ID NO 54487
  misc_feature (1)..(979): Ortholog of  Ceres SEQ ID NO 14312933 as cited in SEQ ID NO 58936

SEQ ID NO: 93052 - protein, 249 aa, Arabidopsis thaliana; identical to SEQ ID NO: 37218
  peptide (1)..(249): Ceres Seq. ID no. 12717397

SEQ ID NO: 93053 - DNA, 876 bp, Arabidopsis thaliana; identical to SEQ ID NO: 89297
  misc_feature (1)..(876): Ceres Seq. ID no. 12717411
  misc_feature (1)..(876): Ortholog of  Ceres SEQ ID NO 15168500 as cited in SEQ ID NO 57041

SEQ ID NO: 93054 - protein, 291 aa, Arabidopsis thaliana; identical to SEQ ID NO: 89298
  peptide (1)..(291): Ceres Seq. ID no. 12717412

SEQ ID NO: 93055 - protein, 162 aa, Arabidopsis thaliana; identical to SEQ ID NO: 89299
  peptide (1)..(162): Ceres Seq. ID no. 12717413

SEQ ID NO: 93056 - DNA, 1533 bp, Arabidopsis thaliana; identical to SEQ ID NO: 89300
  misc_feature (1)..(1533): Ceres Seq. ID no. 12717542
  misc_feature (1)..(1533): Ortholog of  Ceres SEQ ID NO 13594037 as cited in SEQ ID NO 55666
  misc_feature (1)..(1533): Ortholog of  Ceres SEQ ID NO 13657707 as cited in SEQ ID NO 66407

SEQ ID NO: 93057 - protein, 510 aa, Arabidopsis thaliana; identical to SEQ ID NO: 89301
  peptide (1)..(510): Ceres Seq. ID no. 12717543

SEQ ID NO: 93058 - protein, 458 aa, Arabidopsis thaliana; identical to SEQ ID NO: 89302
  peptide (1)..(458): Ceres Seq. ID no. 12717544

SEQ ID NO: 93059 - protein, 456 aa, Arabidopsis thaliana; identical to SEQ ID NO: 89303
  peptide (1)..(456): Ceres Seq. ID no. 12717545

SEQ ID NO: 93060 - DNA, 3426 bp, Arabidopsis thaliana; identical to SEQ ID NO: 89304
  misc_feature (1)..(3426): Ceres Seq. ID no. 12717577
  misc_feature (1)..(3426): Ortholog of  Ceres SEQ ID NO 15168935 as cited in SEQ ID NO 209

SEQ ID NO: 93061 - protein, 1141 aa, Arabidopsis thaliana; identical to SEQ ID NO: 89305
  peptide (1)..(1141): Ceres Seq. ID no. 12717578

SEQ ID NO: 93062 - protein, 1127 aa, Arabidopsis thaliana; identical to SEQ ID NO: 89306
  peptide (1)..(1127): Ceres Seq. ID no. 12717579

SEQ ID NO: 93063 - protein, 1078 aa, Arabidopsis thaliana; identical to SEQ ID NO: 89307
  peptide (1)..(1078): Ceres Seq. ID no. 12717580

SEQ ID NO: 93064 - DNA, 2607 bp, Arabidopsis thaliana; identical to SEQ ID NO: 89308
  misc_feature (1)..(2607): Ceres Seq. ID no. 12717677
  misc_feature (1)..(2607): Ortholog of  Ceres SEQ ID NO 12466413 as cited in SEQ ID NO 20470
  misc_feature (1)..(2607): Ortholog of  Ceres SEQ ID NO 12586556 as cited in SEQ ID NO 64667
  misc_feature (1)..(2607): Ortholog of  Ceres SEQ ID NO 13660894 as cited in SEQ ID NO 67475

SEQ ID NO: 93065 - protein, 868 aa, Arabidopsis thaliana; identical to SEQ ID NO: 89309
  peptide (1)..(868): Ceres Seq. ID no. 12717678

SEQ ID NO: 93066 - protein, 832 aa, Arabidopsis thaliana; identical to SEQ ID NO: 89310
  peptide (1)..(832): Ceres Seq. ID no. 12717679

SEQ ID NO: 93067 - protein, 762 aa, Arabidopsis thaliana; identical to SEQ ID NO: 89311
  peptide (1)..(762): Ceres Seq. ID no. 12717680

SEQ ID NO: 93068 - DNA, 801 bp, Arabidopsis thaliana; identical to SEQ ID NO: 89312
  misc_feature (1)..(801): Ceres Seq. ID no. 12717834
  misc_feature (1)..(801): Ortholog of  Ceres SEQ ID NO 13654285 as cited in SEQ ID NO 68661

SEQ ID NO: 93069 - protein, 266 aa, Arabidopsis thaliana; identical to SEQ ID NO: 89313
  peptide (1)..(266): Ceres Seq. ID no. 12717835

SEQ ID NO: 93070 - protein, 173 aa, Arabidopsis thaliana; identical to SEQ ID NO: 89314
  peptide (1)..(173): Ceres Seq. ID no. 12717836

SEQ ID NO: 93071 - DNA, 702 bp, Arabidopsis thaliana; identical to SEQ ID NO: 89315
  misc_feature (1)..(702): Ceres Seq. ID no. 12717867
  misc_feature (1)..(702): Ortholog of  Ceres SEQ ID NO 12609146 as cited in SEQ ID NO 52118
  misc_feature (1)..(702): Ortholog of  Ceres SEQ ID NO 14316158 as cited in SEQ ID NO 52413
  misc_feature (1)..(702): Ortholog of  Ceres SEQ ID NO 13638136 as cited in SEQ ID NO 58644
  misc_feature (1)..(702): Ortholog of  Ceres SEQ ID NO 12587035 as cited in SEQ ID NO 63605

SEQ ID NO: 93072 - protein, 233 aa, Arabidopsis thaliana; identical to SEQ ID NO: 89316
  peptide (1)..(233): Ceres Seq. ID no. 12717868

SEQ ID NO: 93073 - protein, 148 aa, Arabidopsis thaliana; identical to SEQ ID NO: 89317
  peptide (1)..(148): Ceres Seq. ID no. 12717869

SEQ ID NO: 93074 - DNA, 411 bp, Arabidopsis thaliana; identical to SEQ ID NO: 89318
  misc_feature (1)..(411): Ceres Seq. ID no. 12717908
  misc_feature (1)..(411): Ortholog of  Ceres SEQ ID NO 13648014 as cited in SEQ ID NO 20332

SEQ ID NO: 93075 - protein, 136 aa, Arabidopsis thaliana; identical to SEQ ID NO: 89319
  peptide (1)..(136): Ceres Seq. ID no. 12717909

SEQ ID NO: 93076 - protein, 122 aa, Arabidopsis thaliana; identical to SEQ ID NO: 89320
  peptide (1)..(122): Ceres Seq. ID no. 12717910

SEQ ID NO: 93077 - protein, 99 aa, Arabidopsis thaliana; identical to SEQ ID NO: 89321
  peptide (1)..(99): Ceres Seq. ID no. 12717911

SEQ ID NO: 93078 - DNA, 1173 bp, Arabidopsis thaliana; identical to SEQ ID NO: 89322
  misc_feature (1)..(1173): Ceres Seq. ID no. 12717958
  misc_feature (1)..(1173): Ortholog of  Ceres SEQ ID NO 14310896 as cited in SEQ ID NO 53480
  misc_feature (1)..(1173): Ortholog of  Ceres SEQ ID NO 13660685 as cited in SEQ ID NO 67678

SEQ ID NO: 93079 - protein, 390 aa, Arabidopsis thaliana; identical to SEQ ID NO: 89323
  peptide (1)..(390): Ceres Seq. ID no. 12717959

SEQ ID NO: 93080 - protein, 355 aa, Arabidopsis thaliana; identical to SEQ ID NO: 89324
  peptide (1)..(355): Ceres Seq. ID no. 12717960

SEQ ID NO: 93081 - protein, 337 aa, Arabidopsis thaliana; identical to SEQ ID NO: 89325
  peptide (1)..(337): Ceres Seq. ID no. 12717961

SEQ ID NO: 93082 - DNA, 924 bp, Arabidopsis thaliana; identical to SEQ ID NO: 89326
  misc_feature (1)..(924): Ceres Seq. ID no. 12717974
  misc_feature (1)..(924): Ortholog of  Ceres SEQ ID NO 13591776 as cited in SEQ ID NO 20695
  misc_feature (1)..(924): Ortholog of  Ceres SEQ ID NO 13595072 as cited in SEQ ID NO 55971

SEQ ID NO: 93083 - protein, 282 aa, Arabidopsis thaliana; identical to SEQ ID NO: 89327
  peptide (1)..(282): Ceres Seq. ID no. 12717975

SEQ ID NO: 93084 - protein, 266 aa, Arabidopsis thaliana; identical to SEQ ID NO: 89328
  peptide (1)..(266): Ceres Seq. ID no. 12717976

SEQ ID NO: 93085 - protein, 229 aa, Arabidopsis thaliana; identical to SEQ ID NO: 89329
  peptide (1)..(229): Ceres Seq. ID no. 12717977

SEQ ID NO: 93086 - DNA, 886 bp, Arabidopsis thaliana; identical to SEQ ID NO: 89330
  misc_feature (1)..(886): Ceres Seq. ID no. 12718005
  misc_feature (1)..(886): Ortholog of  Ceres SEQ ID NO 12610334 as cited in SEQ ID NO 56235
  misc_feature (1)..(886): Ortholog of  Ceres SEQ ID NO 13654825 as cited in SEQ ID NO 62409

SEQ ID NO: 93087 - protein, 214 aa, Arabidopsis thaliana; identical to SEQ ID NO: 29117
  peptide (1)..(214): Ceres Seq. ID no. 12718006

SEQ ID NO: 93088 - protein, 191 aa, Arabidopsis thaliana; identical to SEQ ID NO: 21067
  peptide (1)..(191): Ceres Seq. ID no. 12718007

SEQ ID NO: 93089 - DNA, 1410 bp, Arabidopsis thaliana; identical to SEQ ID NO: 89333
  misc_feature (1)..(1410): Ceres Seq. ID no. 12718139
  misc_feature (1)..(1410): Ortholog of  Ceres SEQ ID NO 13595351 as cited in SEQ ID NO 55934
  misc_feature (1)..(1410): Ortholog of  Ceres SEQ ID NO 13639645 as cited in SEQ ID NO 57488

SEQ ID NO: 93090 - protein, 469 aa, Arabidopsis thaliana; identical to SEQ ID NO: 89334
  peptide (1)..(469): Ceres Seq. ID no. 12718140

SEQ ID NO: 93091 - protein, 455 aa, Arabidopsis thaliana; identical to SEQ ID NO: 89335
  peptide (1)..(455): Ceres Seq. ID no. 12718141

SEQ ID NO: 93092 - protein, 415 aa, Arabidopsis thaliana; identical to SEQ ID NO: 89336
  peptide (1)..(415): Ceres Seq. ID no. 12718142

SEQ ID NO: 93093 - DNA, 1269 bp, Arabidopsis thaliana; identical to SEQ ID NO: 89337
  misc_feature (1)..(1269): Ceres Seq. ID no. 12718151
  misc_feature (1)..(1269): Ortholog of  Ceres SEQ ID NO 13594209 as cited in SEQ ID NO 59089
  misc_feature (1)..(1269): Ortholog of  Ceres SEQ ID NO 13502874 as cited in SEQ ID NO 66298
  misc_feature (1)..(1269): Ortholog of  Ceres SEQ ID NO 12614124 as cited in SEQ ID NO 68392

SEQ ID NO: 93094 - protein, 422 aa, Arabidopsis thaliana; identical to SEQ ID NO: 89338
  peptide (1)..(422): Ceres Seq. ID no. 12718152

SEQ ID NO: 93095 - protein, 395 aa, Arabidopsis thaliana; identical to SEQ ID NO: 89339
  peptide (1)..(395): Ceres Seq. ID no. 12718153

SEQ ID NO: 93096 - protein, 370 aa, Arabidopsis thaliana; identical to SEQ ID NO: 89340
  peptide (1)..(370): Ceres Seq. ID no. 12718154

SEQ ID NO: 93097 - DNA, 1191 bp, Arabidopsis thaliana; identical to SEQ ID NO: 89341
  misc_feature (1)..(1191): Ceres Seq. ID no. 12718160
  misc_feature (1)..(1191): Ortholog of  Ceres SEQ ID NO 13593967 as cited in SEQ ID NO 56966

SEQ ID NO: 93098 - protein, 396 aa, Arabidopsis thaliana; identical to SEQ ID NO: 49913
  peptide (1)..(396): Ceres Seq. ID no. 12718161

SEQ ID NO: 93099 - protein, 281 aa, Arabidopsis thaliana; identical to SEQ ID NO: 49914
  peptide (1)..(281): Ceres Seq. ID no. 12718162

SEQ ID NO: 93100 - protein, 250 aa, Arabidopsis thaliana; identical to SEQ ID NO: 49915
  peptide (1)..(250): Ceres Seq. ID no. 12718163

SEQ ID NO: 93101 - DNA, 1890 bp, Arabidopsis thaliana; identical to SEQ ID NO: 89345
  misc_feature (1)..(1890): Ceres Seq. ID no. 12718164
  misc_feature (1)..(1890): Ortholog of  Ceres SEQ ID NO 13654989 as cited in SEQ ID NO 63117
  misc_feature (1)..(1890): Ortholog of  Ceres SEQ ID NO 13655640 as cited in SEQ ID NO 63844

SEQ ID NO: 93102 - protein, 629 aa, Arabidopsis thaliana; identical to SEQ ID NO: 89346
  peptide (1)..(629): Ceres Seq. ID no. 12718165

SEQ ID NO: 93103 - protein, 489 aa, Arabidopsis thaliana; identical to SEQ ID NO: 89347
  peptide (1)..(489): Ceres Seq. ID no. 12718166

SEQ ID NO: 93104 - protein, 406 aa, Arabidopsis thaliana; identical to SEQ ID NO: 89348
  peptide (1)..(406): Ceres Seq. ID no. 12718167

SEQ ID NO: 93105 - DNA, 1532 bp, Arabidopsis thaliana; identical to SEQ ID NO: 89349
  misc_feature (1)..(1532): Ceres Seq. ID no. 12718175
  misc_feature (1)..(1532): Ortholog of  Ceres SEQ ID NO 14311683 as cited in SEQ ID NO 51263
  misc_feature (1)..(1532): Ortholog of  Ceres SEQ ID NO 15177862 as cited in SEQ ID NO 56033
  misc_feature (1)..(1532): Ortholog of  Ceres SEQ ID NO 13661430 as cited in SEQ ID NO 61258
  misc_feature (1)..(1532): Ortholog of  Ceres SEQ ID NO 13590940 as cited in SEQ ID NO 68653
  misc_feature (1)..(1532): Ortholog of  Ceres SEQ ID NO 14301982 as cited in SEQ ID NO 0

SEQ ID NO: 93106 - protein, 342 aa, Arabidopsis thaliana; identical to SEQ ID NO: 24722
  peptide (1)..(342): Ceres Seq. ID no. 12718176

SEQ ID NO: 93107 - protein, 263 aa, Arabidopsis thaliana; identical to SEQ ID NO: 24723
  peptide (1)..(263): Ceres Seq. ID no. 12718177

SEQ ID NO: 93108 - protein, 216 aa, Arabidopsis thaliana; identical to SEQ ID NO: 24724
  peptide (1)..(216): Ceres Seq. ID no. 12718178

SEQ ID NO: 93109 - DNA, 968 bp, Arabidopsis thaliana; identical to SEQ ID NO: 89353
  misc_feature (1)..(968): Ceres Seq. ID no. 12718223
  misc_feature (1)..(968): Ortholog of  Ceres SEQ ID NO 14313662 as cited in SEQ ID NO 54162
  misc_feature (1)..(968): Ortholog of  Ceres SEQ ID NO 14302123 as cited in SEQ ID NO 0
  misc_feature (1)..(968): Ortholog of  Ceres SEQ ID NO 15179452 as cited in SEQ ID NO 0

SEQ ID NO: 93110 - protein, 249 aa, Arabidopsis thaliana; identical to SEQ ID NO: 28293
  peptide (1)..(249): Ceres Seq. ID no. 12718224

SEQ ID NO: 93111 - protein, 206 aa, Arabidopsis thaliana; identical to SEQ ID NO: 28294
  peptide (1)..(206): Ceres Seq. ID no. 12718225

SEQ ID NO: 93112 - DNA, 1258 bp, Arabidopsis thaliana; identical to SEQ ID NO: 89356
  misc_feature (1)..(1258): Ceres Seq. ID no. 12718251
  misc_feature (1)..(1258): Ortholog of  Ceres SEQ ID NO 15177654 as cited in SEQ ID NO 59933
  misc_feature (1)..(1258): Ortholog of  Ceres SEQ ID NO 14303600 as cited in SEQ ID NO 64632
  misc_feature (1)..(1258): Ortholog of  Ceres SEQ ID NO 14302776 as cited in SEQ ID NO 66919

SEQ ID NO: 93113 - protein, 306 aa, Arabidopsis thaliana; identical to SEQ ID NO: 41422
  peptide (1)..(306): Ceres Seq. ID no. 12718252

SEQ ID NO: 93114 - protein, 212 aa, Arabidopsis thaliana; identical to SEQ ID NO: 41423
  peptide (1)..(212): Ceres Seq. ID no. 12718253

SEQ ID NO: 93115 - protein, 177 aa, Arabidopsis thaliana; identical to SEQ ID NO: 41424
  peptide (1)..(177): Ceres Seq. ID no. 12718254

SEQ ID NO: 93116 - DNA, 1809 bp, Arabidopsis thaliana; identical to SEQ ID NO: 89360
  misc_feature (1)..(1809): Ceres Seq. ID no. 12718263
  misc_feature (1)..(1809): Ortholog of  Ceres SEQ ID NO 14310037 as cited in SEQ ID NO 20603

SEQ ID NO: 93117 - protein, 602 aa, Arabidopsis thaliana; identical to SEQ ID NO: 89361
  peptide (1)..(602): Ceres Seq. ID no. 12718264

SEQ ID NO: 93118 - protein, 576 aa, Arabidopsis thaliana; identical to SEQ ID NO: 89362
  peptide (1)..(576): Ceres Seq. ID no. 12718265

SEQ ID NO: 93119 - protein, 480 aa, Arabidopsis thaliana; identical to SEQ ID NO: 89363
  peptide (1)..(480): Ceres Seq. ID no. 12718266

SEQ ID NO: 93120 - DNA, 1015 bp, Arabidopsis thaliana; identical to SEQ ID NO: 89364
  misc_feature (1)..(1015): Ceres Seq. ID no. 12718277
  misc_feature (1)..(1015): Ortholog of  Ceres SEQ ID NO 15176514 as cited in SEQ ID NO 1114
  misc_feature (1)..(1015): Ortholog of  Ceres SEQ ID NO 15173688 as cited in SEQ ID NO 61918
  misc_feature (1)..(1015): Ortholog of  Ceres SEQ ID NO 13662513 as cited in SEQ ID NO 63303
  misc_feature (1)..(1015): Ortholog of  Ceres SEQ ID NO 12616929 as cited in SEQ ID NO 63962
  misc_feature (1)..(1015): Ortholog of  Ceres SEQ ID NO 15225803 as cited in SEQ ID NO 67623
  misc_feature (1)..(1015): Ortholog of  Ceres SEQ ID NO 15174088 as cited in SEQ ID NO 0

SEQ ID NO: 93121 - protein, 233 aa, Arabidopsis thaliana; identical to SEQ ID NO: 89365
  peptide (1)..(233): Ceres Seq. ID no. 12718278

SEQ ID NO: 93122 - protein, 219 aa, Arabidopsis thaliana; identical to SEQ ID NO: 28131
  peptide (1)..(219): Ceres Seq. ID no. 12718279

SEQ ID NO: 93123 - protein, 198 aa, Arabidopsis thaliana; identical to SEQ ID NO: 28132
  peptide (1)..(198): Ceres Seq. ID no. 12718280

SEQ ID NO: 93124 - DNA, 1666 bp, Arabidopsis thaliana; identical to SEQ ID NO: 89368
  misc_feature (1)..(1666): Ceres Seq. ID no. 12718299
  misc_feature (1)..(1666): Ortholog of  Ceres SEQ ID NO 14307682 as cited in SEQ ID NO 54529

SEQ ID NO: 93125 - protein, 501 aa, Arabidopsis thaliana; identical to SEQ ID NO: 89369
  peptide (1)..(501): Ceres Seq. ID no. 12718300

SEQ ID NO: 93126 - protein, 460 aa, Arabidopsis thaliana; identical to SEQ ID NO: 89370
  peptide (1)..(460): Ceres Seq. ID no. 12718301

SEQ ID NO: 93127 - protein, 432 aa, Arabidopsis thaliana; identical to SEQ ID NO: 89371
  peptide (1)..(432): Ceres Seq. ID no. 12718302

SEQ ID NO: 93128 - DNA, 2099 bp, Arabidopsis thaliana; identical to SEQ ID NO: 89372
  misc_feature (1)..(2099): Ceres Seq. ID no. 12718303
  misc_feature (1)..(2099): Ortholog of  Ceres SEQ ID NO 12609146 as cited in SEQ ID NO 52118
  misc_feature (1)..(2099): Ortholog of  Ceres SEQ ID NO 13638136 as cited in SEQ ID NO 58644
  misc_feature (1)..(2099): Ortholog of  Ceres SEQ ID NO 13596868 as cited in SEQ ID NO 62806
  misc_feature (1)..(2099): Ortholog of  Ceres SEQ ID NO 15225826 as cited in SEQ ID NO 64774
  misc_feature (1)..(2099): Ortholog of  Ceres SEQ ID NO 13595885 as cited in SEQ ID NO 69265
  misc_feature (1)..(2099): Ortholog of  Ceres SEQ ID NO 13599119 as cited in SEQ ID NO 0

SEQ ID NO: 93129 - protein, 380 aa, Arabidopsis thaliana; identical to SEQ ID NO: 89373
  peptide (1)..(380): Ceres Seq. ID no. 12718304

SEQ ID NO: 93130 - protein, 378 aa, Arabidopsis thaliana; identical to SEQ ID NO: 89374
  peptide (1)..(378): Ceres Seq. ID no. 12718305

SEQ ID NO: 93131 - protein, 311 aa, Arabidopsis thaliana; identical to SEQ ID NO: 89375
  peptide (1)..(311): Ceres Seq. ID no. 12718306

SEQ ID NO: 93132 - DNA, 2523 bp, Arabidopsis thaliana; identical to SEQ ID NO: 89376
  misc_feature (1)..(2523): Ceres Seq. ID no. 12718314
  misc_feature (1)..(2523): Ortholog of  Ceres SEQ ID NO 15174626 as cited in SEQ ID NO 59393
  misc_feature (1)..(2523): Ortholog of  Ceres SEQ ID NO 13656177 as cited in SEQ ID NO 64997

SEQ ID NO: 93133 - protein, 733 aa, Arabidopsis thaliana; identical to SEQ ID NO: 89377
  peptide (1)..(733): Ceres Seq. ID no. 12718315

SEQ ID NO: 93134 - protein, 534 aa, Arabidopsis thaliana; identical to SEQ ID NO: 89378
  peptide (1)..(534): Ceres Seq. ID no. 12718316

SEQ ID NO: 93135 - protein, 512 aa, Arabidopsis thaliana; identical to SEQ ID NO: 89379
  peptide (1)..(512): Ceres Seq. ID no. 12718317

SEQ ID NO: 93136 - DNA, 1214 bp, Arabidopsis thaliana; identical to SEQ ID NO: 89380
  misc_feature (1)..(1214): Ceres Seq. ID no. 12718325
  misc_feature (1)..(1214): Ortholog of  Ceres SEQ ID NO 13597234 as cited in SEQ ID NO 64118

SEQ ID NO: 93137 - protein, 279 aa, Arabidopsis thaliana; identical to SEQ ID NO: 89381
  peptide (1)..(279): Ceres Seq. ID no. 12718326

SEQ ID NO: 93138 - protein, 237 aa, Arabidopsis thaliana; identical to SEQ ID NO: 89382
  peptide (1)..(237): Ceres Seq. ID no. 12718327

SEQ ID NO: 93139 - DNA, 1593 bp, Arabidopsis thaliana; identical to SEQ ID NO: 89383
  misc_feature (1)..(1593): Ceres Seq. ID no. 12718332
  misc_feature (1)..(1593): Ortholog of  Ceres SEQ ID NO 15172875 as cited in SEQ ID NO 60423
  misc_feature (1)..(1593): Ortholog of  Ceres SEQ ID NO 13659971 as cited in SEQ ID NO 67565
  misc_feature (1)..(1593): Ortholog of  Ceres SEQ ID NO 13500385 as cited in SEQ ID NO 67583

SEQ ID NO: 93140 - protein, 530 aa, Arabidopsis thaliana; identical to SEQ ID NO: 89384
  peptide (1)..(530): Ceres Seq. ID no. 12718333

SEQ ID NO: 93141 - protein, 425 aa, Arabidopsis thaliana; identical to SEQ ID NO: 89385
  peptide (1)..(425): Ceres Seq. ID no. 12718334

SEQ ID NO: 93142 - protein, 422 aa, Arabidopsis thaliana; identical to SEQ ID NO: 89386
  peptide (1)..(422): Ceres Seq. ID no. 12718335

SEQ ID NO: 93143 - DNA, 1098 bp, Arabidopsis thaliana; identical to SEQ ID NO: 89387
  misc_feature (1)..(1098): Ceres Seq. ID no. 12718356
  misc_feature (1)..(1098): Ortholog of  Ceres SEQ ID NO 13654989 as cited in SEQ ID NO 63117
  misc_feature (1)..(1098): Ortholog of  Ceres SEQ ID NO 13657138 as cited in SEQ ID NO 65923
  misc_feature (1)..(1098): Ortholog of  Ceres SEQ ID NO 13584744 as cited in SEQ ID NO 69137

SEQ ID NO: 93144 - protein, 365 aa, Arabidopsis thaliana; identical to SEQ ID NO: 89388
  peptide (1)..(365): Ceres Seq. ID no. 12718357

SEQ ID NO: 93145 - protein, 297 aa, Arabidopsis thaliana; identical to SEQ ID NO: 89389
  peptide (1)..(297): Ceres Seq. ID no. 12718358

SEQ ID NO: 93146 - DNA, 1143 bp, Arabidopsis thaliana; identical to SEQ ID NO: 89390
  misc_feature (1)..(1143): Ceres Seq. ID no. 12718425
  misc_feature (1)..(1143): Ortholog of  Ceres SEQ ID NO 15180663 as cited in SEQ ID NO 1227
  misc_feature (1)..(1143): Ortholog of  Ceres SEQ ID NO 12415963 as cited in SEQ ID NO 0

SEQ ID NO: 93147 - protein, 380 aa, Arabidopsis thaliana; identical to SEQ ID NO: 89391
  peptide (1)..(380): Ceres Seq. ID no. 12718426

SEQ ID NO: 93148 - protein, 273 aa, Arabidopsis thaliana; identical to SEQ ID NO: 89392
  peptide (1)..(273): Ceres Seq. ID no. 12718427

SEQ ID NO: 93149 - protein, 240 aa, Arabidopsis thaliana; identical to SEQ ID NO: 89393
  peptide (1)..(240): Ceres Seq. ID no. 12718428

SEQ ID NO: 93150 - DNA, 1458 bp, Arabidopsis thaliana; identical to SEQ ID NO: 89394
  misc_feature (1)..(1458): Ceres Seq. ID no. 12718491
  misc_feature (1)..(1458): Ortholog of  Ceres SEQ ID NO 13597546 as cited in SEQ ID NO 65017
  misc_feature (1)..(1458): Ortholog of  Ceres SEQ ID NO 13654353 as cited in SEQ ID NO 68318

SEQ ID NO: 93151 - protein, 485 aa, Arabidopsis thaliana; identical to SEQ ID NO: 89395
  peptide (1)..(485): Ceres Seq. ID no. 12718492

SEQ ID NO: 93152 - protein, 436 aa, Arabidopsis thaliana; identical to SEQ ID NO: 89396
  peptide (1)..(436): Ceres Seq. ID no. 12718493

SEQ ID NO: 93153 - protein, 427 aa, Arabidopsis thaliana; identical to SEQ ID NO: 89397
  peptide (1)..(427): Ceres Seq. ID no. 12718494

SEQ ID NO: 93154 - DNA, 1680 bp, Arabidopsis thaliana; identical to SEQ ID NO: 89398
  misc_feature (1)..(1680): Ceres Seq. ID no. 12718499
  misc_feature (1)..(1680): Ortholog of  Ceres SEQ ID NO 12586556 as cited in SEQ ID NO 64667
  misc_feature (1)..(1680): Ortholog of  Ceres SEQ ID NO 13660894 as cited in SEQ ID NO 67475

SEQ ID NO: 93155 - protein, 559 aa, Arabidopsis thaliana; identical to SEQ ID NO: 89399
  peptide (1)..(559): Ceres Seq. ID no. 12718500

SEQ ID NO: 93156 - protein, 544 aa, Arabidopsis thaliana; identical to SEQ ID NO: 89400
  peptide (1)..(544): Ceres Seq. ID no. 12718501

SEQ ID NO: 93157 - protein, 522 aa, Arabidopsis thaliana; identical to SEQ ID NO: 89401
  peptide (1)..(522): Ceres Seq. ID no. 12718502

SEQ ID NO: 93158 - DNA, 1485 bp, Arabidopsis thaliana; identical to SEQ ID NO: 89402
  misc_feature (1)..(1485): Ceres Seq. ID no. 12718507
  misc_feature (1)..(1485): Ortholog of  Ceres SEQ ID NO 14309934 as cited in SEQ ID NO 20583
  misc_feature (1)..(1485): Ortholog of  Ceres SEQ ID NO 13654989 as cited in SEQ ID NO 63117
  misc_feature (1)..(1485): Ortholog of  Ceres SEQ ID NO 13584744 as cited in SEQ ID NO 69137

SEQ ID NO: 93159 - protein, 494 aa, Arabidopsis thaliana; identical to SEQ ID NO: 89403
  peptide (1)..(494): Ceres Seq. ID no. 12718508

SEQ ID NO: 93160 - protein, 484 aa, Arabidopsis thaliana; identical to SEQ ID NO: 89404
  peptide (1)..(484): Ceres Seq. ID no. 12718509

SEQ ID NO: 93161 - protein, 456 aa, Arabidopsis thaliana; identical to SEQ ID NO: 89405
  peptide (1)..(456): Ceres Seq. ID no. 12718510

SEQ ID NO: 93162 - DNA, 1584 bp, Arabidopsis thaliana; identical to SEQ ID NO: 89406
  misc_feature (1)..(1584): Ceres Seq. ID no. 12718514
  misc_feature (1)..(1584): Ortholog of  Ceres SEQ ID NO 15169466 as cited in SEQ ID NO 66135

SEQ ID NO: 93163 - protein, 527 aa, Arabidopsis thaliana; identical to SEQ ID NO: 89407
  peptide (1)..(527): Ceres Seq. ID no. 12718515

SEQ ID NO: 93164 - protein, 488 aa, Arabidopsis thaliana; identical to SEQ ID NO: 89408
  peptide (1)..(488): Ceres Seq. ID no. 12718516

SEQ ID NO: 93165 - protein, 481 aa, Arabidopsis thaliana; identical to SEQ ID NO: 89409
  peptide (1)..(481): Ceres Seq. ID no. 12718517

SEQ ID NO: 93166 - DNA, 1014 bp, Arabidopsis thaliana; identical to SEQ ID NO: 89410
  misc_feature (1)..(1014): Ceres Seq. ID no. 12718529
  misc_feature (1)..(1014): Ortholog of  Ceres SEQ ID NO 13590699 as cited in SEQ ID NO 65085

SEQ ID NO: 93167 - protein, 263 aa, Arabidopsis thaliana; identical to SEQ ID NO: 89411
  peptide (1)..(263): Ceres Seq. ID no. 12718530

SEQ ID NO: 93168 - protein, 256 aa, Arabidopsis thaliana; identical to SEQ ID NO: 89412
  peptide (1)..(256): Ceres Seq. ID no. 12718531

SEQ ID NO: 93169 - DNA, 639 bp, Arabidopsis thaliana; identical to SEQ ID NO: 89413
  misc_feature (1)..(639): Ceres Seq. ID no. 12718536
  misc_feature (1)..(639): Ortholog of  Ceres SEQ ID NO 13638292 as cited in SEQ ID NO 57738

SEQ ID NO: 93170 - protein, 212 aa, Arabidopsis thaliana; identical to SEQ ID NO: 89414
  peptide (1)..(212): Ceres Seq. ID no. 12718537

SEQ ID NO: 93171 - protein, 196 aa, Arabidopsis thaliana; identical to SEQ ID NO: 89415
  peptide (1)..(196): Ceres Seq. ID no. 12718538

SEQ ID NO: 93172 - protein, 187 aa, Arabidopsis thaliana; identical to SEQ ID NO: 89416
  peptide (1)..(187): Ceres Seq. ID no. 12718539

SEQ ID NO: 93173 - DNA, 1479 bp, Arabidopsis thaliana; identical to SEQ ID NO: 89417
  misc_feature (1)..(1479): Ceres Seq. ID no. 12718544
  misc_feature (1)..(1479): Ortholog of  Ceres SEQ ID NO 13654583 as cited in SEQ ID NO 68599

SEQ ID NO: 93174 - protein, 492 aa, Arabidopsis thaliana; identical to SEQ ID NO: 89418
  peptide (1)..(492): Ceres Seq. ID no. 12718545

SEQ ID NO: 93175 - protein, 413 aa, Arabidopsis thaliana; identical to SEQ ID NO: 89419
  peptide (1)..(413): Ceres Seq. ID no. 12718546

SEQ ID NO: 93176 - protein, 365 aa, Arabidopsis thaliana; identical to SEQ ID NO: 89420
  peptide (1)..(365): Ceres Seq. ID no. 12718547

SEQ ID NO: 93177 - DNA, 1836 bp, Arabidopsis thaliana; identical to SEQ ID NO: 89421
  misc_feature (1)..(1836): Ceres Seq. ID no. 12718548
  misc_feature (1)..(1836): Ortholog of  Ceres SEQ ID NO 14312180 as cited in SEQ ID NO 59480

SEQ ID NO: 93178 - protein, 611 aa, Arabidopsis thaliana; identical to SEQ ID NO: 89422
  peptide (1)..(611): Ceres Seq. ID no. 12718549

SEQ ID NO: 93179 - protein, 373 aa, Arabidopsis thaliana; identical to SEQ ID NO: 89423
  peptide (1)..(373): Ceres Seq. ID no. 12718550

SEQ ID NO: 93180 - protein, 350 aa, Arabidopsis thaliana; identical to SEQ ID NO: 89424
  peptide (1)..(350): Ceres Seq. ID no. 12718551

SEQ ID NO: 93181 - DNA, 1669 bp, Arabidopsis thaliana; identical to SEQ ID NO: 89425
  misc_feature (1)..(1669): Ceres Seq. ID no. 12718560
  misc_feature (1)..(1669): Ortholog of  Ceres SEQ ID NO 13654989 as cited in SEQ ID NO 63117
  misc_feature (1)..(1669): Ortholog of  Ceres SEQ ID NO 13657138 as cited in SEQ ID NO 65923
  misc_feature (1)..(1669): Ortholog of  Ceres SEQ ID NO 13584744 as cited in SEQ ID NO 69137

SEQ ID NO: 93182 - protein, 406 aa, Arabidopsis thaliana; identical to SEQ ID NO: 89426
  peptide (1)..(406): Ceres Seq. ID no. 12718561

SEQ ID NO: 93183 - protein, 367 aa, Arabidopsis thaliana; identical to SEQ ID NO: 89427
  peptide (1)..(367): Ceres Seq. ID no. 12718562

SEQ ID NO: 93184 - protein, 308 aa, Arabidopsis thaliana; identical to SEQ ID NO: 89428
  peptide (1)..(308): Ceres Seq. ID no. 12718563

SEQ ID NO: 93185 - DNA, 795 bp, Arabidopsis thaliana; identical to SEQ ID NO: 89429
  misc_feature (1)..(795): Ceres Seq. ID no. 12718586
  misc_feature (1)..(795): Ortholog of  Ceres SEQ ID NO 15176306 as cited in SEQ ID NO 52784
  misc_feature (1)..(795): Ortholog of  Ceres SEQ ID NO 13582624 as cited in SEQ ID NO 56287
  misc_feature (1)..(795): Ortholog of  Ceres SEQ ID NO 13597264 as cited in SEQ ID NO 63897
  misc_feature (1)..(795): Ortholog of  Ceres SEQ ID NO 13598570 as cited in SEQ ID NO 65434
  misc_feature (1)..(795): Ortholog of  Ceres SEQ ID NO 13656452 as cited in SEQ ID NO 65745
  misc_feature (1)..(795): Ortholog of  Ceres SEQ ID NO 13596238 as cited in SEQ ID NO 68834
  misc_feature (1)..(795): Ortholog of  Ceres SEQ ID NO 15174329 as cited in SEQ ID NO 0

SEQ ID NO: 93186 - protein, 264 aa, Arabidopsis thaliana; identical to SEQ ID NO: 89430
  peptide (1)..(264): Ceres Seq. ID no. 12718587

SEQ ID NO: 93187 - protein, 144 aa, Arabidopsis thaliana; identical to SEQ ID NO: 89431
  peptide (1)..(144): Ceres Seq. ID no. 12718588

SEQ ID NO: 93188 - DNA, 822 bp, Arabidopsis thaliana; identical to SEQ ID NO: 89432
  misc_feature (1)..(822): Ceres Seq. ID no. 12718589
  misc_feature (1)..(822): Ortholog of  Ceres SEQ ID NO 15176306 as cited in SEQ ID NO 52784
  misc_feature (1)..(822): Ortholog of  Ceres SEQ ID NO 13582624 as cited in SEQ ID NO 56287
  misc_feature (1)..(822): Ortholog of  Ceres SEQ ID NO 13597264 as cited in SEQ ID NO 63897
  misc_feature (1)..(822): Ortholog of  Ceres SEQ ID NO 13656452 as cited in SEQ ID NO 65745
  misc_feature (1)..(822): Ortholog of  Ceres SEQ ID NO 13596238 as cited in SEQ ID NO 68834

SEQ ID NO: 93189 - protein, 273 aa, Arabidopsis thaliana; identical to SEQ ID NO: 89433
  peptide (1)..(273): Ceres Seq. ID no. 12718590

SEQ ID NO: 93190 - protein, 248 aa, Arabidopsis thaliana; identical to SEQ ID NO: 89434
  peptide (1)..(248): Ceres Seq. ID no. 12718591

SEQ ID NO: 93191 - protein, 181 aa, Arabidopsis thaliana; identical to SEQ ID NO: 89435
  peptide (1)..(181): Ceres Seq. ID no. 12718592

SEQ ID NO: 93192 - DNA, 852 bp, Arabidopsis thaliana; identical to SEQ ID NO: 89436
  misc_feature (1)..(852): Ceres Seq. ID no. 12718593
  misc_feature (1)..(852): Ortholog of  Ceres SEQ ID NO 15176306 as cited in SEQ ID NO 52784
  misc_feature (1)..(852): Ortholog of  Ceres SEQ ID NO 13582624 as cited in SEQ ID NO 56287
  misc_feature (1)..(852): Ortholog of  Ceres SEQ ID NO 13597264 as cited in SEQ ID NO 63897
  misc_feature (1)..(852): Ortholog of  Ceres SEQ ID NO 13598570 as cited in SEQ ID NO 65434
  misc_feature (1)..(852): Ortholog of  Ceres SEQ ID NO 13656452 as cited in SEQ ID NO 65745
  misc_feature (1)..(852): Ortholog of  Ceres SEQ ID NO 13596238 as cited in SEQ ID NO 68834
  misc_feature (1)..(852): Ortholog of  Ceres SEQ ID NO 15174329 as cited in SEQ ID NO 0

SEQ ID NO: 93193 - protein, 283 aa, Arabidopsis thaliana; identical to SEQ ID NO: 89437
  peptide (1)..(283): Ceres Seq. ID no. 12718594

SEQ ID NO: 93194 - protein, 277 aa, Arabidopsis thaliana; identical to SEQ ID NO: 89438
  peptide (1)..(277): Ceres Seq. ID no. 12718595

SEQ ID NO: 93195 - protein, 262 aa, Arabidopsis thaliana; identical to SEQ ID NO: 89439
  peptide (1)..(262): Ceres Seq. ID no. 12718596

SEQ ID NO: 93196 - DNA, 2046 bp, Arabidopsis thaliana; identical to SEQ ID NO: 89440
  misc_feature (1)..(2046): Ceres Seq. ID no. 12718604
  misc_feature (1)..(2046): Ortholog of  Ceres SEQ ID NO 13654989 as cited in SEQ ID NO 63117
  misc_feature (1)..(2046): Ortholog of  Ceres SEQ ID NO 13655640 as cited in SEQ ID NO 63844

SEQ ID NO: 93197 - protein, 658 aa, Arabidopsis thaliana; identical to SEQ ID NO: 89441
  peptide (1)..(658): Ceres Seq. ID no. 12718605

SEQ ID NO: 93198 - protein, 630 aa, Arabidopsis thaliana; identical to SEQ ID NO: 89442
  peptide (1)..(630): Ceres Seq. ID no. 12718606

SEQ ID NO: 93199 - protein, 567 aa, Arabidopsis thaliana; identical to SEQ ID NO: 89443
  peptide (1)..(567): Ceres Seq. ID no. 12718607

SEQ ID NO: 93200 - DNA, 509 bp, Arabidopsis thaliana; identical to SEQ ID NO: 89444
  misc_feature (1)..(509): Ceres Seq. ID no. 12718608
  misc_feature (1)..(509): Ortholog of  Ceres SEQ ID NO 13598758 as cited in SEQ ID NO 61555

SEQ ID NO: 93201 - protein, 155 aa, Arabidopsis thaliana; identical to SEQ ID NO: 89445
  peptide (1)..(155): Ceres Seq. ID no. 12718609

SEQ ID NO: 93202 - protein, 147 aa, Arabidopsis thaliana; identical to SEQ ID NO: 89446
  peptide (1)..(147): Ceres Seq. ID no. 12718610

SEQ ID NO: 93203 - protein, 139 aa, Arabidopsis thaliana; identical to SEQ ID NO: 89447
  peptide (1)..(139): Ceres Seq. ID no. 12718611

SEQ ID NO: 93204 - DNA, 763 bp, Arabidopsis thaliana; identical to SEQ ID NO: 89448
  misc_feature (1)..(763): Ceres Seq. ID no. 12718640
  misc_feature (1)..(763): Ortholog of  Ceres SEQ ID NO 13659085 as cited in SEQ ID NO 66806

SEQ ID NO: 93205 - protein, 162 aa, Arabidopsis thaliana; identical to SEQ ID NO: 23183
  peptide (1)..(162): Ceres Seq. ID no. 12718641

SEQ ID NO: 93206 - protein, 150 aa, Arabidopsis thaliana; identical to SEQ ID NO: 23184
  peptide (1)..(150): Ceres Seq. ID no. 12718642

SEQ ID NO: 93207 - DNA, 1875 bp, Arabidopsis thaliana; identical to SEQ ID NO: 89451
  misc_feature (1)..(1875): Ceres Seq. ID no. 12718643
  misc_feature (1)..(1875): Ortholog of  Ceres SEQ ID NO 13600216 as cited in SEQ ID NO 569

SEQ ID NO: 93208 - protein, 624 aa, Arabidopsis thaliana; identical to SEQ ID NO: 89452
  peptide (1)..(624): Ceres Seq. ID no. 12718644

SEQ ID NO: 93209 - protein, 592 aa, Arabidopsis thaliana; identical to SEQ ID NO: 89453
  peptide (1)..(592): Ceres Seq. ID no. 12718645

SEQ ID NO: 93210 - protein, 575 aa, Arabidopsis thaliana; identical to SEQ ID NO: 89454
  peptide (1)..(575): Ceres Seq. ID no. 12718646

SEQ ID NO: 93211 - DNA, 1205 bp, Arabidopsis thaliana; identical to SEQ ID NO: 89455
  misc_feature (1)..(1205): Ceres Seq. ID no. 12718651
  misc_feature (1)..(1205): Ortholog of  Ceres SEQ ID NO 15177965 as cited in SEQ ID NO 58545

SEQ ID NO: 93212 - protein, 197 aa, Arabidopsis thaliana; identical to SEQ ID NO: 89456
  peptide (1)..(197): Ceres Seq. ID no. 12718652

SEQ ID NO: 93213 - protein, 180 aa, Arabidopsis thaliana; identical to SEQ ID NO: 43324
  peptide (1)..(180): Ceres Seq. ID no. 12718653

SEQ ID NO: 93214 - protein, 121 aa, Arabidopsis thaliana; identical to SEQ ID NO: 89458
  peptide (1)..(121): Ceres Seq. ID no. 12718654

SEQ ID NO: 93215 - DNA, 1434 bp, Arabidopsis thaliana; identical to SEQ ID NO: 89459
  misc_feature (1)..(1434): Ceres Seq. ID no. 12718658
  misc_feature (1)..(1434): Ortholog of  Ceres SEQ ID NO 13597475 as cited in SEQ ID NO 65105
  misc_feature (1)..(1434): Ortholog of  Ceres SEQ ID NO 14301761 as cited in SEQ ID NO 66790

SEQ ID NO: 93216 - protein, 99 aa, Arabidopsis thaliana; identical to SEQ ID NO: 89460
  peptide (1)..(99): Ceres Seq. ID no. 12718659

SEQ ID NO: 93217 - protein, 97 aa, Arabidopsis thaliana; identical to SEQ ID NO: 36732
  peptide (1)..(97): Ceres Seq. ID no. 12718660

SEQ ID NO: 93218 - protein, 69 aa, Arabidopsis thaliana; identical to SEQ ID NO: 89462
  peptide (1)..(69): Ceres Seq. ID no. 12718661

SEQ ID NO: 93219 - DNA, 1194 bp, Arabidopsis thaliana; identical to SEQ ID NO: 89463
  misc_feature (1)..(1194): Ceres Seq. ID no. 12718662
  misc_feature (1)..(1194): Ortholog of  Ceres SEQ ID NO 14316144 as cited in SEQ ID NO 52397

SEQ ID NO: 93220 - protein, 397 aa, Arabidopsis thaliana; identical to SEQ ID NO: 89464
  peptide (1)..(397): Ceres Seq. ID no. 12718663

SEQ ID NO: 93221 - protein, 396 aa, Arabidopsis thaliana; identical to SEQ ID NO: 89465
  peptide (1)..(396): Ceres Seq. ID no. 12718664

SEQ ID NO: 93222 - protein, 395 aa, Arabidopsis thaliana; identical to SEQ ID NO: 80693
  peptide (1)..(395): Ceres Seq. ID no. 12718665

SEQ ID NO: 93223 - protein, 385 aa, Arabidopsis thaliana; identical to SEQ ID NO: 80694
  peptide (1)..(385): Ceres Seq. ID no. 12718666

SEQ ID NO: 93224 - DNA, 1023 bp, Arabidopsis thaliana; identical to SEQ ID NO: 89468
  misc_feature (1)..(1023): Ceres Seq. ID no. 12718950
  misc_feature (1)..(1023): Ortholog of  Ceres SEQ ID NO 14306410 as cited in SEQ ID NO 53870

SEQ ID NO: 93225 - protein, 340 aa, Arabidopsis thaliana; identical to SEQ ID NO: 89469
  peptide (1)..(340): Ceres Seq. ID no. 12718951

SEQ ID NO: 93226 - protein, 301 aa, Arabidopsis thaliana; identical to SEQ ID NO: 89470
  peptide (1)..(301): Ceres Seq. ID no. 12718952

SEQ ID NO: 93227 - protein, 227 aa, Arabidopsis thaliana; identical to SEQ ID NO: 89471
  peptide (1)..(227): Ceres Seq. ID no. 12718953

SEQ ID NO: 93228 - DNA, 2008 bp, Arabidopsis thaliana; identical to SEQ ID NO: 89472
  misc_feature (1)..(2008): Ceres Seq. ID no. 12719052
  misc_feature (1)..(2008): Ortholog of  Ceres SEQ ID NO 12613725 as cited in SEQ ID NO 68196

SEQ ID NO: 93229 - protein, 577 aa, Arabidopsis thaliana; identical to SEQ ID NO: 89473
  peptide (1)..(577): Ceres Seq. ID no. 12719053

SEQ ID NO: 93230 - protein, 532 aa, Arabidopsis thaliana; identical to SEQ ID NO: 89474
  peptide (1)..(532): Ceres Seq. ID no. 12719054

SEQ ID NO: 93231 - protein, 521 aa, Arabidopsis thaliana; identical to SEQ ID NO: 89475
  peptide (1)..(521): Ceres Seq. ID no. 12719055

SEQ ID NO: 93232 - DNA, 2031 bp, Arabidopsis thaliana; identical to SEQ ID NO: 89476
  misc_feature (1)..(2031): Ceres Seq. ID no. 12719056
  misc_feature (1)..(2031): Ortholog of  Ceres SEQ ID NO 15177692 as cited in SEQ ID NO 52664
  misc_feature (1)..(2031): Ortholog of  Ceres SEQ ID NO 12467471 as cited in SEQ ID NO 55509

SEQ ID NO: 93233 - protein, 676 aa, Arabidopsis thaliana; identical to SEQ ID NO: 89477
  peptide (1)..(676): Ceres Seq. ID no. 12719057

SEQ ID NO: 93234 - protein, 629 aa, Arabidopsis thaliana; identical to SEQ ID NO: 89478
  peptide (1)..(629): Ceres Seq. ID no. 12719058

SEQ ID NO: 93235 - protein, 602 aa, Arabidopsis thaliana; identical to SEQ ID NO: 89479
  peptide (1)..(602): Ceres Seq. ID no. 12719059

SEQ ID NO: 93236 - DNA, 1569 bp, Arabidopsis thaliana; identical to SEQ ID NO: 89480
  misc_feature (1)..(1569): Ceres Seq. ID no. 12719096
  misc_feature (1)..(1569): Ortholog of  Ceres SEQ ID NO 13599900 as cited in SEQ ID NO 531
  misc_feature (1)..(1569): Ortholog of  Ceres SEQ ID NO 13659971 as cited in SEQ ID NO 67565
  misc_feature (1)..(1569): Ortholog of  Ceres SEQ ID NO 13500385 as cited in SEQ ID NO 67583

SEQ ID NO: 93237 - protein, 375 aa, Arabidopsis thaliana; identical to SEQ ID NO: 89481
  peptide (1)..(375): Ceres Seq. ID no. 12719097

SEQ ID NO: 93238 - protein, 321 aa, Arabidopsis thaliana; identical to SEQ ID NO: 89482
  peptide (1)..(321): Ceres Seq. ID no. 12719098

SEQ ID NO: 93239 - protein, 310 aa, Arabidopsis thaliana; identical to SEQ ID NO: 89483
  peptide (1)..(310): Ceres Seq. ID no. 12719099

SEQ ID NO: 93240 - DNA, 1724 bp, Arabidopsis thaliana; identical to SEQ ID NO: 89484
  misc_feature (1)..(1724): Ceres Seq. ID no. 12719100
  misc_feature (1)..(1724): Ortholog of  Ceres SEQ ID NO 13599900 as cited in SEQ ID NO 531
  misc_feature (1)..(1724): Ortholog of  Ceres SEQ ID NO 13659971 as cited in SEQ ID NO 67565
  misc_feature (1)..(1724): Ortholog of  Ceres SEQ ID NO 13500385 as cited in SEQ ID NO 67583

SEQ ID NO: 93241 - protein, 382 aa, Arabidopsis thaliana; identical to SEQ ID NO: 89485
  peptide (1)..(382): Ceres Seq. ID no. 12719101

SEQ ID NO: 93242 - protein, 328 aa, Arabidopsis thaliana; identical to SEQ ID NO: 89486
  peptide (1)..(328): Ceres Seq. ID no. 12719102

SEQ ID NO: 93243 - protein, 317 aa, Arabidopsis thaliana; identical to SEQ ID NO: 89487
  peptide (1)..(317): Ceres Seq. ID no. 12719103

SEQ ID NO: 93244 - DNA, 1545 bp, Arabidopsis thaliana; identical to SEQ ID NO: 89488
  misc_feature (1)..(1545): Ceres Seq. ID no. 12719104
  misc_feature (1)..(1545): Ortholog of  Ceres SEQ ID NO 13502874 as cited in SEQ ID NO 66298
  misc_feature (1)..(1545): Ortholog of  Ceres SEQ ID NO 12614124 as cited in SEQ ID NO 68392

SEQ ID NO: 93245 - protein, 514 aa, Arabidopsis thaliana; identical to SEQ ID NO: 89489
  peptide (1)..(514): Ceres Seq. ID no. 12719105

SEQ ID NO: 93246 - protein, 510 aa, Arabidopsis thaliana; identical to SEQ ID NO: 89490
  peptide (1)..(510): Ceres Seq. ID no. 12719106

SEQ ID NO: 93247 - protein, 455 aa, Arabidopsis thaliana; identical to SEQ ID NO: 89491
  peptide (1)..(455): Ceres Seq. ID no. 12719107

SEQ ID NO: 93248 - DNA, 1118 bp, Arabidopsis thaliana; identical to SEQ ID NO: 89492
  misc_feature (1)..(1118): Ceres Seq. ID no. 12719112
  misc_feature (1)..(1118): Ortholog of  Ceres SEQ ID NO 13655934 as cited in SEQ ID NO 65278

SEQ ID NO: 93249 - protein, 282 aa, Arabidopsis thaliana; identical to SEQ ID NO: 89493
  peptide (1)..(282): Ceres Seq. ID no. 12719113

SEQ ID NO: 93250 - protein, 260 aa, Arabidopsis thaliana; identical to SEQ ID NO: 89494
  peptide (1)..(260): Ceres Seq. ID no. 12719114

SEQ ID NO: 93251 - DNA, 2232 bp, Arabidopsis thaliana; identical to SEQ ID NO: 89495
  misc_feature (1)..(2232): Ceres Seq. ID no. 12719115
  misc_feature (1)..(2232): Ortholog of  Ceres SEQ ID NO 13600301 as cited in SEQ ID NO 1010

SEQ ID NO: 93252 - protein, 743 aa, Arabidopsis thaliana; identical to SEQ ID NO: 89496
  peptide (1)..(743): Ceres Seq. ID no. 12719116

SEQ ID NO: 93253 - protein, 624 aa, Arabidopsis thaliana; identical to SEQ ID NO: 89497
  peptide (1)..(624): Ceres Seq. ID no. 12719117

SEQ ID NO: 93254 - protein, 588 aa, Arabidopsis thaliana; identical to SEQ ID NO: 89498
  peptide (1)..(588): Ceres Seq. ID no. 12719118

SEQ ID NO: 93255 - DNA, 2286 bp, Arabidopsis thaliana; identical to SEQ ID NO: 89499
  misc_feature (1)..(2286): Ceres Seq. ID no. 12719134
  misc_feature (1)..(2286): Ortholog of  Ceres SEQ ID NO 12618407 as cited in SEQ ID NO 64994

SEQ ID NO: 93256 - protein, 761 aa, Arabidopsis thaliana; identical to SEQ ID NO: 89500
  peptide (1)..(761): Ceres Seq. ID no. 12719135

SEQ ID NO: 93257 - protein, 605 aa, Arabidopsis thaliana; identical to SEQ ID NO: 89501
  peptide (1)..(605): Ceres Seq. ID no. 12719136

SEQ ID NO: 93258 - DNA, 1307 bp, Arabidopsis thaliana; identical to SEQ ID NO: 89502
  misc_feature (1)..(1307): Ceres Seq. ID no. 12719142
  misc_feature (1)..(1307): Ortholog of  Ceres SEQ ID NO 13502952 as cited in SEQ ID NO 62271
  misc_feature (1)..(1307): Ortholog of  Ceres SEQ ID NO 13502973 as cited in SEQ ID NO 68052
  misc_feature (1)..(1307): Ortholog of  Ceres SEQ ID NO 13596000 as cited in SEQ ID NO 68188
  misc_feature (1)..(1307): Ortholog of  Ceres SEQ ID NO 15179420 as cited in SEQ ID NO 0

SEQ ID NO: 93259 - protein, 348 aa, Arabidopsis thaliana; identical to SEQ ID NO: 89503
  peptide (1)..(348): Ceres Seq. ID no. 12719143

SEQ ID NO: 93260 - protein, 310 aa, Arabidopsis thaliana; identical to SEQ ID NO: 89504
  peptide (1)..(310): Ceres Seq. ID no. 12719144

SEQ ID NO: 93261 - protein, 278 aa, Arabidopsis thaliana; identical to SEQ ID NO: 89505
  peptide (1)..(278): Ceres Seq. ID no. 12719145

SEQ ID NO: 93262 - DNA, 1683 bp, Arabidopsis thaliana; identical to SEQ ID NO: 89506
  misc_feature (1)..(1683): Ceres Seq. ID no. 12719182
  misc_feature (1)..(1683): Ortholog of  Ceres SEQ ID NO 15169603 as cited in SEQ ID NO 65772
  misc_feature (1)..(1683): Ortholog of  Ceres SEQ ID NO 14308003 as cited in SEQ ID NO 65919
  misc_feature (1)..(1683): Ortholog of  Ceres SEQ ID NO 14303087 as cited in SEQ ID NO 66569

SEQ ID NO: 93263 - protein, 517 aa, Arabidopsis thaliana; identical to SEQ ID NO: 89507
  peptide (1)..(517): Ceres Seq. ID no. 12719183

SEQ ID NO: 93264 - protein, 495 aa, Arabidopsis thaliana; identical to SEQ ID NO: 89508
  peptide (1)..(495): Ceres Seq. ID no. 12719184

SEQ ID NO: 93265 - DNA, 1371 bp, Arabidopsis thaliana; identical to SEQ ID NO: 89509
  misc_feature (1)..(1371): Ceres Seq. ID no. 12719239
  misc_feature (1)..(1371): Ortholog of  Ceres SEQ ID NO 13596816 as cited in SEQ ID NO 62287

SEQ ID NO: 93266 - protein, 456 aa, Arabidopsis thaliana; identical to SEQ ID NO: 89510
  peptide (1)..(456): Ceres Seq. ID no. 12719240

SEQ ID NO: 93267 - protein, 322 aa, Arabidopsis thaliana; identical to SEQ ID NO: 89511
  peptide (1)..(322): Ceres Seq. ID no. 12719241

SEQ ID NO: 93268 - protein, 298 aa, Arabidopsis thaliana; identical to SEQ ID NO: 89512
  peptide (1)..(298): Ceres Seq. ID no. 12719242

SEQ ID NO: 93269 - DNA, 753 bp, Arabidopsis thaliana; identical to SEQ ID NO: 89513
  misc_feature (1)..(753): Ceres Seq. ID no. 12719336
  misc_feature (1)..(753): Ortholog of  Ceres SEQ ID NO 12611392 as cited in SEQ ID NO 56826

SEQ ID NO: 93270 - protein, 250 aa, Arabidopsis thaliana; identical to SEQ ID NO: 89514
  peptide (1)..(250): Ceres Seq. ID no. 12719337

SEQ ID NO: 93271 - protein, 148 aa, Arabidopsis thaliana; identical to SEQ ID NO: 89515
  peptide (1)..(148): Ceres Seq. ID no. 12719338

SEQ ID NO: 93272 - protein, 143 aa, Arabidopsis thaliana; identical to SEQ ID NO: 89516
  peptide (1)..(143): Ceres Seq. ID no. 12719339

SEQ ID NO: 93273 - DNA, 1286 bp, Arabidopsis thaliana; identical to SEQ ID NO: 89517
  misc_feature (1)..(1286): Ceres Seq. ID no. 12719356
  misc_feature (1)..(1286): Ortholog of  Ceres SEQ ID NO 14307022 as cited in SEQ ID NO 54437

SEQ ID NO: 93274 - protein, 350 aa, Arabidopsis thaliana; identical to SEQ ID NO: 27338
  peptide (1)..(350): Ceres Seq. ID no. 12719357

SEQ ID NO: 93275 - protein, 326 aa, Arabidopsis thaliana; identical to SEQ ID NO: 27339
  peptide (1)..(326): Ceres Seq. ID no. 12719358

SEQ ID NO: 93276 - DNA, 1422 bp, Arabidopsis thaliana; identical to SEQ ID NO: 89520
  misc_feature (1)..(1422): Ceres Seq. ID no. 12719382
  misc_feature (1)..(1422): Ortholog of  Ceres SEQ ID NO 14311219 as cited in SEQ ID NO 56635
  misc_feature (1)..(1422): Ortholog of  Ceres SEQ ID NO 15169615 as cited in SEQ ID NO 66708
  misc_feature (1)..(1422): Ortholog of  Ceres SEQ ID NO 15169619 as cited in SEQ ID NO 67512

SEQ ID NO: 93277 - protein, 473 aa, Arabidopsis thaliana; identical to SEQ ID NO: 89521
  peptide (1)..(473): Ceres Seq. ID no. 12719383

SEQ ID NO: 93278 - protein, 417 aa, Arabidopsis thaliana; identical to SEQ ID NO: 89522
  peptide (1)..(417): Ceres Seq. ID no. 12719384

SEQ ID NO: 93279 - protein, 343 aa, Arabidopsis thaliana; identical to SEQ ID NO: 89523
  peptide (1)..(343): Ceres Seq. ID no. 12719385

SEQ ID NO: 93280 - DNA, 1410 bp, Arabidopsis thaliana; identical to SEQ ID NO: 89524
  misc_feature (1)..(1410): Ceres Seq. ID no. 12719426
  misc_feature (1)..(1410): Ortholog of  Ceres SEQ ID NO 13597334 as cited in SEQ ID NO 64244

SEQ ID NO: 93281 - protein, 402 aa, Arabidopsis thaliana; identical to SEQ ID NO: 89525
  peptide (1)..(402): Ceres Seq. ID no. 12719427

SEQ ID NO: 93282 - protein, 401 aa, Arabidopsis thaliana; identical to SEQ ID NO: 89526
  peptide (1)..(401): Ceres Seq. ID no. 12719428

SEQ ID NO: 93283 - protein, 391 aa, Arabidopsis thaliana; identical to SEQ ID NO: 89527
  peptide (1)..(391): Ceres Seq. ID no. 12719429

SEQ ID NO: 93284 - DNA, 615 bp, Arabidopsis thaliana; identical to SEQ ID NO: 89528
  misc_feature (1)..(615): Ceres Seq. ID no. 12719434
  misc_feature (1)..(615): Ortholog of  Ceres SEQ ID NO 12611293 as cited in SEQ ID NO 56191
  misc_feature (1)..(615): Ortholog of  Ceres SEQ ID NO 12583682 as cited in SEQ ID NO 56297
  misc_feature (1)..(615): Ortholog of  Ceres SEQ ID NO 15179225 as cited in SEQ ID NO 0

SEQ ID NO: 93285 - protein, 204 aa, Arabidopsis thaliana; identical to SEQ ID NO: 89529
  peptide (1)..(204): Ceres Seq. ID no. 12719435

SEQ ID NO: 93286 - protein, 196 aa, Arabidopsis thaliana; identical to SEQ ID NO: 89530
  peptide (1)..(196): Ceres Seq. ID no. 12719436

SEQ ID NO: 93287 - protein, 185 aa, Arabidopsis thaliana; identical to SEQ ID NO: 89531
  peptide (1)..(185): Ceres Seq. ID no. 12719437

SEQ ID NO: 93288 - DNA, 1749 bp, Arabidopsis thaliana; identical to SEQ ID NO: 89532
  misc_feature (1)..(1749): Ceres Seq. ID no. 12719449
  misc_feature (1)..(1749): Ortholog of  Ceres SEQ ID NO 13600220 as cited in SEQ ID NO 0

SEQ ID NO: 93289 - protein, 582 aa, Arabidopsis thaliana; identical to SEQ ID NO: 89533
  peptide (1)..(582): Ceres Seq. ID no. 12719450

SEQ ID NO: 93290 - protein, 580 aa, Arabidopsis thaliana; identical to SEQ ID NO: 89534
  peptide (1)..(580): Ceres Seq. ID no. 12719451

SEQ ID NO: 93291 - protein, 507 aa, Arabidopsis thaliana; identical to SEQ ID NO: 89535
  peptide (1)..(507): Ceres Seq. ID no. 12719452

SEQ ID NO: 93292 - DNA, 1743 bp, Arabidopsis thaliana; identical to SEQ ID NO: 89536
  misc_feature (1)..(1743): Ceres Seq. ID no. 12719453
  misc_feature (1)..(1743): Ortholog of  Ceres SEQ ID NO 13600220 as cited in SEQ ID NO 0

SEQ ID NO: 93293 - protein, 580 aa, Arabidopsis thaliana; identical to SEQ ID NO: 89537
  peptide (1)..(580): Ceres Seq. ID no. 12719454

SEQ ID NO: 93294 - protein, 505 aa, Arabidopsis thaliana; identical to SEQ ID NO: 89538
  peptide (1)..(505): Ceres Seq. ID no. 12719455

SEQ ID NO: 93295 - protein, 390 aa, Arabidopsis thaliana; identical to SEQ ID NO: 75520
  peptide (1)..(390): Ceres Seq. ID no. 12719456

SEQ ID NO: 93296 - DNA, 1463 bp, Arabidopsis thaliana; identical to SEQ ID NO: 89540
  misc_feature (1)..(1463): Ceres Seq. ID no. 12719461
  misc_feature (1)..(1463): Ortholog of  Ceres SEQ ID NO 14302146 as cited in SEQ ID NO 0

SEQ ID NO: 93297 - protein, 452 aa, Arabidopsis thaliana; identical to SEQ ID NO: 89541
  peptide (1)..(452): Ceres Seq. ID no. 12719462

SEQ ID NO: 93298 - protein, 431 aa, Arabidopsis thaliana; identical to SEQ ID NO: 89542
  peptide (1)..(431): Ceres Seq. ID no. 12719463

SEQ ID NO: 93299 - protein, 324 aa, Arabidopsis thaliana; identical to SEQ ID NO: 89543
  peptide (1)..(324): Ceres Seq. ID no. 12719464

SEQ ID NO: 93300 - DNA, 954 bp, Arabidopsis thaliana; identical to SEQ ID NO: 89544
  misc_feature (1)..(954): Ceres Seq. ID no. 12719504
  misc_feature (1)..(954): Ortholog of  Ceres SEQ ID NO 14316095 as cited in SEQ ID NO 52477

SEQ ID NO: 93301 - protein, 317 aa, Arabidopsis thaliana; identical to SEQ ID NO: 89545
  peptide (1)..(317): Ceres Seq. ID no. 12719505

SEQ ID NO: 93302 - protein, 235 aa, Arabidopsis thaliana; identical to SEQ ID NO: 89546
  peptide (1)..(235): Ceres Seq. ID no. 12719506

SEQ ID NO: 93303 - DNA, 1029 bp, Arabidopsis thaliana; identical to SEQ ID NO: 89547
  misc_feature (1)..(1029): Ceres Seq. ID no. 12719513
  misc_feature (1)..(1029): Ortholog of  Ceres SEQ ID NO 14306355 as cited in SEQ ID NO 1268
  misc_feature (1)..(1029): Ortholog of  Ceres SEQ ID NO 14314070 as cited in SEQ ID NO 56946
  misc_feature (1)..(1029): Ortholog of  Ceres SEQ ID NO 13624427 as cited in SEQ ID NO 0

SEQ ID NO: 93304 - protein, 255 aa, Arabidopsis thaliana; identical to SEQ ID NO: 89548
  peptide (1)..(255): Ceres Seq. ID no. 12719514

SEQ ID NO: 93305 - protein, 193 aa, Arabidopsis thaliana; identical to SEQ ID NO: 89549
  peptide (1)..(193): Ceres Seq. ID no. 12719515

SEQ ID NO: 93306 - protein, 180 aa, Arabidopsis thaliana; identical to SEQ ID NO: 89550
  peptide (1)..(180): Ceres Seq. ID no. 12719516

SEQ ID NO: 93307 - DNA, 2850 bp, Arabidopsis thaliana; identical to SEQ ID NO: 89551
  misc_feature (1)..(2850): Ceres Seq. ID no. 12719528
  misc_feature (1)..(2850): Ortholog of  Ceres SEQ ID NO 14303959 as cited in SEQ ID NO 53709

SEQ ID NO: 93308 - protein, 949 aa, Arabidopsis thaliana; identical to SEQ ID NO: 89552
  peptide (1)..(949): Ceres Seq. ID no. 12719529

SEQ ID NO: 93309 - protein, 922 aa, Arabidopsis thaliana; identical to SEQ ID NO: 89553
  peptide (1)..(922): Ceres Seq. ID no. 12719530

SEQ ID NO: 93310 - protein, 913 aa, Arabidopsis thaliana; identical to SEQ ID NO: 89554
  peptide (1)..(913): Ceres Seq. ID no. 12719531

SEQ ID NO: 93311 - DNA, 1572 bp, Arabidopsis thaliana; identical to SEQ ID NO: 89555
  misc_feature (1)..(1572): Ceres Seq. ID no. 12719572
  misc_feature (1)..(1572): Ortholog of  Ceres SEQ ID NO 13584608 as cited in SEQ ID NO 65113

SEQ ID NO: 93312 - protein, 448 aa, Arabidopsis thaliana; identical to SEQ ID NO: 89556
  peptide (1)..(448): Ceres Seq. ID no. 12719573

SEQ ID NO: 93313 - protein, 414 aa, Arabidopsis thaliana; identical to SEQ ID NO: 89557
  peptide (1)..(414): Ceres Seq. ID no. 12719574

SEQ ID NO: 93314 - DNA, 862 bp, Arabidopsis thaliana; identical to SEQ ID NO: 89558
  misc_feature (1)..(862): Ceres Seq. ID no. 12719579
  misc_feature (1)..(862): Ortholog of  Ceres SEQ ID NO 15170857 as cited in SEQ ID NO 54658
  misc_feature (1)..(862): Ortholog of  Ceres SEQ ID NO 15180523 as cited in SEQ ID NO 0

SEQ ID NO: 93315 - protein, 139 aa, Arabidopsis thaliana; identical to SEQ ID NO: 89559
  peptide (1)..(139): Ceres Seq. ID no. 12719580

SEQ ID NO: 93316 - DNA, 1506 bp, Arabidopsis thaliana; identical to SEQ ID NO: 89560
  misc_feature (1)..(1506): Ceres Seq. ID no. 12719591
  misc_feature (1)..(1506): Ortholog of  Ceres SEQ ID NO 12586556 as cited in SEQ ID NO 64667
  misc_feature (1)..(1506): Ortholog of  Ceres SEQ ID NO 13660894 as cited in SEQ ID NO 67475

SEQ ID NO: 93317 - protein, 501 aa, Arabidopsis thaliana; identical to SEQ ID NO: 89561
  peptide (1)..(501): Ceres Seq. ID no. 12719592

SEQ ID NO: 93318 - protein, 419 aa, Arabidopsis thaliana; identical to SEQ ID NO: 89562
  peptide (1)..(419): Ceres Seq. ID no. 12719593

SEQ ID NO: 93319 - protein, 398 aa, Arabidopsis thaliana; identical to SEQ ID NO: 89563
  peptide (1)..(398): Ceres Seq. ID no. 12719594

SEQ ID NO: 93320 - DNA, 1476 bp, Arabidopsis thaliana; identical to SEQ ID NO: 89564
  misc_feature (1)..(1476): Ceres Seq. ID no. 12719595
  misc_feature (1)..(1476): Ortholog of  Ceres SEQ ID NO 13594345 as cited in SEQ ID NO 58043
  misc_feature (1)..(1476): Ortholog of  Ceres SEQ ID NO 14314755 as cited in SEQ ID NO 59919
  misc_feature (1)..(1476): Ortholog of  Ceres SEQ ID NO 13597574 as cited in SEQ ID NO 64677
  misc_feature (1)..(1476): Ortholog of  Ceres SEQ ID NO 13597678 as cited in SEQ ID NO 65375
  misc_feature (1)..(1476): Ortholog of  Ceres SEQ ID NO 13662880 as cited in SEQ ID NO 65422
  misc_feature (1)..(1476): Ortholog of  Ceres SEQ ID NO 12779098 as cited in SEQ ID NO 67698
  misc_feature (1)..(1476): Ortholog of  Ceres SEQ ID NO 13596180 as cited in SEQ ID NO 67941
  misc_feature (1)..(1476): Ortholog of  Ceres SEQ ID NO 13591190 as cited in SEQ ID NO 68044
  misc_feature (1)..(1476): Ortholog of  Ceres SEQ ID NO 13595961 as cited in SEQ ID NO 68223
  misc_feature (1)..(1476): Ortholog of  Ceres SEQ ID NO 13596089 as cited in SEQ ID NO 68373

SEQ ID NO: 93321 - protein, 491 aa, Arabidopsis thaliana; identical to SEQ ID NO: 89565
  peptide (1)..(491): Ceres Seq. ID no. 12719596

SEQ ID NO: 93322 - protein, 475 aa, Arabidopsis thaliana; identical to SEQ ID NO: 89566
  peptide (1)..(475): Ceres Seq. ID no. 12719597

SEQ ID NO: 93323 - protein, 470 aa, Arabidopsis thaliana; identical to SEQ ID NO: 89567
  peptide (1)..(470): Ceres Seq. ID no. 12719598

SEQ ID NO: 93324 - DNA, 1663 bp, Arabidopsis thaliana; identical to SEQ ID NO: 89568
  misc_feature (1)..(1663): Ceres Seq. ID no. 12719603
  misc_feature (1)..(1663): Ortholog of  Ceres SEQ ID NO 13594345 as cited in SEQ ID NO 58043
  misc_feature (1)..(1663): Ortholog of  Ceres SEQ ID NO 14314755 as cited in SEQ ID NO 59919
  misc_feature (1)..(1663): Ortholog of  Ceres SEQ ID NO 13597574 as cited in SEQ ID NO 64677
  misc_feature (1)..(1663): Ortholog of  Ceres SEQ ID NO 13597843 as cited in SEQ ID NO 64850
  misc_feature (1)..(1663): Ortholog of  Ceres SEQ ID NO 13597678 as cited in SEQ ID NO 65375
  misc_feature (1)..(1663): Ortholog of  Ceres SEQ ID NO 13662880 as cited in SEQ ID NO 65422
  misc_feature (1)..(1663): Ortholog of  Ceres SEQ ID NO 12779098 as cited in SEQ ID NO 67698
  misc_feature (1)..(1663): Ortholog of  Ceres SEQ ID NO 13596180 as cited in SEQ ID NO 67941
  misc_feature (1)..(1663): Ortholog of  Ceres SEQ ID NO 13591190 as cited in SEQ ID NO 68044
  misc_feature (1)..(1663): Ortholog of  Ceres SEQ ID NO 13595961 as cited in SEQ ID NO 68223

SEQ ID NO: 93325 - protein, 496 aa, Arabidopsis thaliana; identical to SEQ ID NO: 89569
  peptide (1)..(496): Ceres Seq. ID no. 12719604

SEQ ID NO: 93326 - protein, 476 aa, Arabidopsis thaliana; identical to SEQ ID NO: 89570
  peptide (1)..(476): Ceres Seq. ID no. 12719605

SEQ ID NO: 93327 - protein, 471 aa, Arabidopsis thaliana; identical to SEQ ID NO: 89571
  peptide (1)..(471): Ceres Seq. ID no. 12719606

SEQ ID NO: 93328 - DNA, 1605 bp, Arabidopsis thaliana; identical to SEQ ID NO: 89572
  misc_feature (1)..(1605): Ceres Seq. ID no. 12719611
  misc_feature (1)..(1605): Ortholog of  Ceres SEQ ID NO 13594345 as cited in SEQ ID NO 58043
  misc_feature (1)..(1605): Ortholog of  Ceres SEQ ID NO 14314755 as cited in SEQ ID NO 59919
  misc_feature (1)..(1605): Ortholog of  Ceres SEQ ID NO 13597843 as cited in SEQ ID NO 64850
  misc_feature (1)..(1605): Ortholog of  Ceres SEQ ID NO 13597678 as cited in SEQ ID NO 65375
  misc_feature (1)..(1605): Ortholog of  Ceres SEQ ID NO 13662880 as cited in SEQ ID NO 65422
  misc_feature (1)..(1605): Ortholog of  Ceres SEQ ID NO 12779098 as cited in SEQ ID NO 67698
  misc_feature (1)..(1605): Ortholog of  Ceres SEQ ID NO 13596180 as cited in SEQ ID NO 67941
  misc_feature (1)..(1605): Ortholog of  Ceres SEQ ID NO 13591190 as cited in SEQ ID NO 68044
  misc_feature (1)..(1605): Ortholog of  Ceres SEQ ID NO 13595961 as cited in SEQ ID NO 68223

SEQ ID NO: 93329 - protein, 495 aa, Arabidopsis thaliana; identical to SEQ ID NO: 89573
  peptide (1)..(495): Ceres Seq. ID no. 12719612

SEQ ID NO: 93330 - protein, 477 aa, Arabidopsis thaliana; identical to SEQ ID NO: 89574
  peptide (1)..(477): Ceres Seq. ID no. 12719613

SEQ ID NO: 93331 - protein, 472 aa, Arabidopsis thaliana; identical to SEQ ID NO: 89575
  peptide (1)..(472): Ceres Seq. ID no. 12719614

SEQ ID NO: 93332 - DNA, 926 bp, Arabidopsis thaliana; identical to SEQ ID NO: 89576
  misc_feature (1)..(926): Ceres Seq. ID no. 12719626
  misc_feature (1)..(926): Ortholog of  Ceres SEQ ID NO 14315223 as cited in SEQ ID NO 52527
  misc_feature (1)..(926): Ortholog of  Ceres SEQ ID NO 14307085 as cited in SEQ ID NO 54749

SEQ ID NO: 93333 - protein, 298 aa, Arabidopsis thaliana; identical to SEQ ID NO: 89577
  peptide (1)..(298): Ceres Seq. ID no. 12719627

SEQ ID NO: 93334 - protein, 178 aa, Arabidopsis thaliana; identical to SEQ ID NO: 89578
  peptide (1)..(178): Ceres Seq. ID no. 12719628

SEQ ID NO: 93335 - protein, 151 aa, Arabidopsis thaliana; identical to SEQ ID NO: 89579
  peptide (1)..(151): Ceres Seq. ID no. 12719629

SEQ ID NO: 93336 - DNA, 1522 bp, Arabidopsis thaliana; identical to SEQ ID NO: 89580
  misc_feature (1)..(1522): Ceres Seq. ID no. 12719634
  misc_feature (1)..(1522): Ortholog of  Ceres SEQ ID NO 13594345 as cited in SEQ ID NO 58043
  misc_feature (1)..(1522): Ortholog of  Ceres SEQ ID NO 12614112 as cited in SEQ ID NO 60891
  misc_feature (1)..(1522): Ortholog of  Ceres SEQ ID NO 13597574 as cited in SEQ ID NO 64677
  misc_feature (1)..(1522): Ortholog of  Ceres SEQ ID NO 13597678 as cited in SEQ ID NO 65375
  misc_feature (1)..(1522): Ortholog of  Ceres SEQ ID NO 13662880 as cited in SEQ ID NO 65422
  misc_feature (1)..(1522): Ortholog of  Ceres SEQ ID NO 12779098 as cited in SEQ ID NO 67698
  misc_feature (1)..(1522): Ortholog of  Ceres SEQ ID NO 13596180 as cited in SEQ ID NO 67941
  misc_feature (1)..(1522): Ortholog of  Ceres SEQ ID NO 13591190 as cited in SEQ ID NO 68044
  misc_feature (1)..(1522): Ortholog of  Ceres SEQ ID NO 13595961 as cited in SEQ ID NO 68223

SEQ ID NO: 93337 - protein, 504 aa, Arabidopsis thaliana; identical to SEQ ID NO: 89581
  peptide (1)..(504): Ceres Seq. ID no. 12719635

SEQ ID NO: 93338 - protein, 490 aa, Arabidopsis thaliana; identical to SEQ ID NO: 89582
  peptide (1)..(490): Ceres Seq. ID no. 12719636

SEQ ID NO: 93339 - protein, 479 aa, Arabidopsis thaliana; identical to SEQ ID NO: 89583
  peptide (1)..(479): Ceres Seq. ID no. 12719637

SEQ ID NO: 93340 - DNA, 823 bp, Arabidopsis thaliana; identical to SEQ ID NO: 89584
  misc_feature (1)..(823): Ceres Seq. ID no. 12719656
  misc_feature (1)..(823): Ortholog of  Ceres SEQ ID NO 14316118 as cited in SEQ ID NO 52391
  misc_feature (1)..(823): Ortholog of  Ceres SEQ ID NO 15177246 as cited in SEQ ID NO 57731
  misc_feature (1)..(823): Ortholog of  Ceres SEQ ID NO 13664032 as cited in SEQ ID NO 67527
  misc_feature (1)..(823): Ortholog of  Ceres SEQ ID NO 15177573 as cited in SEQ ID NO 0
  misc_feature (1)..(823): Ortholog of  Ceres SEQ ID NO 15179397 as cited in SEQ ID NO 0

SEQ ID NO: 93341 - protein, 204 aa, Arabidopsis thaliana; identical to SEQ ID NO: 89585
  peptide (1)..(204): Ceres Seq. ID no. 12719657

SEQ ID NO: 93342 - protein, 173 aa, Arabidopsis thaliana; identical to SEQ ID NO: 89586
  peptide (1)..(173): Ceres Seq. ID no. 12719658

SEQ ID NO: 93343 - protein, 130 aa, Arabidopsis thaliana; identical to SEQ ID NO: 89587
  peptide (1)..(130): Ceres Seq. ID no. 12719659

SEQ ID NO: 93344 - DNA, 1056 bp, Arabidopsis thaliana; identical to SEQ ID NO: 89588
  misc_feature (1)..(1056): Ceres Seq. ID no. 12719664
  misc_feature (1)..(1056): Ortholog of  Ceres SEQ ID NO 13599162 as cited in SEQ ID NO 698
  misc_feature (1)..(1056): Ortholog of  Ceres SEQ ID NO 15180702 as cited in SEQ ID NO 0

SEQ ID NO: 93345 - protein, 351 aa, Arabidopsis thaliana; identical to SEQ ID NO: 89589
  peptide (1)..(351): Ceres Seq. ID no. 12719665

SEQ ID NO: 93346 - protein, 325 aa, Arabidopsis thaliana; identical to SEQ ID NO: 89590
  peptide (1)..(325): Ceres Seq. ID no. 12719666

SEQ ID NO: 93347 - protein, 215 aa, Arabidopsis thaliana; identical to SEQ ID NO: 89591
  peptide (1)..(215): Ceres Seq. ID no. 12719667

SEQ ID NO: 93348 - DNA, 1958 bp, Arabidopsis thaliana; identical to SEQ ID NO: 89592
  misc_feature (1)..(1958): Ceres Seq. ID no. 12719672
  misc_feature (1)..(1958): Ortholog of  Ceres SEQ ID NO 13596865 as cited in SEQ ID NO 60644

SEQ ID NO: 93349 - protein, 546 aa, Arabidopsis thaliana; identical to SEQ ID NO: 89593
  peptide (1)..(546): Ceres Seq. ID no. 12719673

SEQ ID NO: 93350 - protein, 496 aa, Arabidopsis thaliana; identical to SEQ ID NO: 89594
  peptide (1)..(496): Ceres Seq. ID no. 12719674

SEQ ID NO: 93351 - protein, 491 aa, Arabidopsis thaliana; identical to SEQ ID NO: 89595
  peptide (1)..(491): Ceres Seq. ID no. 12719675

SEQ ID NO: 93352 - DNA, 1974 bp, Arabidopsis thaliana; identical to SEQ ID NO: 89596
  misc_feature (1)..(1974): Ceres Seq. ID no. 12719680
  misc_feature (1)..(1974): Ortholog of  Ceres SEQ ID NO 12586556 as cited in SEQ ID NO 64667
  misc_feature (1)..(1974): Ortholog of  Ceres SEQ ID NO 13660894 as cited in SEQ ID NO 67475

SEQ ID NO: 93353 - protein, 657 aa, Arabidopsis thaliana; identical to SEQ ID NO: 89597
  peptide (1)..(657): Ceres Seq. ID no. 12719681

SEQ ID NO: 93354 - protein, 555 aa, Arabidopsis thaliana; identical to SEQ ID NO: 89598
  peptide (1)..(555): Ceres Seq. ID no. 12719682

SEQ ID NO: 93355 - protein, 485 aa, Arabidopsis thaliana; identical to SEQ ID NO: 89599
  peptide (1)..(485): Ceres Seq. ID no. 12719683

SEQ ID NO: 93356 - DNA, 888 bp, Arabidopsis thaliana; identical to SEQ ID NO: 89600
  misc_feature (1)..(888): Ceres Seq. ID no. 12719684
  misc_feature (1)..(888): Ortholog of  Ceres SEQ ID NO 15225561 as cited in SEQ ID NO 0

SEQ ID NO: 93357 - protein, 290 aa, Arabidopsis thaliana; identical to SEQ ID NO: 89601
  peptide (1)..(290): Ceres Seq. ID no. 12719685

SEQ ID NO: 93358 - protein, 273 aa, Arabidopsis thaliana; identical to SEQ ID NO: 89602
  peptide (1)..(273): Ceres Seq. ID no. 12719686

SEQ ID NO: 93359 - protein, 252 aa, Arabidopsis thaliana; identical to SEQ ID NO: 89603
  peptide (1)..(252): Ceres Seq. ID no. 12719687

SEQ ID NO: 93360 - DNA, 966 bp, Arabidopsis thaliana; identical to SEQ ID NO: 89604
  misc_feature (1)..(966): Ceres Seq. ID no. 12719692
  misc_feature (1)..(966): Ortholog of  Ceres SEQ ID NO 14310394 as cited in SEQ ID NO 54044

SEQ ID NO: 93361 - protein, 321 aa, Arabidopsis thaliana; identical to SEQ ID NO: 89605
  peptide (1)..(321): Ceres Seq. ID no. 12719693

SEQ ID NO: 93362 - protein, 298 aa, Arabidopsis thaliana; identical to SEQ ID NO: 89606
  peptide (1)..(298): Ceres Seq. ID no. 12719694

SEQ ID NO: 93363 - protein, 262 aa, Arabidopsis thaliana; identical to SEQ ID NO: 89607
  peptide (1)..(262): Ceres Seq. ID no. 12719695

SEQ ID NO: 93364 - DNA, 3120 bp, Arabidopsis thaliana; identical to SEQ ID NO: 89608
  misc_feature (1)..(3120): Ceres Seq. ID no. 12719696
  misc_feature (1)..(3120): Ortholog of  Ceres SEQ ID NO 13600310 as cited in SEQ ID NO 5086

SEQ ID NO: 93365 - protein, 1039 aa, Arabidopsis thaliana; identical to SEQ ID NO: 89609
  peptide (1)..(1039): Ceres Seq. ID no. 12719697

SEQ ID NO: 93366 - protein, 964 aa, Arabidopsis thaliana; identical to SEQ ID NO: 89610
  peptide (1)..(964): Ceres Seq. ID no. 12719698

SEQ ID NO: 93367 - protein, 896 aa, Arabidopsis thaliana; identical to SEQ ID NO: 89611
  peptide (1)..(896): Ceres Seq. ID no. 12719699

SEQ ID NO: 93368 - DNA, 950 bp, Arabidopsis thaliana; identical to SEQ ID NO: 89612
  misc_feature (1)..(950): Ceres Seq. ID no. 12719711
  misc_feature (1)..(950): Ortholog of  Ceres SEQ ID NO 13639645 as cited in SEQ ID NO 57488

SEQ ID NO: 93369 - protein, 297 aa, Arabidopsis thaliana; identical to SEQ ID NO: 89613
  peptide (1)..(297): Ceres Seq. ID no. 12719712

SEQ ID NO: 93370 - protein, 294 aa, Arabidopsis thaliana; identical to SEQ ID NO: 89614
  peptide (1)..(294): Ceres Seq. ID no. 12719713

SEQ ID NO: 93371 - protein, 285 aa, Arabidopsis thaliana; identical to SEQ ID NO: 89615
  peptide (1)..(285): Ceres Seq. ID no. 12719714

SEQ ID NO: 93372 - DNA, 1896 bp, Arabidopsis thaliana; identical to SEQ ID NO: 89616
  misc_feature (1)..(1896): Ceres Seq. ID no. 12719715
  misc_feature (1)..(1896): Ortholog of  Ceres SEQ ID NO 14310803 as cited in SEQ ID NO 58463
  misc_feature (1)..(1896): Ortholog of  Ceres SEQ ID NO 13663769 as cited in SEQ ID NO 60793

SEQ ID NO: 93373 - protein, 494 aa, Arabidopsis thaliana; identical to SEQ ID NO: 89617
  peptide (1)..(494): Ceres Seq. ID no. 12719716

SEQ ID NO: 93374 - protein, 483 aa, Arabidopsis thaliana; identical to SEQ ID NO: 89618
  peptide (1)..(483): Ceres Seq. ID no. 12719717

SEQ ID NO: 93375 - protein, 469 aa, Arabidopsis thaliana; identical to SEQ ID NO: 89619
  peptide (1)..(469): Ceres Seq. ID no. 12719718

SEQ ID NO: 93376 - DNA, 2260 bp, Arabidopsis thaliana; identical to SEQ ID NO: 89620
  misc_feature (1)..(2260): Ceres Seq. ID no. 12719727
  misc_feature (1)..(2260): Ortholog of  Ceres SEQ ID NO 13654989 as cited in SEQ ID NO 63117
  misc_feature (1)..(2260): Ortholog of  Ceres SEQ ID NO 13655640 as cited in SEQ ID NO 63844

SEQ ID NO: 93377 - protein, 689 aa, Arabidopsis thaliana; identical to SEQ ID NO: 89621
  peptide (1)..(689): Ceres Seq. ID no. 12719728

SEQ ID NO: 93378 - protein, 675 aa, Arabidopsis thaliana; identical to SEQ ID NO: 89622
  peptide (1)..(675): Ceres Seq. ID no. 12719729

SEQ ID NO: 93379 - protein, 481 aa, Arabidopsis thaliana; identical to SEQ ID NO: 89623
  peptide (1)..(481): Ceres Seq. ID no. 12719730

SEQ ID NO: 93380 - DNA, 680 bp, Arabidopsis thaliana; identical to SEQ ID NO: 89624
  misc_feature (1)..(680): Ceres Seq. ID no. 12719780
  misc_feature (1)..(680): Ortholog of  Ceres SEQ ID NO 12614157 as cited in SEQ ID NO 67965

SEQ ID NO: 93381 - protein, 71 aa, Arabidopsis thaliana; identical to SEQ ID NO: 89625
  peptide (1)..(71): Ceres Seq. ID no. 12719781

SEQ ID NO: 93382 - protein, 50 aa, Arabidopsis thaliana; identical to SEQ ID NO: 28366
  peptide (1)..(50): Ceres Seq. ID no. 12719782

SEQ ID NO: 93383 - protein, 46 aa, Arabidopsis thaliana; identical to SEQ ID NO: 28367
  peptide (1)..(46): Ceres Seq. ID no. 12719783

SEQ ID NO: 93384 - DNA, 1489 bp, Arabidopsis thaliana; identical to SEQ ID NO: 89628
  misc_feature (1)..(1489): Ceres Seq. ID no. 12719800
  misc_feature (1)..(1489): Ortholog of  Ceres SEQ ID NO 13656404 as cited in SEQ ID NO 65806
  misc_feature (1)..(1489): Ortholog of  Ceres SEQ ID NO 12779935 as cited in SEQ ID NO 66774
  misc_feature (1)..(1489): Ortholog of  Ceres SEQ ID NO 13598695 as cited in SEQ ID NO 67368
  misc_feature (1)..(1489): Ortholog of  Ceres SEQ ID NO 13591174 as cited in SEQ ID NO 68289

SEQ ID NO: 93385 - protein, 370 aa, Arabidopsis thaliana; identical to SEQ ID NO: 89629
  peptide (1)..(370): Ceres Seq. ID no. 12719801

SEQ ID NO: 93386 - protein, 364 aa, Arabidopsis thaliana; identical to SEQ ID NO: 89630
  peptide (1)..(364): Ceres Seq. ID no. 12719802

SEQ ID NO: 93387 - protein, 307 aa, Arabidopsis thaliana; identical to SEQ ID NO: 89631
  peptide (1)..(307): Ceres Seq. ID no. 12719803

SEQ ID NO: 93388 - DNA, 893 bp, Arabidopsis thaliana; identical to SEQ ID NO: 89632
  misc_feature (1)..(893): Ceres Seq. ID no. 12719804
  misc_feature (1)..(893): Ortholog of  Ceres SEQ ID NO 13598140 as cited in SEQ ID NO 61443

SEQ ID NO: 93389 - protein, 236 aa, Arabidopsis thaliana; identical to SEQ ID NO: 36283
  peptide (1)..(236): Ceres Seq. ID no. 12719805

SEQ ID NO: 93390 - protein, 215 aa, Arabidopsis thaliana; identical to SEQ ID NO: 36284
  peptide (1)..(215): Ceres Seq. ID no. 12719806

SEQ ID NO: 93391 - protein, 129 aa, Arabidopsis thaliana; identical to SEQ ID NO: 36285
  peptide (1)..(129): Ceres Seq. ID no. 12719807

SEQ ID NO: 93392 - DNA, 705 bp, Arabidopsis thaliana; identical to SEQ ID NO: 89636
  misc_feature (1)..(705): Ceres Seq. ID no. 12719816
  misc_feature (1)..(705): Ortholog of  Ceres SEQ ID NO 14315253 as cited in SEQ ID NO 52508
  misc_feature (1)..(705): Ortholog of  Ceres SEQ ID NO 12627566 as cited in SEQ ID NO 62753

SEQ ID NO: 93393 - protein, 173 aa, Arabidopsis thaliana; identical to SEQ ID NO: 89637
  peptide (1)..(173): Ceres Seq. ID no. 12719817

SEQ ID NO: 93394 - protein, 148 aa, Arabidopsis thaliana; identical to SEQ ID NO: 89638
  peptide (1)..(148): Ceres Seq. ID no. 12719818

SEQ ID NO: 93395 - protein, 142 aa, Arabidopsis thaliana; identical to SEQ ID NO: 89639
  peptide (1)..(142): Ceres Seq. ID no. 12719819

SEQ ID NO: 93396 - DNA, 853 bp, Arabidopsis thaliana; identical to SEQ ID NO: 89640
  misc_feature (1)..(853): Ceres Seq. ID no. 12719820
  misc_feature (1)..(853): Ortholog of  Ceres SEQ ID NO 13596601 as cited in SEQ ID NO 62486

SEQ ID NO: 93397 - protein, 222 aa, Arabidopsis thaliana; identical to SEQ ID NO: 74452
  peptide (1)..(222): Ceres Seq. ID no. 12719821

SEQ ID NO: 93398 - DNA, 900 bp, Arabidopsis thaliana; identical to SEQ ID NO: 89642
  misc_feature (1)..(900): Ceres Seq. ID no. 12719830
  misc_feature (1)..(900): Ortholog of  Ceres SEQ ID NO 14307776 as cited in SEQ ID NO 59397

SEQ ID NO: 93399 - protein, 251 aa, Arabidopsis thaliana; identical to SEQ ID NO: 89643
  peptide (1)..(251): Ceres Seq. ID no. 12719831

SEQ ID NO: 93400 - DNA, 1469 bp, Arabidopsis thaliana; identical to SEQ ID NO: 89644
  misc_feature (1)..(1469): Ceres Seq. ID no. 12719838
  misc_feature (1)..(1469): Ortholog of  Ceres SEQ ID NO 14310740 as cited in SEQ ID NO 53755
  misc_feature (1)..(1469): Ortholog of  Ceres SEQ ID NO 13596202 as cited in SEQ ID NO 68492

SEQ ID NO: 93401 - protein, 431 aa, Arabidopsis thaliana; identical to SEQ ID NO: 89645
  peptide (1)..(431): Ceres Seq. ID no. 12719839

SEQ ID NO: 93402 - protein, 402 aa, Arabidopsis thaliana; identical to SEQ ID NO: 78261
  peptide (1)..(402): Ceres Seq. ID no. 12719840

SEQ ID NO: 93403 - protein, 325 aa, Arabidopsis thaliana; identical to SEQ ID NO: 78262
  peptide (1)..(325): Ceres Seq. ID no. 12719841

SEQ ID NO: 93404 - DNA, 1686 bp, Arabidopsis thaliana; identical to SEQ ID NO: 89648
  misc_feature (1)..(1686): Ceres Seq. ID no. 12719842
  misc_feature (1)..(1686): Ortholog of  Ceres SEQ ID NO 15177858 as cited in SEQ ID NO 51624
  misc_feature (1)..(1686): Ortholog of  Ceres SEQ ID NO 15171249 as cited in SEQ ID NO 52276
  misc_feature (1)..(1686): Ortholog of  Ceres SEQ ID NO 13594189 as cited in SEQ ID NO 58890

SEQ ID NO: 93405 - protein, 482 aa, Arabidopsis thaliana; identical to SEQ ID NO: 89649
  peptide (1)..(482): Ceres Seq. ID no. 12719843

SEQ ID NO: 93406 - protein, 438 aa, Arabidopsis thaliana; identical to SEQ ID NO: 76506
  peptide (1)..(438): Ceres Seq. ID no. 12719844

SEQ ID NO: 93407 - protein, 408 aa, Arabidopsis thaliana; identical to SEQ ID NO: 76507
  peptide (1)..(408): Ceres Seq. ID no. 12719845

SEQ ID NO: 93408 - DNA, 1632 bp, Arabidopsis thaliana; identical to SEQ ID NO: 89652
  misc_feature (1)..(1632): Ceres Seq. ID no. 12719846
  misc_feature (1)..(1632): Ortholog of  Ceres SEQ ID NO 15177858 as cited in SEQ ID NO 51624
  misc_feature (1)..(1632): Ortholog of  Ceres SEQ ID NO 15171249 as cited in SEQ ID NO 52276
  misc_feature (1)..(1632): Ortholog of  Ceres SEQ ID NO 13594189 as cited in SEQ ID NO 58890

SEQ ID NO: 93409 - protein, 477 aa, Arabidopsis thaliana; identical to SEQ ID NO: 89653
  peptide (1)..(477): Ceres Seq. ID no. 12719847

SEQ ID NO: 93410 - protein, 438 aa, Arabidopsis thaliana; identical to SEQ ID NO: 76506
  peptide (1)..(438): Ceres Seq. ID no. 12719848

SEQ ID NO: 93411 - protein, 408 aa, Arabidopsis thaliana; identical to SEQ ID NO: 76507
  peptide (1)..(408): Ceres Seq. ID no. 12719849

SEQ ID NO: 93412 - DNA, 1116 bp, Arabidopsis thaliana; identical to SEQ ID NO: 89656
  misc_feature (1)..(1116): Ceres Seq. ID no. 12719850
  misc_feature (1)..(1116): Ortholog of  Ceres SEQ ID NO 13599585 as cited in SEQ ID NO 988
  misc_feature (1)..(1116): Ortholog of  Ceres SEQ ID NO 13594624 as cited in SEQ ID NO 55765
  misc_feature (1)..(1116): Ortholog of  Ceres SEQ ID NO 15177682 as cited in SEQ ID NO 0

SEQ ID NO: 93413 - protein, 258 aa, Arabidopsis thaliana; identical to SEQ ID NO: 71157
  peptide (1)..(258): Ceres Seq. ID no. 12719851

SEQ ID NO: 93414 - protein, 254 aa, Arabidopsis thaliana; identical to SEQ ID NO: 71158
  peptide (1)..(254): Ceres Seq. ID no. 12719852

SEQ ID NO: 93415 - DNA, 1812 bp, Arabidopsis thaliana; identical to SEQ ID NO: 89659
  misc_feature (1)..(1812): Ceres Seq. ID no. 12719864
  misc_feature (1)..(1812): Ortholog of  Ceres SEQ ID NO 13598582 as cited in SEQ ID NO 65294
  misc_feature (1)..(1812): Ortholog of  Ceres SEQ ID NO 15176145 as cited in SEQ ID NO 0

SEQ ID NO: 93416 - protein, 431 aa, Arabidopsis thaliana; identical to SEQ ID NO: 26118
  peptide (1)..(431): Ceres Seq. ID no. 12719865

SEQ ID NO: 93417 - protein, 429 aa, Arabidopsis thaliana; identical to SEQ ID NO: 26119
  peptide (1)..(429): Ceres Seq. ID no. 12719866

SEQ ID NO: 93418 - protein, 394 aa, Arabidopsis thaliana; identical to SEQ ID NO: 26120
  peptide (1)..(394): Ceres Seq. ID no. 12719867

SEQ ID NO: 93419 - DNA, 942 bp, Arabidopsis thaliana; identical to SEQ ID NO: 89663
  misc_feature (1)..(942): Ceres Seq. ID no. 12719872
  misc_feature (1)..(942): Ortholog of  Ceres SEQ ID NO 13594809 as cited in SEQ ID NO 51847
  misc_feature (1)..(942): Ortholog of  Ceres SEQ ID NO 14309033 as cited in SEQ ID NO 0

SEQ ID NO: 93420 - protein, 212 aa, Arabidopsis thaliana; identical to SEQ ID NO: 25892
  peptide (1)..(212): Ceres Seq. ID no. 12719873

SEQ ID NO: 93421 - protein, 191 aa, Arabidopsis thaliana; identical to SEQ ID NO: 25893
  peptide (1)..(191): Ceres Seq. ID no. 12719874

SEQ ID NO: 93422 - protein, 184 aa, Arabidopsis thaliana; identical to SEQ ID NO: 25894
  peptide (1)..(184): Ceres Seq. ID no. 12719875

SEQ ID NO: 93423 - DNA, 680 bp, Arabidopsis thaliana; identical to SEQ ID NO: 89667
  misc_feature (1)..(680): Ceres Seq. ID no. 12719880
  misc_feature (1)..(680): Ortholog of  Ceres SEQ ID NO 13639243 as cited in SEQ ID NO 56820

SEQ ID NO: 93424 - protein, 95 aa, Arabidopsis thaliana; identical to SEQ ID NO: 89668
  peptide (1)..(95): Ceres Seq. ID no. 12719881

SEQ ID NO: 93425 - protein, 59 aa, Arabidopsis thaliana; identical to SEQ ID NO: 89669
  peptide (1)..(59): Ceres Seq. ID no. 12719882

SEQ ID NO: 93426 - DNA, 1077 bp, Arabidopsis thaliana; identical to SEQ ID NO: 89670
  misc_feature (1)..(1077): Ceres Seq. ID no. 12719900
  misc_feature (1)..(1077): Ortholog of  Ceres SEQ ID NO 13582332 as cited in SEQ ID NO 59890
  misc_feature (1)..(1077): Ortholog of  Ceres SEQ ID NO 13598278 as cited in SEQ ID NO 68456

SEQ ID NO: 93427 - protein, 358 aa, Arabidopsis thaliana; identical to SEQ ID NO: 89671
  peptide (1)..(358): Ceres Seq. ID no. 12719901

SEQ ID NO: 93428 - protein, 356 aa, Arabidopsis thaliana; identical to SEQ ID NO: 89672
  peptide (1)..(356): Ceres Seq. ID no. 12719902

SEQ ID NO: 93429 - protein, 334 aa, Arabidopsis thaliana; identical to SEQ ID NO: 89673
  peptide (1)..(334): Ceres Seq. ID no. 12719903

SEQ ID NO: 93430 - DNA, 1752 bp, Arabidopsis thaliana; identical to SEQ ID NO: 89674
  misc_feature (1)..(1752): Ceres Seq. ID no. 12719904
  misc_feature (1)..(1752): Ortholog of  Ceres SEQ ID NO 12586556 as cited in SEQ ID NO 64667
  misc_feature (1)..(1752): Ortholog of  Ceres SEQ ID NO 13660894 as cited in SEQ ID NO 67475

SEQ ID NO: 93431 - protein, 583 aa, Arabidopsis thaliana; identical to SEQ ID NO: 89675
  peptide (1)..(583): Ceres Seq. ID no. 12719905

SEQ ID NO: 93432 - protein, 486 aa, Arabidopsis thaliana; identical to SEQ ID NO: 89676
  peptide (1)..(486): Ceres Seq. ID no. 12719906

SEQ ID NO: 93433 - protein, 426 aa, Arabidopsis thaliana; identical to SEQ ID NO: 89677
  peptide (1)..(426): Ceres Seq. ID no. 12719907

SEQ ID NO: 93434 - DNA, 660 bp, Arabidopsis thaliana; identical to SEQ ID NO: 89678
  misc_feature (1)..(660): Ceres Seq. ID no. 12719936
  misc_feature (1)..(660): Ortholog of  Ceres SEQ ID NO 15175034 as cited in SEQ ID NO 62432
  misc_feature (1)..(660): Ortholog of  Ceres SEQ ID NO 12619999 as cited in SEQ ID NO 66123
  misc_feature (1)..(660): Ortholog of  Ceres SEQ ID NO 13656436 as cited in SEQ ID NO 69154

SEQ ID NO: 93435 - protein, 219 aa, Arabidopsis thaliana; identical to SEQ ID NO: 89679
  peptide (1)..(219): Ceres Seq. ID no. 12719937

SEQ ID NO: 93436 - DNA, 1969 bp, Arabidopsis thaliana; identical to SEQ ID NO: 89680
  misc_feature (1)..(1969): Ceres Seq. ID no. 12719938
  misc_feature (1)..(1969): Ortholog of  Ceres SEQ ID NO 13596601 as cited in SEQ ID NO 62486

SEQ ID NO: 93437 - protein, 302 aa, Arabidopsis thaliana; identical to SEQ ID NO: 89681
  peptide (1)..(302): Ceres Seq. ID no. 12719939

SEQ ID NO: 93438 - protein, 237 aa, Arabidopsis thaliana; identical to SEQ ID NO: 89682
  peptide (1)..(237): Ceres Seq. ID no. 12719940

SEQ ID NO: 93439 - DNA, 750 bp, Arabidopsis thaliana; identical to SEQ ID NO: 89683
  misc_feature (1)..(750): Ceres Seq. ID no. 12719941
  misc_feature (1)..(750): Ortholog of  Ceres SEQ ID NO 13592859 as cited in SEQ ID NO 20479

SEQ ID NO: 93440 - protein, 249 aa, Arabidopsis thaliana; identical to SEQ ID NO: 89684
  peptide (1)..(249): Ceres Seq. ID no. 12719942

SEQ ID NO: 93441 - protein, 138 aa, Arabidopsis thaliana; identical to SEQ ID NO: 89685
  peptide (1)..(138): Ceres Seq. ID no. 12719943

SEQ ID NO: 93442 - DNA, 1038 bp, Arabidopsis thaliana; identical to SEQ ID NO: 89686
  misc_feature (1)..(1038): Ceres Seq. ID no. 12719946
  misc_feature (1)..(1038): Ortholog of  Ceres SEQ ID NO 13502952 as cited in SEQ ID NO 62271
  misc_feature (1)..(1038): Ortholog of  Ceres SEQ ID NO 13502973 as cited in SEQ ID NO 68052
  misc_feature (1)..(1038): Ortholog of  Ceres SEQ ID NO 13596000 as cited in SEQ ID NO 68188

SEQ ID NO: 93443 - protein, 345 aa, Arabidopsis thaliana; identical to SEQ ID NO: 89687
  peptide (1)..(345): Ceres Seq. ID no. 12719947

SEQ ID NO: 93444 - protein, 341 aa, Arabidopsis thaliana; identical to SEQ ID NO: 89688
  peptide (1)..(341): Ceres Seq. ID no. 12719948

SEQ ID NO: 93445 - protein, 311 aa, Arabidopsis thaliana; identical to SEQ ID NO: 89689
  peptide (1)..(311): Ceres Seq. ID no. 12719949

SEQ ID NO: 93446 - DNA, 1509 bp, Arabidopsis thaliana; identical to SEQ ID NO: 89690
  misc_feature (1)..(1509): Ceres Seq. ID no. 12719957
  misc_feature (1)..(1509): Ortholog of  Ceres SEQ ID NO 13599900 as cited in SEQ ID NO 531
  misc_feature (1)..(1509): Ortholog of  Ceres SEQ ID NO 13596509 as cited in SEQ ID NO 62004
  misc_feature (1)..(1509): Ortholog of  Ceres SEQ ID NO 13659971 as cited in SEQ ID NO 67565
  misc_feature (1)..(1509): Ortholog of  Ceres SEQ ID NO 13500385 as cited in SEQ ID NO 67583

SEQ ID NO: 93447 - protein, 502 aa, Arabidopsis thaliana; identical to SEQ ID NO: 89691
  peptide (1)..(502): Ceres Seq. ID no. 12719958

SEQ ID NO: 93448 - protein, 483 aa, Arabidopsis thaliana; identical to SEQ ID NO: 89692
  peptide (1)..(483): Ceres Seq. ID no. 12719959

SEQ ID NO: 93449 - protein, 449 aa, Arabidopsis thaliana; identical to SEQ ID NO: 89693
  peptide (1)..(449): Ceres Seq. ID no. 12719960

SEQ ID NO: 93450 - DNA, 1003 bp, Arabidopsis thaliana; identical to SEQ ID NO: 89694
  misc_feature (1)..(1003): Ceres Seq. ID no. 12720005
  misc_feature (1)..(1003): Ortholog of  Ceres SEQ ID NO 13595072 as cited in SEQ ID NO 55971

SEQ ID NO: 93451 - protein, 266 aa, Arabidopsis thaliana; identical to SEQ ID NO: 89695
  peptide (1)..(266): Ceres Seq. ID no. 12720006

SEQ ID NO: 93452 - protein, 261 aa, Arabidopsis thaliana; identical to SEQ ID NO: 89696
  peptide (1)..(261): Ceres Seq. ID no. 12720007

SEQ ID NO: 93453 - protein, 232 aa, Arabidopsis thaliana; identical to SEQ ID NO: 89697
  peptide (1)..(232): Ceres Seq. ID no. 12720008

SEQ ID NO: 93454 - DNA, 1925 bp, Arabidopsis thaliana; identical to SEQ ID NO: 89698
  misc_feature (1)..(1925): Ceres Seq. ID no. 12720085
  misc_feature (1)..(1925): Ortholog of  Ceres SEQ ID NO 13596319 as cited in SEQ ID NO 67933

SEQ ID NO: 93455 - protein, 569 aa, Arabidopsis thaliana; identical to SEQ ID NO: 89699
  peptide (1)..(569): Ceres Seq. ID no. 12720086

SEQ ID NO: 93456 - protein, 506 aa, Arabidopsis thaliana; identical to SEQ ID NO: 89700
  peptide (1)..(506): Ceres Seq. ID no. 12720087

SEQ ID NO: 93457 - protein, 456 aa, Arabidopsis thaliana; identical to SEQ ID NO: 89701
  peptide (1)..(456): Ceres Seq. ID no. 12720088

SEQ ID NO: 93458 - DNA, 1802 bp, Arabidopsis thaliana; identical to SEQ ID NO: 89702
  misc_feature (1)..(1802): Ceres Seq. ID no. 12720123
  misc_feature (1)..(1802): Ortholog of  Ceres SEQ ID NO 14314220 as cited in SEQ ID NO 57321

SEQ ID NO: 93459 - protein, 484 aa, Arabidopsis thaliana; identical to SEQ ID NO: 89703
  peptide (1)..(484): Ceres Seq. ID no. 12720124

SEQ ID NO: 93460 - protein, 255 aa, Arabidopsis thaliana; identical to SEQ ID NO: 89704
  peptide (1)..(255): Ceres Seq. ID no. 12720125

SEQ ID NO: 93461 - DNA, 858 bp, Arabidopsis thaliana; identical to SEQ ID NO: 89705
  misc_feature (1)..(858): Ceres Seq. ID no. 12720130
  misc_feature (1)..(858): Ortholog of  Ceres SEQ ID NO 13584646 as cited in SEQ ID NO 60715

SEQ ID NO: 93462 - protein, 285 aa, Arabidopsis thaliana; identical to SEQ ID NO: 89706
  peptide (1)..(285): Ceres Seq. ID no. 12720131

SEQ ID NO: 93463 - protein, 209 aa, Arabidopsis thaliana; identical to SEQ ID NO: 89707
  peptide (1)..(209): Ceres Seq. ID no. 12720132

SEQ ID NO: 93464 - DNA, 585 bp, Arabidopsis thaliana; identical to SEQ ID NO: 89708
  misc_feature (1)..(585): Ceres Seq. ID no. 12720172
  misc_feature (1)..(585): Ortholog of  Ceres SEQ ID NO 14304408 as cited in SEQ ID NO 58051
  misc_feature (1)..(585): Ortholog of  Ceres SEQ ID NO 13661769 as cited in SEQ ID NO 61435

SEQ ID NO: 93465 - protein, 194 aa, Arabidopsis thaliana; identical to SEQ ID NO: 89709
  peptide (1)..(194): Ceres Seq. ID no. 12720173

SEQ ID NO: 93466 - protein, 145 aa, Arabidopsis thaliana; identical to SEQ ID NO: 89710
  peptide (1)..(145): Ceres Seq. ID no. 12720174

SEQ ID NO: 93467 - protein, 116 aa, Arabidopsis thaliana; identical to SEQ ID NO: 89711
  peptide (1)..(116): Ceres Seq. ID no. 12720175

SEQ ID NO: 93468 - DNA, 1344 bp, Arabidopsis thaliana; identical to SEQ ID NO: 89712
  misc_feature (1)..(1344): Ceres Seq. ID no. 12720190
  misc_feature (1)..(1344): Ortholog of  Ceres SEQ ID NO 13594349 as cited in SEQ ID NO 58161
  misc_feature (1)..(1344): Ortholog of  Ceres SEQ ID NO 13663419 as cited in SEQ ID NO 66561

SEQ ID NO: 93469 - protein, 447 aa, Arabidopsis thaliana; identical to SEQ ID NO: 89713
  peptide (1)..(447): Ceres Seq. ID no. 12720191

SEQ ID NO: 93470 - protein, 429 aa, Arabidopsis thaliana; identical to SEQ ID NO: 89714
  peptide (1)..(429): Ceres Seq. ID no. 12720192

SEQ ID NO: 93471 - protein, 245 aa, Arabidopsis thaliana; identical to SEQ ID NO: 89715
  peptide (1)..(245): Ceres Seq. ID no. 12720193

SEQ ID NO: 93472 - DNA, 636 bp, Arabidopsis thaliana; identical to SEQ ID NO: 89716
  misc_feature (1)..(636): Ceres Seq. ID no. 12720202
  misc_feature (1)..(636): Ortholog of  Ceres SEQ ID NO 13639250 as cited in SEQ ID NO 56555
  misc_feature (1)..(636): Ortholog of  Ceres SEQ ID NO 15177034 as cited in SEQ ID NO 60024
  misc_feature (1)..(636): Ortholog of  Ceres SEQ ID NO 13598257 as cited in SEQ ID NO 63008
  misc_feature (1)..(636): Ortholog of  Ceres SEQ ID NO 13597309 as cited in SEQ ID NO 63851
  misc_feature (1)..(636): Ortholog of  Ceres SEQ ID NO 12599167 as cited in SEQ ID NO 64443

SEQ ID NO: 93473 - protein, 211 aa, Arabidopsis thaliana; identical to SEQ ID NO: 89717
  peptide (1)..(211): Ceres Seq. ID no. 12720203

SEQ ID NO: 93474 - protein, 177 aa, Arabidopsis thaliana; identical to SEQ ID NO: 89718
  peptide (1)..(177): Ceres Seq. ID no. 12720204

SEQ ID NO: 93475 - DNA, 1035 bp, Arabidopsis thaliana; identical to SEQ ID NO: 89719
  misc_feature (1)..(1035): Ceres Seq. ID no. 12720209
  misc_feature (1)..(1035): Ortholog of  Ceres SEQ ID NO 13597380 as cited in SEQ ID NO 64054
  misc_feature (1)..(1035): Ortholog of  Ceres SEQ ID NO 12625474 as cited in SEQ ID NO 64169
  misc_feature (1)..(1035): Ortholog of  Ceres SEQ ID NO 13597502 as cited in SEQ ID NO 64681

SEQ ID NO: 93476 - protein, 344 aa, Arabidopsis thaliana; identical to SEQ ID NO: 89720
  peptide (1)..(344): Ceres Seq. ID no. 12720210

SEQ ID NO: 93477 - protein, 340 aa, Arabidopsis thaliana; identical to SEQ ID NO: 89721
  peptide (1)..(340): Ceres Seq. ID no. 12720211

SEQ ID NO: 93478 - protein, 336 aa, Arabidopsis thaliana; identical to SEQ ID NO: 89722
  peptide (1)..(336): Ceres Seq. ID no. 12720212

SEQ ID NO: 93479 - DNA, 3769 bp, Arabidopsis thaliana; identical to SEQ ID NO: 89723
  misc_feature (1)..(3769): Ceres Seq. ID no. 12720213
  misc_feature (1)..(3769): Ortholog of  Ceres SEQ ID NO 13593889 as cited in SEQ ID NO 53305
  misc_feature (1)..(3769): Ortholog of  Ceres SEQ ID NO 13581959 as cited in SEQ ID NO 56156

SEQ ID NO: 93480 - protein, 1030 aa, Arabidopsis thaliana; identical to SEQ ID NO: 89724
  peptide (1)..(1030): Ceres Seq. ID no. 12720214

SEQ ID NO: 93481 - protein, 1002 aa, Arabidopsis thaliana; identical to SEQ ID NO: 88587
  peptide (1)..(1002): Ceres Seq. ID no. 12720215

SEQ ID NO: 93482 - protein, 1000 aa, Arabidopsis thaliana; identical to SEQ ID NO: 88588
  peptide (1)..(1000): Ceres Seq. ID no. 12720216

SEQ ID NO: 93483 - DNA, 1525 bp, Arabidopsis thaliana; identical to SEQ ID NO: 89727
  misc_feature (1)..(1525): Ceres Seq. ID no. 12720236
  misc_feature (1)..(1525): Ortholog of  Ceres SEQ ID NO 15171406 as cited in SEQ ID NO 51661

SEQ ID NO: 93484 - protein, 452 aa, Arabidopsis thaliana; identical to SEQ ID NO: 89728
  peptide (1)..(452): Ceres Seq. ID no. 12720237

SEQ ID NO: 93485 - protein, 336 aa, Arabidopsis thaliana; identical to SEQ ID NO: 89729
  peptide (1)..(336): Ceres Seq. ID no. 12720238

SEQ ID NO: 93486 - protein, 273 aa, Arabidopsis thaliana; identical to SEQ ID NO: 89730
  peptide (1)..(273): Ceres Seq. ID no. 12720239

SEQ ID NO: 93487 - DNA, 1260 bp, Arabidopsis thaliana; identical to SEQ ID NO: 89731
  misc_feature (1)..(1260): Ceres Seq. ID no. 12720240
  misc_feature (1)..(1260): Ortholog of  Ceres SEQ ID NO 14315193 as cited in SEQ ID NO 57743

SEQ ID NO: 93488 - protein, 382 aa, Arabidopsis thaliana; identical to SEQ ID NO: 89732
  peptide (1)..(382): Ceres Seq. ID no. 12720241

SEQ ID NO: 93489 - protein, 367 aa, Arabidopsis thaliana; identical to SEQ ID NO: 89733
  peptide (1)..(367): Ceres Seq. ID no. 12720242

SEQ ID NO: 93490 - protein, 349 aa, Arabidopsis thaliana; identical to SEQ ID NO: 89734
  peptide (1)..(349): Ceres Seq. ID no. 12720243

SEQ ID NO: 93491 - DNA, 3093 bp, Arabidopsis thaliana; identical to SEQ ID NO: 89735
  misc_feature (1)..(3093): Ceres Seq. ID no. 12720262
  misc_feature (1)..(3093): Ortholog of  Ceres SEQ ID NO 13600310 as cited in SEQ ID NO 5086

SEQ ID NO: 93492 - protein, 1030 aa, Arabidopsis thaliana; identical to SEQ ID NO: 89736
  peptide (1)..(1030): Ceres Seq. ID no. 12720263

SEQ ID NO: 93493 - protein, 1027 aa, Arabidopsis thaliana; identical to SEQ ID NO: 89737
  peptide (1)..(1027): Ceres Seq. ID no. 12720264

SEQ ID NO: 93494 - protein, 947 aa, Arabidopsis thaliana; identical to SEQ ID NO: 89738
  peptide (1)..(947): Ceres Seq. ID no. 12720265

SEQ ID NO: 93495 - DNA, 1635 bp, Arabidopsis thaliana; identical to SEQ ID NO: 89739
  misc_feature (1)..(1635): Ceres Seq. ID no. 12720272
  misc_feature (1)..(1635): Ortholog of  Ceres SEQ ID NO 13597574 as cited in SEQ ID NO 64677
  misc_feature (1)..(1635): Ortholog of  Ceres SEQ ID NO 13597843 as cited in SEQ ID NO 64850
  misc_feature (1)..(1635): Ortholog of  Ceres SEQ ID NO 12617417 as cited in SEQ ID NO 65089
  misc_feature (1)..(1635): Ortholog of  Ceres SEQ ID NO 13597678 as cited in SEQ ID NO 65375
  misc_feature (1)..(1635): Ortholog of  Ceres SEQ ID NO 12779098 as cited in SEQ ID NO 67698
  misc_feature (1)..(1635): Ortholog of  Ceres SEQ ID NO 13596180 as cited in SEQ ID NO 67941
  misc_feature (1)..(1635): Ortholog of  Ceres SEQ ID NO 13591190 as cited in SEQ ID NO 68044
  misc_feature (1)..(1635): Ortholog of  Ceres SEQ ID NO 13595961 as cited in SEQ ID NO 68223

SEQ ID NO: 93496 - protein, 489 aa, Arabidopsis thaliana; identical to SEQ ID NO: 89740
  peptide (1)..(489): Ceres Seq. ID no. 12720273

SEQ ID NO: 93497 - protein, 473 aa, Arabidopsis thaliana; identical to SEQ ID NO: 89741
  peptide (1)..(473): Ceres Seq. ID no. 12720274

SEQ ID NO: 93498 - protein, 448 aa, Arabidopsis thaliana; identical to SEQ ID NO: 89742
  peptide (1)..(448): Ceres Seq. ID no. 12720275

SEQ ID NO: 93499 - DNA, 1581 bp, Arabidopsis thaliana; identical to SEQ ID NO: 89743
  misc_feature (1)..(1581): Ceres Seq. ID no. 12720281
  misc_feature (1)..(1581): Ortholog of  Ceres SEQ ID NO 12583190 as cited in SEQ ID NO 56386

SEQ ID NO: 93500 - protein, 526 aa, Arabidopsis thaliana; identical to SEQ ID NO: 89744
  peptide (1)..(526): Ceres Seq. ID no. 12720282

SEQ ID NO: 93501 - protein, 521 aa, Arabidopsis thaliana; identical to SEQ ID NO: 89745
  peptide (1)..(521): Ceres Seq. ID no. 12720283

SEQ ID NO: 93502 - protein, 515 aa, Arabidopsis thaliana; identical to SEQ ID NO: 89746
  peptide (1)..(515): Ceres Seq. ID no. 12720284

SEQ ID NO: 93503 - DNA, 1305 bp, Arabidopsis thaliana; identical to SEQ ID NO: 89747
  misc_feature (1)..(1305): Ceres Seq. ID no. 12720301
  misc_feature (1)..(1305): Ortholog of  Ceres SEQ ID NO 14303471 as cited in SEQ ID NO 59423

SEQ ID NO: 93504 - protein, 295 aa, Arabidopsis thaliana; identical to SEQ ID NO: 89748
  peptide (1)..(295): Ceres Seq. ID no. 12720302

SEQ ID NO: 93505 - protein, 281 aa, Arabidopsis thaliana; identical to SEQ ID NO: 89749
  peptide (1)..(281): Ceres Seq. ID no. 12720303

SEQ ID NO: 93506 - protein, 260 aa, Arabidopsis thaliana; identical to SEQ ID NO: 89750
  peptide (1)..(260): Ceres Seq. ID no. 12720304

SEQ ID NO: 93507 - DNA, 1114 bp, Arabidopsis thaliana; identical to SEQ ID NO: 89751
  misc_feature (1)..(1114): Ceres Seq. ID no. 12720313
  misc_feature (1)..(1114): Ortholog of  Ceres SEQ ID NO 15172958 as cited in SEQ ID NO 51206
  misc_feature (1)..(1114): Ortholog of  Ceres SEQ ID NO 15171139 as cited in SEQ ID NO 60093
  misc_feature (1)..(1114): Ortholog of  Ceres SEQ ID NO 12634262 as cited in SEQ ID NO 0

SEQ ID NO: 93508 - protein, 330 aa, Arabidopsis thaliana; identical to SEQ ID NO: 89752
  peptide (1)..(330): Ceres Seq. ID no. 12720314

SEQ ID NO: 93509 - protein, 323 aa, Arabidopsis thaliana; identical to SEQ ID NO: 89753
  peptide (1)..(323): Ceres Seq. ID no. 12720315

SEQ ID NO: 93510 - protein, 226 aa, Arabidopsis thaliana; identical to SEQ ID NO: 89754
  peptide (1)..(226): Ceres Seq. ID no. 12720316

SEQ ID NO: 93511 - DNA, 2104 bp, Arabidopsis thaliana; identical to SEQ ID NO: 89755
  misc_feature (1)..(2104): Ceres Seq. ID no. 12720327
  misc_feature (1)..(2104): Ortholog of  Ceres SEQ ID NO 13593889 as cited in SEQ ID NO 53305
  misc_feature (1)..(2104): Ortholog of  Ceres SEQ ID NO 13581959 as cited in SEQ ID NO 56156

SEQ ID NO: 93512 - protein, 546 aa, Arabidopsis thaliana; identical to SEQ ID NO: 89756
  peptide (1)..(546): Ceres Seq. ID no. 12720328

SEQ ID NO: 93513 - protein, 518 aa, Arabidopsis thaliana; identical to SEQ ID NO: 89757
  peptide (1)..(518): Ceres Seq. ID no. 12720329

SEQ ID NO: 93514 - protein, 375 aa, Arabidopsis thaliana; identical to SEQ ID NO: 89758
  peptide (1)..(375): Ceres Seq. ID no. 12720330

SEQ ID NO: 93515 - DNA, 1098 bp, Arabidopsis thaliana; identical to SEQ ID NO: 89759
  misc_feature (1)..(1098): Ceres Seq. ID no. 12720381
  misc_feature (1)..(1098): Ortholog of  Ceres SEQ ID NO 13582619 as cited in SEQ ID NO 56520
  misc_feature (1)..(1098): Ortholog of  Ceres SEQ ID NO 14315846 as cited in SEQ ID NO 58094
  misc_feature (1)..(1098): Ortholog of  Ceres SEQ ID NO 13660872 as cited in SEQ ID NO 60830
  misc_feature (1)..(1098): Ortholog of  Ceres SEQ ID NO 15226831 as cited in SEQ ID NO 62916
  misc_feature (1)..(1098): Ortholog of  Ceres SEQ ID NO 12616221 as cited in SEQ ID NO 63291

SEQ ID NO: 93516 - protein, 365 aa, Arabidopsis thaliana; identical to SEQ ID NO: 89760
  peptide (1)..(365): Ceres Seq. ID no. 12720382

SEQ ID NO: 93517 - protein, 362 aa, Arabidopsis thaliana; identical to SEQ ID NO: 89761
  peptide (1)..(362): Ceres Seq. ID no. 12720383

SEQ ID NO: 93518 - protein, 277 aa, Arabidopsis thaliana; identical to SEQ ID NO: 89762
  peptide (1)..(277): Ceres Seq. ID no. 12720384

SEQ ID NO: 93519 - DNA, 1014 bp, Arabidopsis thaliana; identical to SEQ ID NO: 89763
  misc_feature (1)..(1014): Ceres Seq. ID no. 12720392
  misc_feature (1)..(1014): Ortholog of  Ceres SEQ ID NO 13594727 as cited in SEQ ID NO 52169
  misc_feature (1)..(1014): Ortholog of  Ceres SEQ ID NO 13596474 as cited in SEQ ID NO 62169
  misc_feature (1)..(1014): Ortholog of  Ceres SEQ ID NO 13598714 as cited in SEQ ID NO 62656
  misc_feature (1)..(1014): Ortholog of  Ceres SEQ ID NO 13596969 as cited in SEQ ID NO 63375
  misc_feature (1)..(1014): Ortholog of  Ceres SEQ ID NO 13597519 as cited in SEQ ID NO 64759
  misc_feature (1)..(1014): Ortholog of  Ceres SEQ ID NO 14302388 as cited in SEQ ID NO 65655
  misc_feature (1)..(1014): Ortholog of  Ceres SEQ ID NO 15170183 as cited in SEQ ID NO 65667
  misc_feature (1)..(1014): Ortholog of  Ceres SEQ ID NO 13587054 as cited in SEQ ID NO 0

SEQ ID NO: 93520 - protein, 337 aa, Arabidopsis thaliana; identical to SEQ ID NO: 89764
  peptide (1)..(337): Ceres Seq. ID no. 12720393

SEQ ID NO: 93521 - protein, 273 aa, Arabidopsis thaliana; identical to SEQ ID NO: 89765
  peptide (1)..(273): Ceres Seq. ID no. 12720394

SEQ ID NO: 93522 - protein, 268 aa, Arabidopsis thaliana; identical to SEQ ID NO: 89766
  peptide (1)..(268): Ceres Seq. ID no. 12720395

SEQ ID NO: 93523 - DNA, 531 bp, Arabidopsis thaliana; identical to SEQ ID NO: 89767
  misc_feature (1)..(531): Ceres Seq. ID no. 12720402
  misc_feature (1)..(531): Ortholog of  Ceres SEQ ID NO 13594090 as cited in SEQ ID NO 51093

SEQ ID NO: 93524 - protein, 176 aa, Arabidopsis thaliana; identical to SEQ ID NO: 89768
  peptide (1)..(176): Ceres Seq. ID no. 12720403

SEQ ID NO: 93525 - protein, 168 aa, Arabidopsis thaliana; identical to SEQ ID NO: 89769
  peptide (1)..(168): Ceres Seq. ID no. 12720404

SEQ ID NO: 93526 - protein, 144 aa, Arabidopsis thaliana; identical to SEQ ID NO: 89770
  peptide (1)..(144): Ceres Seq. ID no. 12720405

SEQ ID NO: 93527 - DNA, 624 bp, Arabidopsis thaliana; identical to SEQ ID NO: 89771
  misc_feature (1)..(624): Ceres Seq. ID no. 12720414
  misc_feature (1)..(624): Ortholog of  Ceres SEQ ID NO 13587149 as cited in SEQ ID NO 0

SEQ ID NO: 93528 - protein, 207 aa, Arabidopsis thaliana; identical to SEQ ID NO: 89772
  peptide (1)..(207): Ceres Seq. ID no. 12720415

SEQ ID NO: 93529 - protein, 197 aa, Arabidopsis thaliana; identical to SEQ ID NO: 89773
  peptide (1)..(197): Ceres Seq. ID no. 12720416

SEQ ID NO: 93530 - protein, 133 aa, Arabidopsis thaliana; identical to SEQ ID NO: 89774
  peptide (1)..(133): Ceres Seq. ID no. 12720417

SEQ ID NO: 93531 - DNA, 663 bp, Arabidopsis thaliana; identical to SEQ ID NO: 89775
  misc_feature (1)..(663): Ceres Seq. ID no. 12720425
  misc_feature (1)..(663): Ortholog of  Ceres SEQ ID NO 13661617 as cited in SEQ ID NO 61132

SEQ ID NO: 93532 - protein, 220 aa, Arabidopsis thaliana; identical to SEQ ID NO: 89776
  peptide (1)..(220): Ceres Seq. ID no. 12720426

SEQ ID NO: 93533 - protein, 149 aa, Arabidopsis thaliana; identical to SEQ ID NO: 89777
  peptide (1)..(149): Ceres Seq. ID no. 12720427

SEQ ID NO: 93534 - DNA, 1335 bp, Arabidopsis thaliana; identical to SEQ ID NO: 89778
  misc_feature (1)..(1335): Ceres Seq. ID no. 12720428
  misc_feature (1)..(1335): Ortholog of  Ceres SEQ ID NO 13646595 as cited in SEQ ID NO 20561
  misc_feature (1)..(1335): Ortholog of  Ceres SEQ ID NO 13594345 as cited in SEQ ID NO 58043
  misc_feature (1)..(1335): Ortholog of  Ceres SEQ ID NO 15171614 as cited in SEQ ID NO 60106
  misc_feature (1)..(1335): Ortholog of  Ceres SEQ ID NO 13597574 as cited in SEQ ID NO 64677
  misc_feature (1)..(1335): Ortholog of  Ceres SEQ ID NO 13597843 as cited in SEQ ID NO 64850
  misc_feature (1)..(1335): Ortholog of  Ceres SEQ ID NO 13597678 as cited in SEQ ID NO 65375
  misc_feature (1)..(1335): Ortholog of  Ceres SEQ ID NO 12779098 as cited in SEQ ID NO 67698
  misc_feature (1)..(1335): Ortholog of  Ceres SEQ ID NO 13596180 as cited in SEQ ID NO 67941
  misc_feature (1)..(1335): Ortholog of  Ceres SEQ ID NO 13591190 as cited in SEQ ID NO 68044
  misc_feature (1)..(1335): Ortholog of  Ceres SEQ ID NO 13595961 as cited in SEQ ID NO 68223

SEQ ID NO: 93535 - protein, 444 aa, Arabidopsis thaliana; identical to SEQ ID NO: 89779
  peptide (1)..(444): Ceres Seq. ID no. 12720429

SEQ ID NO: 93536 - protein, 380 aa, Arabidopsis thaliana; identical to SEQ ID NO: 89780
  peptide (1)..(380): Ceres Seq. ID no. 12720430

SEQ ID NO: 93537 - protein, 377 aa, Arabidopsis thaliana; identical to SEQ ID NO: 89781
  peptide (1)..(377): Ceres Seq. ID no. 12720431

SEQ ID NO: 93538 - DNA, 918 bp, Arabidopsis thaliana; identical to SEQ ID NO: 89782
  misc_feature (1)..(918): Ceres Seq. ID no. 12720464
  misc_feature (1)..(918): Ortholog of  Ceres SEQ ID NO 14307355 as cited in SEQ ID NO 54610
  misc_feature (1)..(918): Ortholog of  Ceres SEQ ID NO 13594298 as cited in SEQ ID NO 57803
  misc_feature (1)..(918): Ortholog of  Ceres SEQ ID NO 14301894 as cited in SEQ ID NO 61677
  misc_feature (1)..(918): Ortholog of  Ceres SEQ ID NO 13503476 as cited in SEQ ID NO 61978
  misc_feature (1)..(918): Ortholog of  Ceres SEQ ID NO 12578438 as cited in SEQ ID NO 62201
  misc_feature (1)..(918): Ortholog of  Ceres SEQ ID NO 12617675 as cited in SEQ ID NO 64656

SEQ ID NO: 93539 - protein, 305 aa, Arabidopsis thaliana; identical to SEQ ID NO: 89783
  peptide (1)..(305): Ceres Seq. ID no. 12720465

SEQ ID NO: 93540 - protein, 297 aa, Arabidopsis thaliana; identical to SEQ ID NO: 89784
  peptide (1)..(297): Ceres Seq. ID no. 12720466

SEQ ID NO: 93541 - protein, 231 aa, Arabidopsis thaliana; identical to SEQ ID NO: 89785
  peptide (1)..(231): Ceres Seq. ID no. 12720467

SEQ ID NO: 93542 - DNA, 1319 bp, Arabidopsis thaliana; identical to SEQ ID NO: 89786
  misc_feature (1)..(1319): Ceres Seq. ID no. 12720490
  misc_feature (1)..(1319): Ortholog of  Ceres SEQ ID NO 13596581 as cited in SEQ ID NO 62420
  misc_feature (1)..(1319): Ortholog of  Ceres SEQ ID NO 13591273 as cited in SEQ ID NO 65904
  misc_feature (1)..(1319): Ortholog of  Ceres SEQ ID NO 13623086 as cited in SEQ ID NO 0

SEQ ID NO: 93543 - protein, 395 aa, Arabidopsis thaliana; identical to SEQ ID NO: 89787
  peptide (1)..(395): Ceres Seq. ID no. 12720491

SEQ ID NO: 93544 - protein, 380 aa, Arabidopsis thaliana; identical to SEQ ID NO: 89788
  peptide (1)..(380): Ceres Seq. ID no. 12720492

SEQ ID NO: 93545 - protein, 357 aa, Arabidopsis thaliana; identical to SEQ ID NO: 89789
  peptide (1)..(357): Ceres Seq. ID no. 12720493

SEQ ID NO: 93546 - DNA, 1509 bp, Arabidopsis thaliana; identical to SEQ ID NO: 89790
  misc_feature (1)..(1509): Ceres Seq. ID no. 12720502
  misc_feature (1)..(1509): Ortholog of  Ceres SEQ ID NO 13660287 as cited in SEQ ID NO 67316

SEQ ID NO: 93547 - protein, 502 aa, Arabidopsis thaliana; identical to SEQ ID NO: 89791
  peptide (1)..(502): Ceres Seq. ID no. 12720503

SEQ ID NO: 93548 - protein, 481 aa, Arabidopsis thaliana; identical to SEQ ID NO: 89792
  peptide (1)..(481): Ceres Seq. ID no. 12720504

SEQ ID NO: 93549 - protein, 476 aa, Arabidopsis thaliana; identical to SEQ ID NO: 89793
  peptide (1)..(476): Ceres Seq. ID no. 12720505

SEQ ID NO: 93550 - DNA, 1344 bp, Arabidopsis thaliana; identical to SEQ ID NO: 89794
  misc_feature (1)..(1344): Ceres Seq. ID no. 12720522
  misc_feature (1)..(1344): Ortholog of  Ceres SEQ ID NO 13582281 as cited in SEQ ID NO 51014
  misc_feature (1)..(1344): Ortholog of  Ceres SEQ ID NO 14315606 as cited in SEQ ID NO 53515
  misc_feature (1)..(1344): Ortholog of  Ceres SEQ ID NO 12617417 as cited in SEQ ID NO 65089

SEQ ID NO: 93551 - protein, 447 aa, Arabidopsis thaliana; identical to SEQ ID NO: 89795
  peptide (1)..(447): Ceres Seq. ID no. 12720523

SEQ ID NO: 93552 - protein, 439 aa, Arabidopsis thaliana; identical to SEQ ID NO: 89796
  peptide (1)..(439): Ceres Seq. ID no. 12720524

SEQ ID NO: 93553 - protein, 430 aa, Arabidopsis thaliana; identical to SEQ ID NO: 89797
  peptide (1)..(430): Ceres Seq. ID no. 12720525

SEQ ID NO: 93554 - DNA, 1536 bp, Arabidopsis thaliana; identical to SEQ ID NO: 89798
  misc_feature (1)..(1536): Ceres Seq. ID no. 12720530
  misc_feature (1)..(1536): Ortholog of  Ceres SEQ ID NO 15169627 as cited in SEQ ID NO 64517
  misc_feature (1)..(1536): Ortholog of  Ceres SEQ ID NO 14307952 as cited in SEQ ID NO 66029
  misc_feature (1)..(1536): Ortholog of  Ceres SEQ ID NO 12614124 as cited in SEQ ID NO 68392

SEQ ID NO: 93555 - protein, 511 aa, Arabidopsis thaliana; identical to SEQ ID NO: 89799
  peptide (1)..(511): Ceres Seq. ID no. 12720531

SEQ ID NO: 93556 - protein, 368 aa, Arabidopsis thaliana; identical to SEQ ID NO: 89800
  peptide (1)..(368): Ceres Seq. ID no. 12720532

SEQ ID NO: 93557 - protein, 331 aa, Arabidopsis thaliana; identical to SEQ ID NO: 89801
  peptide (1)..(331): Ceres Seq. ID no. 12720533

SEQ ID NO: 93558 - DNA, 780 bp, Arabidopsis thaliana; identical to SEQ ID NO: 89802
  misc_feature (1)..(780): Ceres Seq. ID no. 12720538
  misc_feature (1)..(780): Ortholog of  Ceres SEQ ID NO 15178295 as cited in SEQ ID NO 52699
  misc_feature (1)..(780): Ortholog of  Ceres SEQ ID NO 13597725 as cited in SEQ ID NO 64806

SEQ ID NO: 93559 - protein, 259 aa, Arabidopsis thaliana; identical to SEQ ID NO: 89803
  peptide (1)..(259): Ceres Seq. ID no. 12720539

SEQ ID NO: 93560 - protein, 162 aa, Arabidopsis thaliana; identical to SEQ ID NO: 89804
  peptide (1)..(162): Ceres Seq. ID no. 12720540

SEQ ID NO: 93561 - protein, 136 aa, Arabidopsis thaliana; identical to SEQ ID NO: 89805
  peptide (1)..(136): Ceres Seq. ID no. 12720541

SEQ ID NO: 93562 - DNA, 2013 bp, Arabidopsis thaliana; identical to SEQ ID NO: 89806
  misc_feature (1)..(2013): Ceres Seq. ID no. 12720611
  misc_feature (1)..(2013): Ortholog of  Ceres SEQ ID NO 15176302 as cited in SEQ ID NO 58592

SEQ ID NO: 93563 - protein, 567 aa, Arabidopsis thaliana; identical to SEQ ID NO: 89807
  peptide (1)..(567): Ceres Seq. ID no. 12720612

SEQ ID NO: 93564 - protein, 382 aa, Arabidopsis thaliana; identical to SEQ ID NO: 89808
  peptide (1)..(382): Ceres Seq. ID no. 12720613

SEQ ID NO: 93565 - protein, 292 aa, Arabidopsis thaliana; identical to SEQ ID NO: 89809
  peptide (1)..(292): Ceres Seq. ID no. 12720614

SEQ ID NO: 93566 - DNA, 2328 bp, Arabidopsis thaliana; identical to SEQ ID NO: 89810
  misc_feature (1)..(2328): Ceres Seq. ID no. 12720642
  misc_feature (1)..(2328): Ortholog of  Ceres SEQ ID NO 13657138 as cited in SEQ ID NO 65923
  misc_feature (1)..(2328): Ortholog of  Ceres SEQ ID NO 13584744 as cited in SEQ ID NO 69137

SEQ ID NO: 93567 - protein, 775 aa, Arabidopsis thaliana; identical to SEQ ID NO: 89811
  peptide (1)..(775): Ceres Seq. ID no. 12720643

SEQ ID NO: 93568 - protein, 690 aa, Arabidopsis thaliana; identical to SEQ ID NO: 89812
  peptide (1)..(690): Ceres Seq. ID no. 12720644

SEQ ID NO: 93569 - protein, 658 aa, Arabidopsis thaliana; identical to SEQ ID NO: 89813
  peptide (1)..(658): Ceres Seq. ID no. 12720645

SEQ ID NO: 93570 - DNA, 1911 bp, Arabidopsis thaliana; identical to SEQ ID NO: 89814
  misc_feature (1)..(1911): Ceres Seq. ID no. 12720656
  misc_feature (1)..(1911): Ortholog of  Ceres SEQ ID NO 13654989 as cited in SEQ ID NO 63117
  misc_feature (1)..(1911): Ortholog of  Ceres SEQ ID NO 13655640 as cited in SEQ ID NO 63844
  misc_feature (1)..(1911): Ortholog of  Ceres SEQ ID NO 13584744 as cited in SEQ ID NO 69137

SEQ ID NO: 93571 - protein, 418 aa, Arabidopsis thaliana; identical to SEQ ID NO: 89815
  peptide (1)..(418): Ceres Seq. ID no. 12720657

SEQ ID NO: 93572 - protein, 366 aa, Arabidopsis thaliana; identical to SEQ ID NO: 89816
  peptide (1)..(366): Ceres Seq. ID no. 12720658

SEQ ID NO: 93573 - protein, 330 aa, Arabidopsis thaliana; identical to SEQ ID NO: 89817
  peptide (1)..(330): Ceres Seq. ID no. 12720659

SEQ ID NO: 93574 - DNA, 618 bp, Arabidopsis thaliana; identical to SEQ ID NO: 89818
  misc_feature (1)..(618): Ceres Seq. ID no. 12720660
  misc_feature (1)..(618): Ortholog of  Ceres SEQ ID NO 12619999 as cited in SEQ ID NO 66123
  misc_feature (1)..(618): Ortholog of  Ceres SEQ ID NO 13656436 as cited in SEQ ID NO 69154

SEQ ID NO: 93575 - protein, 205 aa, Arabidopsis thaliana; identical to SEQ ID NO: 89819
  peptide (1)..(205): Ceres Seq. ID no. 12720661

SEQ ID NO: 93576 - protein, 152 aa, Arabidopsis thaliana; identical to SEQ ID NO: 89820
  peptide (1)..(152): Ceres Seq. ID no. 12720662

SEQ ID NO: 93577 - DNA, 1657 bp, Arabidopsis thaliana; identical to SEQ ID NO: 89821
  misc_feature (1)..(1657): Ceres Seq. ID no. 12720690
  misc_feature (1)..(1657): Ortholog of  Ceres SEQ ID NO 13599990 as cited in SEQ ID NO 0

SEQ ID NO: 93578 - protein, 496 aa, Arabidopsis thaliana; identical to SEQ ID NO: 89822
  peptide (1)..(496): Ceres Seq. ID no. 12720691

SEQ ID NO: 93579 - protein, 431 aa, Arabidopsis thaliana; identical to SEQ ID NO: 89823
  peptide (1)..(431): Ceres Seq. ID no. 12720692

SEQ ID NO: 93580 - protein, 426 aa, Arabidopsis thaliana; identical to SEQ ID NO: 89824
  peptide (1)..(426): Ceres Seq. ID no. 12720693

SEQ ID NO: 93581 - DNA, 4047 bp, Arabidopsis thaliana; identical to SEQ ID NO: 89825
  misc_feature (1)..(4047): Ceres Seq. ID no. 12720713
  misc_feature (1)..(4047): Ortholog of  Ceres SEQ ID NO 13600310 as cited in SEQ ID NO 5086

SEQ ID NO: 93582 - protein, 1348 aa, Arabidopsis thaliana; identical to SEQ ID NO: 89826
  peptide (1)..(1348): Ceres Seq. ID no. 12720714

SEQ ID NO: 93583 - protein, 1317 aa, Arabidopsis thaliana; identical to SEQ ID NO: 89827
  peptide (1)..(1317): Ceres Seq. ID no. 12720715

SEQ ID NO: 93584 - protein, 1260 aa, Arabidopsis thaliana; identical to SEQ ID NO: 89828
  peptide (1)..(1260): Ceres Seq. ID no. 12720716

SEQ ID NO: 93585 - DNA, 1748 bp, Arabidopsis thaliana; identical to SEQ ID NO: 89829
  misc_feature (1)..(1748): Ceres Seq. ID no. 12720754
  misc_feature (1)..(1748): Ortholog of  Ceres SEQ ID NO 13582619 as cited in SEQ ID NO 56520
  misc_feature (1)..(1748): Ortholog of  Ceres SEQ ID NO 12611392 as cited in SEQ ID NO 56826
  misc_feature (1)..(1748): Ortholog of  Ceres SEQ ID NO 13660872 as cited in SEQ ID NO 60830
  misc_feature (1)..(1748): Ortholog of  Ceres SEQ ID NO 12616221 as cited in SEQ ID NO 63291

SEQ ID NO: 93586 - protein, 238 aa, Arabidopsis thaliana; identical to SEQ ID NO: 89830
  peptide (1)..(238): Ceres Seq. ID no. 12720755

SEQ ID NO: 93587 - protein, 165 aa, Arabidopsis thaliana; identical to SEQ ID NO: 89831
  peptide (1)..(165): Ceres Seq. ID no. 12720756

SEQ ID NO: 93588 - protein, 138 aa, Arabidopsis thaliana; identical to SEQ ID NO: 89832
  peptide (1)..(138): Ceres Seq. ID no. 12720757

SEQ ID NO: 93589 - DNA, 2138 bp, Arabidopsis thaliana; identical to SEQ ID NO: 89833
  misc_feature (1)..(2138): Ceres Seq. ID no. 12720778
  misc_feature (1)..(2138): Ortholog of  Ceres SEQ ID NO 13659971 as cited in SEQ ID NO 67565
  misc_feature (1)..(2138): Ortholog of  Ceres SEQ ID NO 13500385 as cited in SEQ ID NO 67583

SEQ ID NO: 93590 - protein, 646 aa, Arabidopsis thaliana; identical to SEQ ID NO: 89834
  peptide (1)..(646): Ceres Seq. ID no. 12720779

SEQ ID NO: 93591 - protein, 624 aa, Arabidopsis thaliana; identical to SEQ ID NO: 89835
  peptide (1)..(624): Ceres Seq. ID no. 12720780

SEQ ID NO: 93592 - protein, 581 aa, Arabidopsis thaliana; identical to SEQ ID NO: 89836
  peptide (1)..(581): Ceres Seq. ID no. 12720781

SEQ ID NO: 93593 - DNA, 1686 bp, Arabidopsis thaliana; identical to SEQ ID NO: 89837
  misc_feature (1)..(1686): Ceres Seq. ID no. 12720785
  misc_feature (1)..(1686): Ortholog of  Ceres SEQ ID NO 13594037 as cited in SEQ ID NO 55666
  misc_feature (1)..(1686): Ortholog of  Ceres SEQ ID NO 13657707 as cited in SEQ ID NO 66407

SEQ ID NO: 93594 - protein, 561 aa, Arabidopsis thaliana; identical to SEQ ID NO: 89838
  peptide (1)..(561): Ceres Seq. ID no. 12720786

SEQ ID NO: 93595 - protein, 514 aa, Arabidopsis thaliana; identical to SEQ ID NO: 89839
  peptide (1)..(514): Ceres Seq. ID no. 12720787

SEQ ID NO: 93596 - protein, 429 aa, Arabidopsis thaliana; identical to SEQ ID NO: 89840
  peptide (1)..(429): Ceres Seq. ID no. 12720788

SEQ ID NO: 93597 - DNA, 1227 bp, Arabidopsis thaliana; identical to SEQ ID NO: 89841
  misc_feature (1)..(1227): Ceres Seq. ID no. 12720815
  misc_feature (1)..(1227): Ortholog of  Ceres SEQ ID NO 14314108 as cited in SEQ ID NO 63184

SEQ ID NO: 93598 - protein, 408 aa, Arabidopsis thaliana; identical to SEQ ID NO: 89842
  peptide (1)..(408): Ceres Seq. ID no. 12720816

SEQ ID NO: 93599 - protein, 214 aa, Arabidopsis thaliana; identical to SEQ ID NO: 89843
  peptide (1)..(214): Ceres Seq. ID no. 12720817

SEQ ID NO: 93600 - protein, 209 aa, Arabidopsis thaliana; identical to SEQ ID NO: 89844
  peptide (1)..(209): Ceres Seq. ID no. 12720818

SEQ ID NO: 93601 - DNA, 477 bp, Arabidopsis thaliana; identical to SEQ ID NO: 89845
  misc_feature (1)..(477): Ceres Seq. ID no. 12720848
  misc_feature (1)..(477): Ortholog of  Ceres SEQ ID NO 13595749 as cited in SEQ ID NO 51052

SEQ ID NO: 93602 - protein, 158 aa, Arabidopsis thaliana; identical to SEQ ID NO: 89846
  peptide (1)..(158): Ceres Seq. ID no. 12720849

SEQ ID NO: 93603 - protein, 147 aa, Arabidopsis thaliana; identical to SEQ ID NO: 89847
  peptide (1)..(147): Ceres Seq. ID no. 12720850

SEQ ID NO: 93604 - DNA, 1203 bp, Arabidopsis thaliana; identical to SEQ ID NO: 89848
  misc_feature (1)..(1203): Ceres Seq. ID no. 12720851
  misc_feature (1)..(1203): Ortholog of  Ceres SEQ ID NO 12636774 as cited in SEQ ID NO 372
  misc_feature (1)..(1203): Ortholog of  Ceres SEQ ID NO 15170037 as cited in SEQ ID NO 55447
  misc_feature (1)..(1203): Ortholog of  Ceres SEQ ID NO 15175492 as cited in SEQ ID NO 56277
  misc_feature (1)..(1203): Ortholog of  Ceres SEQ ID NO 13582350 as cited in SEQ ID NO 56734
  misc_feature (1)..(1203): Ortholog of  Ceres SEQ ID NO 12476493 as cited in SEQ ID NO 58163
  misc_feature (1)..(1203): Ortholog of  Ceres SEQ ID NO 14310807 as cited in SEQ ID NO 58696
  misc_feature (1)..(1203): Ortholog of  Ceres SEQ ID NO 15175861 as cited in SEQ ID NO 59381
  misc_feature (1)..(1203): Ortholog of  Ceres SEQ ID NO 12578315 as cited in SEQ ID NO 62451
  misc_feature (1)..(1203): Ortholog of  Ceres SEQ ID NO 12615466 as cited in SEQ ID NO 62761
  misc_feature (1)..(1203): Ortholog of  Ceres SEQ ID NO 13597295 as cited in SEQ ID NO 63743
  misc_feature (1)..(1203): Ortholog of  Ceres SEQ ID NO 12617090 as cited in SEQ ID NO 64005
  misc_feature (1)..(1203): Ortholog of  Ceres SEQ ID NO 15226458 as cited in SEQ ID NO 64042
  misc_feature (1)..(1203): Ortholog of  Ceres SEQ ID NO 13597439 as cited in SEQ ID NO 64081
  misc_feature (1)..(1203): Ortholog of  Ceres SEQ ID NO 13597233 as cited in SEQ ID NO 64370
  misc_feature (1)..(1203): Ortholog of  Ceres SEQ ID NO 13598327 as cited in SEQ ID NO 68040

SEQ ID NO: 93605 - protein, 400 aa, Arabidopsis thaliana; identical to SEQ ID NO: 89849
  peptide (1)..(400): Ceres Seq. ID no. 12720852

SEQ ID NO: 93606 - protein, 374 aa, Arabidopsis thaliana; identical to SEQ ID NO: 89850
  peptide (1)..(374): Ceres Seq. ID no. 12720853

SEQ ID NO: 93607 - protein, 372 aa, Arabidopsis thaliana; identical to SEQ ID NO: 89851
  peptide (1)..(372): Ceres Seq. ID no. 12720854

SEQ ID NO: 93608 - DNA, 1982 bp, Arabidopsis thaliana; identical to SEQ ID NO: 89852
  misc_feature (1)..(1982): Ceres Seq. ID no. 12720859
  misc_feature (1)..(1982): Ortholog of  Ceres SEQ ID NO 15168488 as cited in SEQ ID NO 59179

SEQ ID NO: 93609 - protein, 612 aa, Arabidopsis thaliana; identical to SEQ ID NO: 89853
  peptide (1)..(612): Ceres Seq. ID no. 12720860

SEQ ID NO: 93610 - protein, 605 aa, Arabidopsis thaliana; identical to SEQ ID NO: 89854
  peptide (1)..(605): Ceres Seq. ID no. 12720861

SEQ ID NO: 93611 - protein, 526 aa, Arabidopsis thaliana; identical to SEQ ID NO: 89855
  peptide (1)..(526): Ceres Seq. ID no. 12720862

SEQ ID NO: 93612 - DNA, 1797 bp, Arabidopsis thaliana; identical to SEQ ID NO: 89856
  misc_feature (1)..(1797): Ceres Seq. ID no. 12720871
  misc_feature (1)..(1797): Ortholog of  Ceres SEQ ID NO 14315279 as cited in SEQ ID NO 52534
  misc_feature (1)..(1797): Ortholog of  Ceres SEQ ID NO 12583190 as cited in SEQ ID NO 56386

SEQ ID NO: 93613 - protein, 521 aa, Arabidopsis thaliana; identical to SEQ ID NO: 89857
  peptide (1)..(521): Ceres Seq. ID no. 12720872

SEQ ID NO: 93614 - protein, 499 aa, Arabidopsis thaliana; identical to SEQ ID NO: 89858
  peptide (1)..(499): Ceres Seq. ID no. 12720873

SEQ ID NO: 93615 - protein, 445 aa, Arabidopsis thaliana; identical to SEQ ID NO: 89859
  peptide (1)..(445): Ceres Seq. ID no. 12720874

SEQ ID NO: 93616 - DNA, 1872 bp, Arabidopsis thaliana; identical to SEQ ID NO: 89860
  misc_feature (1)..(1872): Ceres Seq. ID no. 12720894
  misc_feature (1)..(1872): Ortholog of  Ceres SEQ ID NO 12586556 as cited in SEQ ID NO 64667
  misc_feature (1)..(1872): Ortholog of  Ceres SEQ ID NO 13660894 as cited in SEQ ID NO 67475

SEQ ID NO: 93617 - protein, 623 aa, Arabidopsis thaliana; identical to SEQ ID NO: 89861
  peptide (1)..(623): Ceres Seq. ID no. 12720895

SEQ ID NO: 93618 - protein, 580 aa, Arabidopsis thaliana; identical to SEQ ID NO: 89862
  peptide (1)..(580): Ceres Seq. ID no. 12720896

SEQ ID NO: 93619 - protein, 527 aa, Arabidopsis thaliana; identical to SEQ ID NO: 89863
  peptide (1)..(527): Ceres Seq. ID no. 12720897

SEQ ID NO: 93620 - DNA, 2174 bp, Arabidopsis thaliana; identical to SEQ ID NO: 89864
  misc_feature (1)..(2174): Ceres Seq. ID no. 12720909
  misc_feature (1)..(2174): Ortholog of  Ceres SEQ ID NO 14307827 as cited in SEQ ID NO 54367

SEQ ID NO: 93621 - protein, 622 aa, Arabidopsis thaliana; identical to SEQ ID NO: 89865
  peptide (1)..(622): Ceres Seq. ID no. 12720910

SEQ ID NO: 93622 - protein, 562 aa, Arabidopsis thaliana; identical to SEQ ID NO: 89866
  peptide (1)..(562): Ceres Seq. ID no. 12720911

SEQ ID NO: 93623 - protein, 515 aa, Arabidopsis thaliana; identical to SEQ ID NO: 89867
  peptide (1)..(515): Ceres Seq. ID no. 12720912

SEQ ID NO: 93624 - DNA, 1968 bp, Arabidopsis thaliana; identical to SEQ ID NO: 89868
  misc_feature (1)..(1968): Ceres Seq. ID no. 12720913
  misc_feature (1)..(1968): Ortholog of  Ceres SEQ ID NO 15177043 as cited in SEQ ID NO 57425

SEQ ID NO: 93625 - protein, 462 aa, Arabidopsis thaliana; identical to SEQ ID NO: 89869
  peptide (1)..(462): Ceres Seq. ID no. 12720914

SEQ ID NO: 93626 - DNA, 2109 bp, Arabidopsis thaliana; identical to SEQ ID NO: 89870
  misc_feature (1)..(2109): Ceres Seq. ID no. 12720922
  misc_feature (1)..(2109): Ortholog of  Ceres SEQ ID NO 14308243 as cited in SEQ ID NO 60493

SEQ ID NO: 93627 - protein, 702 aa, Arabidopsis thaliana; identical to SEQ ID NO: 89871
  peptide (1)..(702): Ceres Seq. ID no. 12720923

SEQ ID NO: 93628 - protein, 698 aa, Arabidopsis thaliana; identical to SEQ ID NO: 89872
  peptide (1)..(698): Ceres Seq. ID no. 12720924

SEQ ID NO: 93629 - protein, 697 aa, Arabidopsis thaliana; identical to SEQ ID NO: 89873
  peptide (1)..(697): Ceres Seq. ID no. 12720925

SEQ ID NO: 93630 - DNA, 2913 bp, Arabidopsis thaliana; identical to SEQ ID NO: 89874
  misc_feature (1)..(2913): Ceres Seq. ID no. 12720952
  misc_feature (1)..(2913): Ortholog of  Ceres SEQ ID NO 13523550 as cited in SEQ ID NO 58816

SEQ ID NO: 93631 - protein, 970 aa, Arabidopsis thaliana; identical to SEQ ID NO: 89875
  peptide (1)..(970): Ceres Seq. ID no. 12720953

SEQ ID NO: 93632 - protein, 902 aa, Arabidopsis thaliana; identical to SEQ ID NO: 89876
  peptide (1)..(902): Ceres Seq. ID no. 12720954

SEQ ID NO: 93633 - protein, 846 aa, Arabidopsis thaliana; identical to SEQ ID NO: 89877
  peptide (1)..(846): Ceres Seq. ID no. 12720955

SEQ ID NO: 93634 - DNA, 3093 bp, Arabidopsis thaliana; identical to SEQ ID NO: 89878
  misc_feature (1)..(3093): Ceres Seq. ID no. 12720964
  misc_feature (1)..(3093): Ortholog of  Ceres SEQ ID NO 13600310 as cited in SEQ ID NO 5086
  misc_feature (1)..(3093): Ortholog of  Ceres SEQ ID NO 15180362 as cited in SEQ ID NO 0

SEQ ID NO: 93635 - protein, 1030 aa, Arabidopsis thaliana; identical to SEQ ID NO: 89879
  peptide (1)..(1030): Ceres Seq. ID no. 12720965

SEQ ID NO: 93636 - protein, 893 aa, Arabidopsis thaliana; identical to SEQ ID NO: 89880
  peptide (1)..(893): Ceres Seq. ID no. 12720966

SEQ ID NO: 93637 - protein, 872 aa, Arabidopsis thaliana; identical to SEQ ID NO: 89881
  peptide (1)..(872): Ceres Seq. ID no. 12720967

SEQ ID NO: 93638 - DNA, 669 bp, Arabidopsis thaliana; identical to SEQ ID NO: 89882
  misc_feature (1)..(669): Ceres Seq. ID no. 12720976
  misc_feature (1)..(669): Ortholog of  Ceres SEQ ID NO 14308640 as cited in SEQ ID NO 60489
  misc_feature (1)..(669): Ortholog of  Ceres SEQ ID NO 12619999 as cited in SEQ ID NO 66123
  misc_feature (1)..(669): Ortholog of  Ceres SEQ ID NO 13656436 as cited in SEQ ID NO 69154

SEQ ID NO: 93639 - protein, 222 aa, Arabidopsis thaliana; identical to SEQ ID NO: 89883
  peptide (1)..(222): Ceres Seq. ID no. 12720977

SEQ ID NO: 93640 - protein, 131 aa, Arabidopsis thaliana; identical to SEQ ID NO: 89884
  peptide (1)..(131): Ceres Seq. ID no. 12720978

SEQ ID NO: 93641 - protein, 126 aa, Arabidopsis thaliana; identical to SEQ ID NO: 89885
  peptide (1)..(126): Ceres Seq. ID no. 12720979

SEQ ID NO: 93642 - DNA, 789 bp, Arabidopsis thaliana; identical to SEQ ID NO: 89886
  misc_feature (1)..(789): Ceres Seq. ID no. 12720980
  misc_feature (1)..(789): Ortholog of  Ceres SEQ ID NO 15172803 as cited in SEQ ID NO 52102
  misc_feature (1)..(789): Ortholog of  Ceres SEQ ID NO 12593499 as cited in SEQ ID NO 68777

SEQ ID NO: 93643 - protein, 262 aa, Arabidopsis thaliana; identical to SEQ ID NO: 89887
  peptide (1)..(262): Ceres Seq. ID no. 12720981

SEQ ID NO: 93644 - protein, 165 aa, Arabidopsis thaliana; identical to SEQ ID NO: 89888
  peptide (1)..(165): Ceres Seq. ID no. 12720982

SEQ ID NO: 93645 - DNA, 848 bp, Arabidopsis thaliana; identical to SEQ ID NO: 89889
  misc_feature (1)..(848): Ceres Seq. ID no. 12721000
  misc_feature (1)..(848): Ortholog of  Ceres SEQ ID NO 14316118 as cited in SEQ ID NO 52391
  misc_feature (1)..(848): Ortholog of  Ceres SEQ ID NO 14316060 as cited in SEQ ID NO 52465
  misc_feature (1)..(848): Ortholog of  Ceres SEQ ID NO 15177246 as cited in SEQ ID NO 57731
  misc_feature (1)..(848): Ortholog of  Ceres SEQ ID NO 13664032 as cited in SEQ ID NO 67527

SEQ ID NO: 93646 - protein, 186 aa, Arabidopsis thaliana; identical to SEQ ID NO: 89890
  peptide (1)..(186): Ceres Seq. ID no. 12721001

SEQ ID NO: 93647 - protein, 150 aa, Arabidopsis thaliana; identical to SEQ ID NO: 48331
  peptide (1)..(150): Ceres Seq. ID no. 12721002

SEQ ID NO: 93648 - protein, 132 aa, Arabidopsis thaliana; identical to SEQ ID NO: 48332
  peptide (1)..(132): Ceres Seq. ID no. 12721003

SEQ ID NO: 93649 - DNA, 661 bp, Arabidopsis thaliana; identical to SEQ ID NO: 89893
  misc_feature (1)..(661): Ceres Seq. ID no. 12721011
  misc_feature (1)..(661): Ortholog of  Ceres SEQ ID NO 13597546 as cited in SEQ ID NO 65017

SEQ ID NO: 93650 - protein, 181 aa, Arabidopsis thaliana; identical to SEQ ID NO: 89894
  peptide (1)..(181): Ceres Seq. ID no. 12721012

SEQ ID NO: 93651 - protein, 142 aa, Arabidopsis thaliana; identical to SEQ ID NO: 89895
  peptide (1)..(142): Ceres Seq. ID no. 12721013

SEQ ID NO: 93652 - protein, 114 aa, Arabidopsis thaliana; identical to SEQ ID NO: 89896
  peptide (1)..(114): Ceres Seq. ID no. 12721014

SEQ ID NO: 93653 - DNA, 1161 bp, Arabidopsis thaliana; identical to SEQ ID NO: 89897
  misc_feature (1)..(1161): Ceres Seq. ID no. 12721188
  misc_feature (1)..(1161): Ortholog of  Ceres SEQ ID NO 14313155 as cited in SEQ ID NO 54706
  misc_feature (1)..(1161): Ortholog of  Ceres SEQ ID NO 13639022 as cited in SEQ ID NO 59811

SEQ ID NO: 93654 - protein, 386 aa, Arabidopsis thaliana; identical to SEQ ID NO: 89898
  peptide (1)..(386): Ceres Seq. ID no. 12721189

SEQ ID NO: 93655 - protein, 348 aa, Arabidopsis thaliana; identical to SEQ ID NO: 89899
  peptide (1)..(348): Ceres Seq. ID no. 12721190

SEQ ID NO: 93656 - protein, 297 aa, Arabidopsis thaliana; identical to SEQ ID NO: 89900
  peptide (1)..(297): Ceres Seq. ID no. 12721191

SEQ ID NO: 93657 - DNA, 1401 bp, Arabidopsis thaliana; identical to SEQ ID NO: 89901
  misc_feature (1)..(1401): Ceres Seq. ID no. 12721292
  misc_feature (1)..(1401): Ortholog of  Ceres SEQ ID NO 12584790 as cited in SEQ ID NO 62648

SEQ ID NO: 93658 - protein, 466 aa, Arabidopsis thaliana; identical to SEQ ID NO: 89902
  peptide (1)..(466): Ceres Seq. ID no. 12721293

SEQ ID NO: 93659 - protein, 456 aa, Arabidopsis thaliana; identical to SEQ ID NO: 89903
  peptide (1)..(456): Ceres Seq. ID no. 12721294

SEQ ID NO: 93660 - protein, 451 aa, Arabidopsis thaliana; identical to SEQ ID NO: 89904
  peptide (1)..(451): Ceres Seq. ID no. 12721295

SEQ ID NO: 93661 - DNA, 1746 bp, Arabidopsis thaliana; identical to SEQ ID NO: 89905
  misc_feature (1)..(1746): Ceres Seq. ID no. 12721362
  misc_feature (1)..(1746): Ortholog of  Ceres SEQ ID NO 15178169 as cited in SEQ ID NO 58511

SEQ ID NO: 93662 - protein, 466 aa, Arabidopsis thaliana; identical to SEQ ID NO: 89906
  peptide (1)..(466): Ceres Seq. ID no. 12721363

SEQ ID NO: 93663 - protein, 340 aa, Arabidopsis thaliana; identical to SEQ ID NO: 89907
  peptide (1)..(340): Ceres Seq. ID no. 12721364

SEQ ID NO: 93664 - protein, 335 aa, Arabidopsis thaliana; identical to SEQ ID NO: 89908
  peptide (1)..(335): Ceres Seq. ID no. 12721365

SEQ ID NO: 93665 - DNA, 1701 bp, Arabidopsis thaliana; identical to SEQ ID NO: 89909
  misc_feature (1)..(1701): Ceres Seq. ID no. 12721384
  misc_feature (1)..(1701): Ortholog of  Ceres SEQ ID NO 15227226 as cited in SEQ ID NO 54691
  misc_feature (1)..(1701): Ortholog of  Ceres SEQ ID NO 14303169 as cited in SEQ ID NO 65741

SEQ ID NO: 93666 - protein, 487 aa, Arabidopsis thaliana; identical to SEQ ID NO: 89910
  peptide (1)..(487): Ceres Seq. ID no. 12721385

SEQ ID NO: 93667 - protein, 477 aa, Arabidopsis thaliana; identical to SEQ ID NO: 89911
  peptide (1)..(477): Ceres Seq. ID no. 12721386

SEQ ID NO: 93668 - protein, 339 aa, Arabidopsis thaliana; identical to SEQ ID NO: 89912
  peptide (1)..(339): Ceres Seq. ID no. 12721387

SEQ ID NO: 93669 - DNA, 1116 bp, Arabidopsis thaliana; identical to SEQ ID NO: 89913
  misc_feature (1)..(1116): Ceres Seq. ID no. 12721407
  misc_feature (1)..(1116): Ortholog of  Ceres SEQ ID NO 14308615 as cited in SEQ ID NO 58538
  misc_feature (1)..(1116): Ortholog of  Ceres SEQ ID NO 13585342 as cited in SEQ ID NO 63601

SEQ ID NO: 93670 - protein, 371 aa, Arabidopsis thaliana; identical to SEQ ID NO: 89914
  peptide (1)..(371): Ceres Seq. ID no. 12721408

SEQ ID NO: 93671 - protein, 255 aa, Arabidopsis thaliana; identical to SEQ ID NO: 89915
  peptide (1)..(255): Ceres Seq. ID no. 12721409

SEQ ID NO: 93672 - protein, 209 aa, Arabidopsis thaliana; identical to SEQ ID NO: 89916
  peptide (1)..(209): Ceres Seq. ID no. 12721410

SEQ ID NO: 93673 - DNA, 1558 bp, Arabidopsis thaliana; identical to SEQ ID NO: 89917
  misc_feature (1)..(1558): Ceres Seq. ID no. 12721415
  misc_feature (1)..(1558): Ortholog of  Ceres SEQ ID NO 13655992 as cited in SEQ ID NO 65504
  misc_feature (1)..(1558): Ortholog of  Ceres SEQ ID NO 13587581 as cited in SEQ ID NO 0

SEQ ID NO: 93674 - protein, 350 aa, Arabidopsis thaliana; identical to SEQ ID NO: 89918
  peptide (1)..(350): Ceres Seq. ID no. 12721416

SEQ ID NO: 93675 - protein, 348 aa, Arabidopsis thaliana; identical to SEQ ID NO: 89919
  peptide (1)..(348): Ceres Seq. ID no. 12721417

SEQ ID NO: 93676 - protein, 301 aa, Arabidopsis thaliana; identical to SEQ ID NO: 89920
  peptide (1)..(301): Ceres Seq. ID no. 12721418

SEQ ID NO: 93677 - DNA, 2688 bp, Arabidopsis thaliana; identical to SEQ ID NO: 89921
  misc_feature (1)..(2688): Ceres Seq. ID no. 12721444
  misc_feature (1)..(2688): Ortholog of  Ceres SEQ ID NO 12586556 as cited in SEQ ID NO 64667
  misc_feature (1)..(2688): Ortholog of  Ceres SEQ ID NO 13660894 as cited in SEQ ID NO 67475

SEQ ID NO: 93678 - protein, 895 aa, Arabidopsis thaliana; identical to SEQ ID NO: 89922
  peptide (1)..(895): Ceres Seq. ID no. 12721445

SEQ ID NO: 93679 - protein, 796 aa, Arabidopsis thaliana; identical to SEQ ID NO: 89923
  peptide (1)..(796): Ceres Seq. ID no. 12721446

SEQ ID NO: 93680 - protein, 775 aa, Arabidopsis thaliana; identical to SEQ ID NO: 89924
  peptide (1)..(775): Ceres Seq. ID no. 12721447

SEQ ID NO: 93681 - DNA, 1932 bp, Arabidopsis thaliana; identical to SEQ ID NO: 89925
  misc_feature (1)..(1932): Ceres Seq. ID no. 12721448
  misc_feature (1)..(1932): Ortholog of  Ceres SEQ ID NO 12586556 as cited in SEQ ID NO 64667
  misc_feature (1)..(1932): Ortholog of  Ceres SEQ ID NO 13660894 as cited in SEQ ID NO 67475

SEQ ID NO: 93682 - protein, 643 aa, Arabidopsis thaliana; identical to SEQ ID NO: 89926
  peptide (1)..(643): Ceres Seq. ID no. 12721449

SEQ ID NO: 93683 - protein, 572 aa, Arabidopsis thaliana; identical to SEQ ID NO: 89927
  peptide (1)..(572): Ceres Seq. ID no. 12721450

SEQ ID NO: 93684 - protein, 548 aa, Arabidopsis thaliana; identical to SEQ ID NO: 89928
  peptide (1)..(548): Ceres Seq. ID no. 12721451

SEQ ID NO: 93685 - DNA, 768 bp, Arabidopsis thaliana; identical to SEQ ID NO: 89929
  misc_feature (1)..(768): Ceres Seq. ID no. 12721472
  misc_feature (1)..(768): Ortholog of  Ceres SEQ ID NO 14303487 as cited in SEQ ID NO 54521
  misc_feature (1)..(768): Ortholog of  Ceres SEQ ID NO 14316302 as cited in SEQ ID NO 55232
  misc_feature (1)..(768): Ortholog of  Ceres SEQ ID NO 14308274 as cited in SEQ ID NO 55597
  misc_feature (1)..(768): Ortholog of  Ceres SEQ ID NO 13659710 as cited in SEQ ID NO 60808

SEQ ID NO: 93686 - protein, 255 aa, Arabidopsis thaliana; identical to SEQ ID NO: 89930
  peptide (1)..(255): Ceres Seq. ID no. 12721473

SEQ ID NO: 93687 - protein, 195 aa, Arabidopsis thaliana; identical to SEQ ID NO: 89931
  peptide (1)..(195): Ceres Seq. ID no. 12721474

SEQ ID NO: 93688 - protein, 194 aa, Arabidopsis thaliana; identical to SEQ ID NO: 89932
  peptide (1)..(194): Ceres Seq. ID no. 12721475

SEQ ID NO: 93689 - DNA, 684 bp, Arabidopsis thaliana; identical to SEQ ID NO: 89933
  misc_feature (1)..(684): Ceres Seq. ID no. 12721488
  misc_feature (1)..(684): Ortholog of  Ceres SEQ ID NO 13599568 as cited in SEQ ID NO 509
  misc_feature (1)..(684): Ortholog of  Ceres SEQ ID NO 13638595 as cited in SEQ ID NO 52050
  misc_feature (1)..(684): Ortholog of  Ceres SEQ ID NO 13594748 as cited in SEQ ID NO 52114
  misc_feature (1)..(684): Ortholog of  Ceres SEQ ID NO 12583993 as cited in SEQ ID NO 68098

SEQ ID NO: 93690 - protein, 227 aa, Arabidopsis thaliana; identical to SEQ ID NO: 89934
  peptide (1)..(227): Ceres Seq. ID no. 12721489

SEQ ID NO: 93691 - protein, 123 aa, Arabidopsis thaliana; identical to SEQ ID NO: 89935
  peptide (1)..(123): Ceres Seq. ID no. 12721490

SEQ ID NO: 93692 - DNA, 2589 bp, Arabidopsis thaliana; identical to SEQ ID NO: 89936
  misc_feature (1)..(2589): Ceres Seq. ID no. 12721495
  misc_feature (1)..(2589): Ortholog of  Ceres SEQ ID NO 13657677 as cited in SEQ ID NO 66119

SEQ ID NO: 93693 - protein, 862 aa, Arabidopsis thaliana; identical to SEQ ID NO: 89937
  peptide (1)..(862): Ceres Seq. ID no. 12721496

SEQ ID NO: 93694 - protein, 732 aa, Arabidopsis thaliana; identical to SEQ ID NO: 89938
  peptide (1)..(732): Ceres Seq. ID no. 12721497

SEQ ID NO: 93695 - protein, 716 aa, Arabidopsis thaliana; identical to SEQ ID NO: 89939
  peptide (1)..(716): Ceres Seq. ID no. 12721498

SEQ ID NO: 93696 - DNA, 1449 bp, Arabidopsis thaliana; identical to SEQ ID NO: 89940
  misc_feature (1)..(1449): Ceres Seq. ID no. 12721502
  misc_feature (1)..(1449): Ortholog of  Ceres SEQ ID NO 13657677 as cited in SEQ ID NO 66119

SEQ ID NO: 93697 - protein, 482 aa, Arabidopsis thaliana; identical to SEQ ID NO: 89941
  peptide (1)..(482): Ceres Seq. ID no. 12721503

SEQ ID NO: 93698 - protein, 366 aa, Arabidopsis thaliana; identical to SEQ ID NO: 89942
  peptide (1)..(366): Ceres Seq. ID no. 12721504

SEQ ID NO: 93699 - protein, 331 aa, Arabidopsis thaliana; identical to SEQ ID NO: 89943
  peptide (1)..(331): Ceres Seq. ID no. 12721505

SEQ ID NO: 93700 - DNA, 1623 bp, Arabidopsis thaliana; identical to SEQ ID NO: 89944
  misc_feature (1)..(1623): Ceres Seq. ID no. 12721545
  misc_feature (1)..(1623): Ortholog of  Ceres SEQ ID NO 15171856 as cited in SEQ ID NO 55120

SEQ ID NO: 93701 - protein, 540 aa, Arabidopsis thaliana; identical to SEQ ID NO: 89945
  peptide (1)..(540): Ceres Seq. ID no. 12721546

SEQ ID NO: 93702 - protein, 536 aa, Arabidopsis thaliana; identical to SEQ ID NO: 89946
  peptide (1)..(536): Ceres Seq. ID no. 12721547

SEQ ID NO: 93703 - protein, 481 aa, Arabidopsis thaliana; identical to SEQ ID NO: 89947
  peptide (1)..(481): Ceres Seq. ID no. 12721548

SEQ ID NO: 93704 - DNA, 594 bp, Arabidopsis thaliana; identical to SEQ ID NO: 89948
  misc_feature (1)..(594): Ceres Seq. ID no. 12721549
  misc_feature (1)..(594): Ortholog of  Ceres SEQ ID NO 15175597 as cited in SEQ ID NO 58317

SEQ ID NO: 93705 - protein, 197 aa, Arabidopsis thaliana; identical to SEQ ID NO: 89949
  peptide (1)..(197): Ceres Seq. ID no. 12721550

SEQ ID NO: 93706 - protein, 178 aa, Arabidopsis thaliana; identical to SEQ ID NO: 89950
  peptide (1)..(178): Ceres Seq. ID no. 12721551

SEQ ID NO: 93707 - DNA, 1041 bp, Arabidopsis thaliana; identical to SEQ ID NO: 89951
  misc_feature (1)..(1041): Ceres Seq. ID no. 12721552
  misc_feature (1)..(1041): Ortholog of  Ceres SEQ ID NO 14304528 as cited in SEQ ID NO 53293
  misc_feature (1)..(1041): Ortholog of  Ceres SEQ ID NO 14315162 as cited in SEQ ID NO 60005
  misc_feature (1)..(1041): Ortholog of  Ceres SEQ ID NO 13659881 as cited in SEQ ID NO 66938

SEQ ID NO: 93708 - protein, 346 aa, Arabidopsis thaliana; identical to SEQ ID NO: 89952
  peptide (1)..(346): Ceres Seq. ID no. 12721553

SEQ ID NO: 93709 - protein, 262 aa, Arabidopsis thaliana; identical to SEQ ID NO: 89953
  peptide (1)..(262): Ceres Seq. ID no. 12721554

SEQ ID NO: 93710 - protein, 224 aa, Arabidopsis thaliana; identical to SEQ ID NO: 89954
  peptide (1)..(224): Ceres Seq. ID no. 12721555

SEQ ID NO: 93711 - DNA, 996 bp, Arabidopsis thaliana; identical to SEQ ID NO: 89955
  misc_feature (1)..(996): Ceres Seq. ID no. 12721560
  misc_feature (1)..(996): Ortholog of  Ceres SEQ ID NO 12608114 as cited in SEQ ID NO 57218
  misc_feature (1)..(996): Ortholog of  Ceres SEQ ID NO 12625980 as cited in SEQ ID NO 65586

SEQ ID NO: 93712 - protein, 331 aa, Arabidopsis thaliana; identical to SEQ ID NO: 89956
  peptide (1)..(331): Ceres Seq. ID no. 12721561

SEQ ID NO: 93713 - DNA, 348 bp, Arabidopsis thaliana; identical to SEQ ID NO: 89957
  misc_feature (1)..(348): Ceres Seq. ID no. 12721570
  misc_feature (1)..(348): Ortholog of  Ceres SEQ ID NO 13581889 as cited in SEQ ID NO 50900

SEQ ID NO: 93714 - protein, 115 aa, Arabidopsis thaliana; identical to SEQ ID NO: 89958
  peptide (1)..(115): Ceres Seq. ID no. 12721571

SEQ ID NO: 93715 - DNA, 1644 bp, Arabidopsis thaliana; identical to SEQ ID NO: 89959
  misc_feature (1)..(1644): Ceres Seq. ID no. 12721572
  misc_feature (1)..(1644): Ortholog of  Ceres SEQ ID NO 15174947 as cited in SEQ ID NO 236

SEQ ID NO: 93716 - protein, 547 aa, Arabidopsis thaliana; identical to SEQ ID NO: 89960
  peptide (1)..(547): Ceres Seq. ID no. 12721573

SEQ ID NO: 93717 - protein, 499 aa, Arabidopsis thaliana; identical to SEQ ID NO: 89961
  peptide (1)..(499): Ceres Seq. ID no. 12721574

SEQ ID NO: 93718 - protein, 487 aa, Arabidopsis thaliana; identical to SEQ ID NO: 89962
  peptide (1)..(487): Ceres Seq. ID no. 12721575

SEQ ID NO: 93719 - DNA, 501 bp, Arabidopsis thaliana; identical to SEQ ID NO: 89963
  misc_feature (1)..(501): Ceres Seq. ID no. 12721576
  misc_feature (1)..(501): Ortholog of  Ceres SEQ ID NO 15177842 as cited in SEQ ID NO 51547
  misc_feature (1)..(501): Ortholog of  Ceres SEQ ID NO 13594859 as cited in SEQ ID NO 51974
  misc_feature (1)..(501): Ortholog of  Ceres SEQ ID NO 13597887 as cited in SEQ ID NO 64295

SEQ ID NO: 93720 - protein, 166 aa, Arabidopsis thaliana; identical to SEQ ID NO: 89964
  peptide (1)..(166): Ceres Seq. ID no. 12721577

SEQ ID NO: 93721 - protein, 112 aa, Arabidopsis thaliana; identical to SEQ ID NO: 89965
  peptide (1)..(112): Ceres Seq. ID no. 12721578

SEQ ID NO: 93722 - DNA, 1140 bp, Arabidopsis thaliana; identical to SEQ ID NO: 89966
  misc_feature (1)..(1140): Ceres Seq. ID no. 12721590
  misc_feature (1)..(1140): Ortholog of  Ceres SEQ ID NO 13593955 as cited in SEQ ID NO 54278
  misc_feature (1)..(1140): Ortholog of  Ceres SEQ ID NO 13597380 as cited in SEQ ID NO 64054
  misc_feature (1)..(1140): Ortholog of  Ceres SEQ ID NO 12625474 as cited in SEQ ID NO 64169
  misc_feature (1)..(1140): Ortholog of  Ceres SEQ ID NO 13597502 as cited in SEQ ID NO 64681

SEQ ID NO: 93723 - protein, 379 aa, Arabidopsis thaliana; identical to SEQ ID NO: 89967
  peptide (1)..(379): Ceres Seq. ID no. 12721591

SEQ ID NO: 93724 - protein, 315 aa, Arabidopsis thaliana; identical to SEQ ID NO: 89968
  peptide (1)..(315): Ceres Seq. ID no. 12721592

SEQ ID NO: 93725 - protein, 205 aa, Arabidopsis thaliana; identical to SEQ ID NO: 89969
  peptide (1)..(205): Ceres Seq. ID no. 12721593

SEQ ID NO: 93726 - DNA, 927 bp, Arabidopsis thaliana; identical to SEQ ID NO: 89970
  misc_feature (1)..(927): Ceres Seq. ID no. 12721605
  misc_feature (1)..(927): Ortholog of  Ceres SEQ ID NO 15179900 as cited in SEQ ID NO 66942

SEQ ID NO: 93727 - protein, 308 aa, Arabidopsis thaliana; identical to SEQ ID NO: 89971
  peptide (1)..(308): Ceres Seq. ID no. 12721606

SEQ ID NO: 93728 - DNA, 2115 bp, Arabidopsis thaliana; identical to SEQ ID NO: 89972
  misc_feature (1)..(2115): Ceres Seq. ID no. 12721607
  misc_feature (1)..(2115): Ortholog of  Ceres SEQ ID NO 14311609 as cited in SEQ ID NO 58341

SEQ ID NO: 93729 - protein, 572 aa, Arabidopsis thaliana; identical to SEQ ID NO: 89973
  peptide (1)..(572): Ceres Seq. ID no. 12721608

SEQ ID NO: 93730 - protein, 381 aa, Arabidopsis thaliana; identical to SEQ ID NO: 89974
  peptide (1)..(381): Ceres Seq. ID no. 12721609

SEQ ID NO: 93731 - protein, 318 aa, Arabidopsis thaliana; identical to SEQ ID NO: 89975
  peptide (1)..(318): Ceres Seq. ID no. 12721610

SEQ ID NO: 93732 - DNA, 1485 bp, Arabidopsis thaliana; identical to SEQ ID NO: 89976
  misc_feature (1)..(1485): Ceres Seq. ID no. 12721643
  misc_feature (1)..(1485): Ortholog of  Ceres SEQ ID NO 14311367 as cited in SEQ ID NO 53834

SEQ ID NO: 93733 - protein, 494 aa, Arabidopsis thaliana; identical to SEQ ID NO: 89977
  peptide (1)..(494): Ceres Seq. ID no. 12721644

SEQ ID NO: 93734 - protein, 489 aa, Arabidopsis thaliana; identical to SEQ ID NO: 89978
  peptide (1)..(489): Ceres Seq. ID no. 12721645

SEQ ID NO: 93735 - DNA, 1854 bp, Arabidopsis thaliana; identical to SEQ ID NO: 89979
  misc_feature (1)..(1854): Ceres Seq. ID no. 12721650
  misc_feature (1)..(1854): Ortholog of  Ceres SEQ ID NO 12624774 as cited in SEQ ID NO 63620
  misc_feature (1)..(1854): Ortholog of  Ceres SEQ ID NO 14307940 as cited in SEQ ID NO 0
  misc_feature (1)..(1854): Ortholog of  Ceres SEQ ID NO 14308560 as cited in SEQ ID NO 0

SEQ ID NO: 93736 - protein, 617 aa, Arabidopsis thaliana; identical to SEQ ID NO: 89980
  peptide (1)..(617): Ceres Seq. ID no. 12721651

SEQ ID NO: 93737 - protein, 463 aa, Arabidopsis thaliana; identical to SEQ ID NO: 89981
  peptide (1)..(463): Ceres Seq. ID no. 12721652

SEQ ID NO: 93738 - protein, 353 aa, Arabidopsis thaliana; identical to SEQ ID NO: 89982
  peptide (1)..(353): Ceres Seq. ID no. 12721653

SEQ ID NO: 93739 - DNA, 2532 bp, Arabidopsis thaliana; identical to SEQ ID NO: 89983
  misc_feature (1)..(2532): Ceres Seq. ID no. 12721679
  misc_feature (1)..(2532): Ortholog of  Ceres SEQ ID NO 13582534 as cited in SEQ ID NO 57409
  misc_feature (1)..(2532): Ortholog of  Ceres SEQ ID NO 15180683 as cited in SEQ ID NO 0

SEQ ID NO: 93740 - protein, 843 aa, Arabidopsis thaliana; identical to SEQ ID NO: 89984
  peptide (1)..(843): Ceres Seq. ID no. 12721680

SEQ ID NO: 93741 - protein, 683 aa, Arabidopsis thaliana; identical to SEQ ID NO: 89985
  peptide (1)..(683): Ceres Seq. ID no. 12721681

SEQ ID NO: 93742 - protein, 625 aa, Arabidopsis thaliana; identical to SEQ ID NO: 89986
  peptide (1)..(625): Ceres Seq. ID no. 12721682

SEQ ID NO: 93743 - DNA, 2773 bp, Arabidopsis thaliana; identical to SEQ ID NO: 89987
  misc_feature (1)..(2773): Ceres Seq. ID no. 12721683
  misc_feature (1)..(2773): Ortholog of  Ceres SEQ ID NO 13582534 as cited in SEQ ID NO 57409
  misc_feature (1)..(2773): Ortholog of  Ceres SEQ ID NO 13597268 as cited in SEQ ID NO 63929

SEQ ID NO: 93744 - protein, 847 aa, Arabidopsis thaliana; identical to SEQ ID NO: 89988
  peptide (1)..(847): Ceres Seq. ID no. 12721684

SEQ ID NO: 93745 - protein, 683 aa, Arabidopsis thaliana; identical to SEQ ID NO: 89989
  peptide (1)..(683): Ceres Seq. ID no. 12721685

SEQ ID NO: 93746 - protein, 681 aa, Arabidopsis thaliana; identical to SEQ ID NO: 89990
  peptide (1)..(681): Ceres Seq. ID no. 12721686

SEQ ID NO: 93747 - DNA, 2067 bp, Arabidopsis thaliana; identical to SEQ ID NO: 89991
  misc_feature (1)..(2067): Ceres Seq. ID no. 12721687
  misc_feature (1)..(2067): Ortholog of  Ceres SEQ ID NO 14310375 as cited in SEQ ID NO 59612

SEQ ID NO: 93748 - protein, 497 aa, Arabidopsis thaliana; identical to SEQ ID NO: 89992
  peptide (1)..(497): Ceres Seq. ID no. 12721688

SEQ ID NO: 93749 - protein, 477 aa, Arabidopsis thaliana; identical to SEQ ID NO: 89993
  peptide (1)..(477): Ceres Seq. ID no. 12721689

SEQ ID NO: 93750 - protein, 419 aa, Arabidopsis thaliana; identical to SEQ ID NO: 89994
  peptide (1)..(419): Ceres Seq. ID no. 12721690

SEQ ID NO: 93751 - DNA, 642 bp, Arabidopsis thaliana; identical to SEQ ID NO: 89995
  misc_feature (1)..(642): Ceres Seq. ID no. 12721749
  misc_feature (1)..(642): Ortholog of  Ceres SEQ ID NO 15179051 as cited in SEQ ID NO 0

SEQ ID NO: 93752 - protein, 155 aa, Arabidopsis thaliana; identical to SEQ ID NO: 89996
  peptide (1)..(155): Ceres Seq. ID no. 12721750

SEQ ID NO: 93753 - protein, 134 aa, Arabidopsis thaliana; identical to SEQ ID NO: 89997
  peptide (1)..(134): Ceres Seq. ID no. 12721751

SEQ ID NO: 93754 - protein, 122 aa, Arabidopsis thaliana; identical to SEQ ID NO: 89998
  peptide (1)..(122): Ceres Seq. ID no. 12721752

SEQ ID NO: 93755 - DNA, 1245 bp, Arabidopsis thaliana; identical to SEQ ID NO: 89999
  misc_feature (1)..(1245): Ceres Seq. ID no. 12721753
  misc_feature (1)..(1245): Ortholog of  Ceres SEQ ID NO 14310446 as cited in SEQ ID NO 59610

SEQ ID NO: 93756 - protein, 260 aa, Arabidopsis thaliana; identical to SEQ ID NO: 90000
  peptide (1)..(260): Ceres Seq. ID no. 12721754

SEQ ID NO: 93757 - protein, 143 aa, Arabidopsis thaliana; identical to SEQ ID NO: 90001
  peptide (1)..(143): Ceres Seq. ID no. 12721755

SEQ ID NO: 93758 - protein, 141 aa, Arabidopsis thaliana; identical to SEQ ID NO: 90002
  peptide (1)..(141): Ceres Seq. ID no. 12721756

SEQ ID NO: 93759 - DNA, 1015 bp, Arabidopsis thaliana; identical to SEQ ID NO: 90003
  misc_feature (1)..(1015): Ceres Seq. ID no. 12721767
  misc_feature (1)..(1015): Ortholog of  Ceres SEQ ID NO 14303324 as cited in SEQ ID NO 54563
  misc_feature (1)..(1015): Ortholog of  Ceres SEQ ID NO 14308575 as cited in SEQ ID NO 58782

SEQ ID NO: 93760 - protein, 282 aa, Arabidopsis thaliana; identical to SEQ ID NO: 90004
  peptide (1)..(282): Ceres Seq. ID no. 12721768

SEQ ID NO: 93761 - protein, 206 aa, Arabidopsis thaliana; identical to SEQ ID NO: 90005
  peptide (1)..(206): Ceres Seq. ID no. 12721769

SEQ ID NO: 93762 - protein, 164 aa, Arabidopsis thaliana; identical to SEQ ID NO: 90006
  peptide (1)..(164): Ceres Seq. ID no. 12721770

SEQ ID NO: 93763 - DNA, 741 bp, Arabidopsis thaliana; identical to SEQ ID NO: 90007
  misc_feature (1)..(741): Ceres Seq. ID no. 12721795
  misc_feature (1)..(741): Ortholog of  Ceres SEQ ID NO 13595569 as cited in SEQ ID NO 56778
  misc_feature (1)..(741): Ortholog of  Ceres SEQ ID NO 12611159 as cited in SEQ ID NO 59821

SEQ ID NO: 93764 - protein, 246 aa, Arabidopsis thaliana; identical to SEQ ID NO: 90008
  peptide (1)..(246): Ceres Seq. ID no. 12721796

SEQ ID NO: 93765 - protein, 126 aa, Arabidopsis thaliana; identical to SEQ ID NO: 90009
  peptide (1)..(126): Ceres Seq. ID no. 12721797

SEQ ID NO: 93766 - DNA, 1367 bp, Arabidopsis thaliana; identical to SEQ ID NO: 90010
  misc_feature (1)..(1367): Ceres Seq. ID no. 12721807
  misc_feature (1)..(1367): Ortholog of  Ceres SEQ ID NO 13585382 as cited in SEQ ID NO 63889

SEQ ID NO: 93767 - protein, 384 aa, Arabidopsis thaliana; identical to SEQ ID NO: 90011
  peptide (1)..(384): Ceres Seq. ID no. 12721808

SEQ ID NO: 93768 - protein, 313 aa, Arabidopsis thaliana; identical to SEQ ID NO: 90012
  peptide (1)..(313): Ceres Seq. ID no. 12721809

SEQ ID NO: 93769 - protein, 258 aa, Arabidopsis thaliana; identical to SEQ ID NO: 90013
  peptide (1)..(258): Ceres Seq. ID no. 12721810

SEQ ID NO: 93770 - DNA, 1404 bp, Arabidopsis thaliana; identical to SEQ ID NO: 90014
  misc_feature (1)..(1404): Ceres Seq. ID no. 12721811
  misc_feature (1)..(1404): Ortholog of  Ceres SEQ ID NO 13654989 as cited in SEQ ID NO 63117
  misc_feature (1)..(1404): Ortholog of  Ceres SEQ ID NO 13657138 as cited in SEQ ID NO 65923
  misc_feature (1)..(1404): Ortholog of  Ceres SEQ ID NO 13584744 as cited in SEQ ID NO 69137

SEQ ID NO: 93771 - protein, 467 aa, Arabidopsis thaliana; identical to SEQ ID NO: 90015
  peptide (1)..(467): Ceres Seq. ID no. 12721812

SEQ ID NO: 93772 - protein, 373 aa, Arabidopsis thaliana; identical to SEQ ID NO: 90016
  peptide (1)..(373): Ceres Seq. ID no. 12721813

SEQ ID NO: 93773 - protein, 292 aa, Arabidopsis thaliana; identical to SEQ ID NO: 90017
  peptide (1)..(292): Ceres Seq. ID no. 12721814

SEQ ID NO: 93774 - DNA, 1161 bp, Arabidopsis thaliana; identical to SEQ ID NO: 90018
  misc_feature (1)..(1161): Ceres Seq. ID no. 12721826
  misc_feature (1)..(1161): Ortholog of  Ceres SEQ ID NO 15169611 as cited in SEQ ID NO 65939
  misc_feature (1)..(1161): Ortholog of  Ceres SEQ ID NO 13502874 as cited in SEQ ID NO 66298
  misc_feature (1)..(1161): Ortholog of  Ceres SEQ ID NO 12614124 as cited in SEQ ID NO 68392

SEQ ID NO: 93775 - protein, 386 aa, Arabidopsis thaliana; identical to SEQ ID NO: 90019
  peptide (1)..(386): Ceres Seq. ID no. 12721827

SEQ ID NO: 93776 - protein, 327 aa, Arabidopsis thaliana; identical to SEQ ID NO: 90020
  peptide (1)..(327): Ceres Seq. ID no. 12721828

SEQ ID NO: 93777 - protein, 324 aa, Arabidopsis thaliana; identical to SEQ ID NO: 90021
  peptide (1)..(324): Ceres Seq. ID no. 12721829

SEQ ID NO: 93778 - DNA, 765 bp, Arabidopsis thaliana; identical to SEQ ID NO: 90022
  misc_feature (1)..(765): Ceres Seq. ID no. 12721830
  misc_feature (1)..(765): Ortholog of  Ceres SEQ ID NO 13595568 as cited in SEQ ID NO 56764

SEQ ID NO: 93779 - protein, 254 aa, Arabidopsis thaliana; identical to SEQ ID NO: 90023
  peptide (1)..(254): Ceres Seq. ID no. 12721831

SEQ ID NO: 93780 - protein, 245 aa, Arabidopsis thaliana; identical to SEQ ID NO: 90024
  peptide (1)..(245): Ceres Seq. ID no. 12721832

SEQ ID NO: 93781 - protein, 200 aa, Arabidopsis thaliana; identical to SEQ ID NO: 90025
  peptide (1)..(200): Ceres Seq. ID no. 12721833

SEQ ID NO: 93782 - DNA, 1476 bp, Arabidopsis thaliana; identical to SEQ ID NO: 90026
  misc_feature (1)..(1476): Ceres Seq. ID no. 12721837
  misc_feature (1)..(1476): Ortholog of  Ceres SEQ ID NO 15177258 as cited in SEQ ID NO 51386

SEQ ID NO: 93783 - protein, 491 aa, Arabidopsis thaliana; identical to SEQ ID NO: 90027
  peptide (1)..(491): Ceres Seq. ID no. 12721838

SEQ ID NO: 93784 - protein, 460 aa, Arabidopsis thaliana; identical to SEQ ID NO: 90028
  peptide (1)..(460): Ceres Seq. ID no. 12721839

SEQ ID NO: 93785 - protein, 365 aa, Arabidopsis thaliana; identical to SEQ ID NO: 90029
  peptide (1)..(365): Ceres Seq. ID no. 12721840

SEQ ID NO: 93786 - DNA, 726 bp, Arabidopsis thaliana; identical to SEQ ID NO: 90030
  misc_feature (1)..(726): Ceres Seq. ID no. 12721845
  misc_feature (1)..(726): Ortholog of  Ceres SEQ ID NO 13595568 as cited in SEQ ID NO 56764

SEQ ID NO: 93787 - protein, 241 aa, Arabidopsis thaliana; identical to SEQ ID NO: 90031
  peptide (1)..(241): Ceres Seq. ID no. 12721846

SEQ ID NO: 93788 - protein, 171 aa, Arabidopsis thaliana; identical to SEQ ID NO: 90032
  peptide (1)..(171): Ceres Seq. ID no. 12721847

SEQ ID NO: 93789 - DNA, 1190 bp, Arabidopsis thaliana; identical to SEQ ID NO: 90033
  misc_feature (1)..(1190): Ceres Seq. ID no. 12721862
  misc_feature (1)..(1190): Ortholog of  Ceres SEQ ID NO 15175048 as cited in SEQ ID NO 59975
  misc_feature (1)..(1190): Ortholog of  Ceres SEQ ID NO 13597333 as cited in SEQ ID NO 63974
  misc_feature (1)..(1190): Ortholog of  Ceres SEQ ID NO 13599307 as cited in SEQ ID NO 0
  misc_feature (1)..(1190): Ortholog of  Ceres SEQ ID NO 15179517 as cited in SEQ ID NO 0

SEQ ID NO: 93790 - protein, 327 aa, Arabidopsis thaliana; identical to SEQ ID NO: 22751
  peptide (1)..(327): Ceres Seq. ID no. 12721863

SEQ ID NO: 93791 - protein, 309 aa, Arabidopsis thaliana; identical to SEQ ID NO: 22752
  peptide (1)..(309): Ceres Seq. ID no. 12721864

SEQ ID NO: 93792 - protein, 307 aa, Arabidopsis thaliana; identical to SEQ ID NO: 22753
  peptide (1)..(307): Ceres Seq. ID no. 12721865

SEQ ID NO: 93793 - DNA, 1482 bp, Arabidopsis thaliana; identical to SEQ ID NO: 90037
  misc_feature (1)..(1482): Ceres Seq. ID no. 12721920
  misc_feature (1)..(1482): Ortholog of  Ceres SEQ ID NO 13597407 as cited in SEQ ID NO 64106

SEQ ID NO: 93794 - protein, 493 aa, Arabidopsis thaliana; identical to SEQ ID NO: 90038
  peptide (1)..(493): Ceres Seq. ID no. 12721921

SEQ ID NO: 93795 - protein, 483 aa, Arabidopsis thaliana; identical to SEQ ID NO: 90039
  peptide (1)..(483): Ceres Seq. ID no. 12721922

SEQ ID NO: 93796 - protein, 471 aa, Arabidopsis thaliana; identical to SEQ ID NO: 90040
  peptide (1)..(471): Ceres Seq. ID no. 12721923

SEQ ID NO: 93797 - DNA, 2061 bp, Arabidopsis thaliana; identical to SEQ ID NO: 90041
  misc_feature (1)..(2061): Ceres Seq. ID no. 12721956
  misc_feature (1)..(2061): Ortholog of  Ceres SEQ ID NO 13663060 as cited in SEQ ID NO 60964
  misc_feature (1)..(2061): Ortholog of  Ceres SEQ ID NO 13598532 as cited in SEQ ID NO 65204
  misc_feature (1)..(2061): Ortholog of  Ceres SEQ ID NO 13656849 as cited in SEQ ID NO 65764
  misc_feature (1)..(2061): Ortholog of  Ceres SEQ ID NO 13656501 as cited in SEQ ID NO 69206

SEQ ID NO: 93798 - protein, 686 aa, Arabidopsis thaliana; identical to SEQ ID NO: 90042
  peptide (1)..(686): Ceres Seq. ID no. 12721957

SEQ ID NO: 93799 - protein, 609 aa, Arabidopsis thaliana; identical to SEQ ID NO: 90043
  peptide (1)..(609): Ceres Seq. ID no. 12721958

SEQ ID NO: 93800 - protein, 583 aa, Arabidopsis thaliana; identical to SEQ ID NO: 90044
  peptide (1)..(583): Ceres Seq. ID no. 12721959

SEQ ID NO: 93801 - DNA, 1649 bp, Arabidopsis thaliana; identical to SEQ ID NO: 90045
  misc_feature (1)..(1649): Ceres Seq. ID no. 12721960
  misc_feature (1)..(1649): Ortholog of  Ceres SEQ ID NO 15178246 as cited in SEQ ID NO 52038

SEQ ID NO: 93802 - protein, 413 aa, Arabidopsis thaliana; identical to SEQ ID NO: 42171
  peptide (1)..(413): Ceres Seq. ID no. 12721961

SEQ ID NO: 93803 - protein, 409 aa, Arabidopsis thaliana; identical to SEQ ID NO: 42172
  peptide (1)..(409): Ceres Seq. ID no. 12721962

SEQ ID NO: 93804 - protein, 378 aa, Arabidopsis thaliana; identical to SEQ ID NO: 42173
  peptide (1)..(378): Ceres Seq. ID no. 12721963

SEQ ID NO: 93805 - DNA, 1045 bp, Arabidopsis thaliana; identical to SEQ ID NO: 90049
  misc_feature (1)..(1045): Ceres Seq. ID no. 12722002
  misc_feature (1)..(1045): Ortholog of  Ceres SEQ ID NO 15175949 as cited in SEQ ID NO 58819
  misc_feature (1)..(1045): Ortholog of  Ceres SEQ ID NO 13596660 as cited in SEQ ID NO 63180

SEQ ID NO: 93806 - protein, 299 aa, Arabidopsis thaliana; identical to SEQ ID NO: 90050
  peptide (1)..(299): Ceres Seq. ID no. 12722003

SEQ ID NO: 93807 - protein, 276 aa, Arabidopsis thaliana; identical to SEQ ID NO: 90051
  peptide (1)..(276): Ceres Seq. ID no. 12722004

SEQ ID NO: 93808 - protein, 170 aa, Arabidopsis thaliana; identical to SEQ ID NO: 90052
  peptide (1)..(170): Ceres Seq. ID no. 12722005

SEQ ID NO: 93809 - DNA, 852 bp, Arabidopsis thaliana; identical to SEQ ID NO: 90053
  misc_feature (1)..(852): Ceres Seq. ID no. 12722006
  misc_feature (1)..(852): Ortholog of  Ceres SEQ ID NO 15177518 as cited in SEQ ID NO 1034
  misc_feature (1)..(852): Ortholog of  Ceres SEQ ID NO 14313694 as cited in SEQ ID NO 54115

SEQ ID NO: 93810 - protein, 283 aa, Arabidopsis thaliana; identical to SEQ ID NO: 90054
  peptide (1)..(283): Ceres Seq. ID no. 12722007

SEQ ID NO: 93811 - protein, 201 aa, Arabidopsis thaliana; identical to SEQ ID NO: 90055
  peptide (1)..(201): Ceres Seq. ID no. 12722008

SEQ ID NO: 93812 - protein, 196 aa, Arabidopsis thaliana; identical to SEQ ID NO: 90056
  peptide (1)..(196): Ceres Seq. ID no. 12722009

SEQ ID NO: 93813 - DNA, 2057 bp, Arabidopsis thaliana; identical to SEQ ID NO: 90057
  misc_feature (1)..(2057): Ceres Seq. ID no. 12722014
  misc_feature (1)..(2057): Ortholog of  Ceres SEQ ID NO 14302875 as cited in SEQ ID NO 66242
  misc_feature (1)..(2057): Ortholog of  Ceres SEQ ID NO 13660287 as cited in SEQ ID NO 67316

SEQ ID NO: 93814 - protein, 532 aa, Arabidopsis thaliana; identical to SEQ ID NO: 90058
  peptide (1)..(532): Ceres Seq. ID no. 12722015

SEQ ID NO: 93815 - protein, 462 aa, Arabidopsis thaliana; identical to SEQ ID NO: 90059
  peptide (1)..(462): Ceres Seq. ID no. 12722016

SEQ ID NO: 93816 - protein, 457 aa, Arabidopsis thaliana; identical to SEQ ID NO: 90060
  peptide (1)..(457): Ceres Seq. ID no. 12722017

SEQ ID NO: 93817 - DNA, 1066 bp, Arabidopsis thaliana; identical to SEQ ID NO: 90061
  misc_feature (1)..(1066): Ceres Seq. ID no. 12722058
  misc_feature (1)..(1066): Ortholog of  Ceres SEQ ID NO 15176306 as cited in SEQ ID NO 52784
  misc_feature (1)..(1066): Ortholog of  Ceres SEQ ID NO 13582624 as cited in SEQ ID NO 56287
  misc_feature (1)..(1066): Ortholog of  Ceres SEQ ID NO 14307280 as cited in SEQ ID NO 59443
  misc_feature (1)..(1066): Ortholog of  Ceres SEQ ID NO 14316536 as cited in SEQ ID NO 60272
  misc_feature (1)..(1066): Ortholog of  Ceres SEQ ID NO 13597264 as cited in SEQ ID NO 63897
  misc_feature (1)..(1066): Ortholog of  Ceres SEQ ID NO 13598570 as cited in SEQ ID NO 65434
  misc_feature (1)..(1066): Ortholog of  Ceres SEQ ID NO 13656452 as cited in SEQ ID NO 65745
  misc_feature (1)..(1066): Ortholog of  Ceres SEQ ID NO 13660333 as cited in SEQ ID NO 67464
  misc_feature (1)..(1066): Ortholog of  Ceres SEQ ID NO 13596238 as cited in SEQ ID NO 68834
  misc_feature (1)..(1066): Ortholog of  Ceres SEQ ID NO 15174329 as cited in SEQ ID NO 0

SEQ ID NO: 93818 - protein, 327 aa, Arabidopsis thaliana; identical to SEQ ID NO: 90062
  peptide (1)..(327): Ceres Seq. ID no. 12722059

SEQ ID NO: 93819 - protein, 322 aa, Arabidopsis thaliana; identical to SEQ ID NO: 90063
  peptide (1)..(322): Ceres Seq. ID no. 12722060

SEQ ID NO: 93820 - protein, 238 aa, Arabidopsis thaliana; identical to SEQ ID NO: 90064
  peptide (1)..(238): Ceres Seq. ID no. 12722061

SEQ ID NO: 93821 - DNA, 2221 bp, Arabidopsis thaliana; identical to SEQ ID NO: 90065
  misc_feature (1)..(2221): Ceres Seq. ID no. 12722066
  misc_feature (1)..(2221): Ortholog of  Ceres SEQ ID NO 13586013 as cited in SEQ ID NO 1182

SEQ ID NO: 93822 - protein, 686 aa, Arabidopsis thaliana; identical to SEQ ID NO: 90066
  peptide (1)..(686): Ceres Seq. ID no. 12722067

SEQ ID NO: 93823 - protein, 677 aa, Arabidopsis thaliana; identical to SEQ ID NO: 90067
  peptide (1)..(677): Ceres Seq. ID no. 12722068

SEQ ID NO: 93824 - protein, 621 aa, Arabidopsis thaliana; identical to SEQ ID NO: 90068
  peptide (1)..(621): Ceres Seq. ID no. 12722069

SEQ ID NO: 93825 - DNA, 1913 bp, Arabidopsis thaliana; identical to SEQ ID NO: 90069
  misc_feature (1)..(1913): Ceres Seq. ID no. 12722077
  misc_feature (1)..(1913): Ortholog of  Ceres SEQ ID NO 13597865 as cited in SEQ ID NO 64954

SEQ ID NO: 93826 - protein, 524 aa, Arabidopsis thaliana; identical to SEQ ID NO: 90070
  peptide (1)..(524): Ceres Seq. ID no. 12722078

SEQ ID NO: 93827 - protein, 445 aa, Arabidopsis thaliana; identical to SEQ ID NO: 90071
  peptide (1)..(445): Ceres Seq. ID no. 12722079

SEQ ID NO: 93828 - protein, 341 aa, Arabidopsis thaliana; identical to SEQ ID NO: 90072
  peptide (1)..(341): Ceres Seq. ID no. 12722080

SEQ ID NO: 93829 - DNA, 798 bp, Arabidopsis thaliana; identical to SEQ ID NO: 90073
  misc_feature (1)..(798): Ceres Seq. ID no. 12722081
  misc_feature (1)..(798): Ortholog of  Ceres SEQ ID NO 14305871 as cited in SEQ ID NO 57224

SEQ ID NO: 93830 - protein, 213 aa, Arabidopsis thaliana; identical to SEQ ID NO: 90074
  peptide (1)..(213): Ceres Seq. ID no. 12722082

SEQ ID NO: 93831 - protein, 211 aa, Arabidopsis thaliana; identical to SEQ ID NO: 90075
  peptide (1)..(211): Ceres Seq. ID no. 12722083

SEQ ID NO: 93832 - DNA, 680 bp, Arabidopsis thaliana; identical to SEQ ID NO: 90076
  misc_feature (1)..(680): Ceres Seq. ID no. 12722096
  misc_feature (1)..(680): Ortholog of  Ceres SEQ ID NO 14314807 as cited in SEQ ID NO 52563

SEQ ID NO: 93833 - protein, 141 aa, Arabidopsis thaliana; identical to SEQ ID NO: 90077
  peptide (1)..(141): Ceres Seq. ID no. 12722097

SEQ ID NO: 93834 - protein, 131 aa, Arabidopsis thaliana; identical to SEQ ID NO: 90078
  peptide (1)..(131): Ceres Seq. ID no. 12722098

SEQ ID NO: 93835 - protein, 115 aa, Arabidopsis thaliana; identical to SEQ ID NO: 90079
  peptide (1)..(115): Ceres Seq. ID no. 12722099

SEQ ID NO: 93836 - DNA, 2460 bp, Arabidopsis thaliana; identical to SEQ ID NO: 90080
  misc_feature (1)..(2460): Ceres Seq. ID no. 12722108
  misc_feature (1)..(2460): Ortholog of  Ceres SEQ ID NO 13654989 as cited in SEQ ID NO 63117
  misc_feature (1)..(2460): Ortholog of  Ceres SEQ ID NO 13584744 as cited in SEQ ID NO 69137

SEQ ID NO: 93837 - protein, 819 aa, Arabidopsis thaliana; identical to SEQ ID NO: 90081
  peptide (1)..(819): Ceres Seq. ID no. 12722109

SEQ ID NO: 93838 - protein, 788 aa, Arabidopsis thaliana; identical to SEQ ID NO: 90082
  peptide (1)..(788): Ceres Seq. ID no. 12722110

SEQ ID NO: 93839 - protein, 719 aa, Arabidopsis thaliana; identical to SEQ ID NO: 90083
  peptide (1)..(719): Ceres Seq. ID no. 12722111

SEQ ID NO: 93840 - DNA, 1308 bp, Arabidopsis thaliana; identical to SEQ ID NO: 90084
  misc_feature (1)..(1308): Ceres Seq. ID no. 12722125
  misc_feature (1)..(1308): Ortholog of  Ceres SEQ ID NO 14302462 as cited in SEQ ID NO 65678

SEQ ID NO: 93841 - protein, 435 aa, Arabidopsis thaliana; identical to SEQ ID NO: 90085
  peptide (1)..(435): Ceres Seq. ID no. 12722126

SEQ ID NO: 93842 - protein, 294 aa, Arabidopsis thaliana; identical to SEQ ID NO: 90086
  peptide (1)..(294): Ceres Seq. ID no. 12722127

SEQ ID NO: 93843 - protein, 227 aa, Arabidopsis thaliana; identical to SEQ ID NO: 90087
  peptide (1)..(227): Ceres Seq. ID no. 12722128

SEQ ID NO: 93844 - DNA, 1611 bp, Arabidopsis thaliana; identical to SEQ ID NO: 90088
  misc_feature (1)..(1611): Ceres Seq. ID no. 12722145
  misc_feature (1)..(1611): Ortholog of  Ceres SEQ ID NO 13594037 as cited in SEQ ID NO 55666
  misc_feature (1)..(1611): Ortholog of  Ceres SEQ ID NO 13657707 as cited in SEQ ID NO 66407

SEQ ID NO: 93845 - protein, 536 aa, Arabidopsis thaliana; identical to SEQ ID NO: 90089
  peptide (1)..(536): Ceres Seq. ID no. 12722146

SEQ ID NO: 93846 - protein, 534 aa, Arabidopsis thaliana; identical to SEQ ID NO: 90090
  peptide (1)..(534): Ceres Seq. ID no. 12722147

SEQ ID NO: 93847 - protein, 533 aa, Arabidopsis thaliana; identical to SEQ ID NO: 90091
  peptide (1)..(533): Ceres Seq. ID no. 12722148

SEQ ID NO: 93848 - DNA, 1623 bp, Arabidopsis thaliana; identical to SEQ ID NO: 90092
  misc_feature (1)..(1623): Ceres Seq. ID no. 12722149
  misc_feature (1)..(1623): Ortholog of  Ceres SEQ ID NO 13594037 as cited in SEQ ID NO 55666
  misc_feature (1)..(1623): Ortholog of  Ceres SEQ ID NO 13657707 as cited in SEQ ID NO 66407

SEQ ID NO: 93849 - protein, 540 aa, Arabidopsis thaliana; identical to SEQ ID NO: 90093
  peptide (1)..(540): Ceres Seq. ID no. 12722150

SEQ ID NO: 93850 - protein, 537 aa, Arabidopsis thaliana; identical to SEQ ID NO: 90094
  peptide (1)..(537): Ceres Seq. ID no. 12722151

SEQ ID NO: 93851 - protein, 536 aa, Arabidopsis thaliana; identical to SEQ ID NO: 90095
  peptide (1)..(536): Ceres Seq. ID no. 12722152

SEQ ID NO: 93852 - DNA, 1260 bp, Arabidopsis thaliana; identical to SEQ ID NO: 90096
  misc_feature (1)..(1260): Ceres Seq. ID no. 12722158
  misc_feature (1)..(1260): Ortholog of  Ceres SEQ ID NO 13595437 as cited in SEQ ID NO 56562
  misc_feature (1)..(1260): Ortholog of  Ceres SEQ ID NO 14315985 as cited in SEQ ID NO 57720

SEQ ID NO: 93853 - protein, 419 aa, Arabidopsis thaliana; identical to SEQ ID NO: 90097
  peptide (1)..(419): Ceres Seq. ID no. 12722159

SEQ ID NO: 93854 - protein, 352 aa, Arabidopsis thaliana; identical to SEQ ID NO: 90098
  peptide (1)..(352): Ceres Seq. ID no. 12722160

SEQ ID NO: 93855 - protein, 320 aa, Arabidopsis thaliana; identical to SEQ ID NO: 90099
  peptide (1)..(320): Ceres Seq. ID no. 12722161

SEQ ID NO: 93856 - DNA, 1828 bp, Arabidopsis thaliana; identical to SEQ ID NO: 90100
  misc_feature (1)..(1828): Ceres Seq. ID no. 12722162
  misc_feature (1)..(1828): Ortholog of  Ceres SEQ ID NO 13659033 as cited in SEQ ID NO 66372
  misc_feature (1)..(1828): Ortholog of  Ceres SEQ ID NO 13655724 as cited in SEQ ID NO 68973

SEQ ID NO: 93857 - protein, 535 aa, Arabidopsis thaliana; identical to SEQ ID NO: 90101
  peptide (1)..(535): Ceres Seq. ID no. 12722163

SEQ ID NO: 93858 - protein, 501 aa, Arabidopsis thaliana; identical to SEQ ID NO: 90102
  peptide (1)..(501): Ceres Seq. ID no. 12722164

SEQ ID NO: 93859 - protein, 352 aa, Arabidopsis thaliana; identical to SEQ ID NO: 90103
  peptide (1)..(352): Ceres Seq. ID no. 12722165

SEQ ID NO: 93860 - DNA, 1425 bp, Arabidopsis thaliana; identical to SEQ ID NO: 90104
  misc_feature (1)..(1425): Ceres Seq. ID no. 12722173
  misc_feature (1)..(1425): Ortholog of  Ceres SEQ ID NO 15168429 as cited in SEQ ID NO 57818

SEQ ID NO: 93861 - protein, 474 aa, Arabidopsis thaliana; identical to SEQ ID NO: 90105
  peptide (1)..(474): Ceres Seq. ID no. 12722174

SEQ ID NO: 93862 - protein, 427 aa, Arabidopsis thaliana; identical to SEQ ID NO: 90106
  peptide (1)..(427): Ceres Seq. ID no. 12722175

SEQ ID NO: 93863 - protein, 344 aa, Arabidopsis thaliana; identical to SEQ ID NO: 90107
  peptide (1)..(344): Ceres Seq. ID no. 12722176

SEQ ID NO: 93864 - DNA, 1251 bp, Arabidopsis thaliana; identical to SEQ ID NO: 90108
  misc_feature (1)..(1251): Ceres Seq. ID no. 12722181
  misc_feature (1)..(1251): Ortholog of  Ceres SEQ ID NO 12587035 as cited in SEQ ID NO 63605
  misc_feature (1)..(1251): Ortholog of  Ceres SEQ ID NO 14302836 as cited in SEQ ID NO 65013
  misc_feature (1)..(1251): Ortholog of  Ceres SEQ ID NO 13599119 as cited in SEQ ID NO 0

SEQ ID NO: 93865 - protein, 416 aa, Arabidopsis thaliana; identical to SEQ ID NO: 90109
  peptide (1)..(416): Ceres Seq. ID no. 12722182

SEQ ID NO: 93866 - protein, 386 aa, Arabidopsis thaliana; identical to SEQ ID NO: 90110
  peptide (1)..(386): Ceres Seq. ID no. 12722183

SEQ ID NO: 93867 - protein, 365 aa, Arabidopsis thaliana; identical to SEQ ID NO: 90111
  peptide (1)..(365): Ceres Seq. ID no. 12722184

SEQ ID NO: 93868 - DNA, 1965 bp, Arabidopsis thaliana; identical to SEQ ID NO: 90112
  misc_feature (1)..(1965): Ceres Seq. ID no. 12722185
  misc_feature (1)..(1965): Ortholog of  Ceres SEQ ID NO 13654989 as cited in SEQ ID NO 63117
  misc_feature (1)..(1965): Ortholog of  Ceres SEQ ID NO 13655640 as cited in SEQ ID NO 63844

SEQ ID NO: 93869 - protein, 654 aa, Arabidopsis thaliana; identical to SEQ ID NO: 90113
  peptide (1)..(654): Ceres Seq. ID no. 12722186

SEQ ID NO: 93870 - protein, 532 aa, Arabidopsis thaliana; identical to SEQ ID NO: 90114
  peptide (1)..(532): Ceres Seq. ID no. 12722187

SEQ ID NO: 93871 - protein, 485 aa, Arabidopsis thaliana; identical to SEQ ID NO: 90115
  peptide (1)..(485): Ceres Seq. ID no. 12722188

SEQ ID NO: 93872 - DNA, 1938 bp, Arabidopsis thaliana; identical to SEQ ID NO: 90116
  misc_feature (1)..(1938): Ceres Seq. ID no. 12722213
  misc_feature (1)..(1938): Ortholog of  Ceres SEQ ID NO 14312408 as cited in SEQ ID NO 55042

SEQ ID NO: 93873 - protein, 586 aa, Arabidopsis thaliana; identical to SEQ ID NO: 90117
  peptide (1)..(586): Ceres Seq. ID no. 12722214

SEQ ID NO: 93874 - protein, 553 aa, Arabidopsis thaliana; identical to SEQ ID NO: 90118
  peptide (1)..(553): Ceres Seq. ID no. 12722215

SEQ ID NO: 93875 - protein, 545 aa, Arabidopsis thaliana; identical to SEQ ID NO: 90119
  peptide (1)..(545): Ceres Seq. ID no. 12722216

SEQ ID NO: 93876 - DNA, 675 bp, Arabidopsis thaliana; identical to SEQ ID NO: 90120
  misc_feature (1)..(675): Ceres Seq. ID no. 12722221
  misc_feature (1)..(675): Ortholog of  Ceres SEQ ID NO 15175941 as cited in SEQ ID NO 1355
  misc_feature (1)..(675): Ortholog of  Ceres SEQ ID NO 13661642 as cited in SEQ ID NO 61598

SEQ ID NO: 93877 - protein, 224 aa, Arabidopsis thaliana; identical to SEQ ID NO: 90121
  peptide (1)..(224): Ceres Seq. ID no. 12722222

SEQ ID NO: 93878 - protein, 137 aa, Arabidopsis thaliana; identical to SEQ ID NO: 90122
  peptide (1)..(137): Ceres Seq. ID no. 12722223

SEQ ID NO: 93879 - DNA, 777 bp, Arabidopsis thaliana; identical to SEQ ID NO: 90123
  misc_feature (1)..(777): Ceres Seq. ID no. 12722228
  misc_feature (1)..(777): Ortholog of  Ceres SEQ ID NO 13662654 as cited in SEQ ID NO 66150

SEQ ID NO: 93880 - protein, 258 aa, Arabidopsis thaliana; identical to SEQ ID NO: 84911
  peptide (1)..(258): Ceres Seq. ID no. 12722229

SEQ ID NO: 93881 - protein, 150 aa, Arabidopsis thaliana; identical to SEQ ID NO: 90125
  peptide (1)..(150): Ceres Seq. ID no. 12722230

SEQ ID NO: 93882 - DNA, 1209 bp, Arabidopsis thaliana; identical to SEQ ID NO: 90126
  misc_feature (1)..(1209): Ceres Seq. ID no. 12722247
  misc_feature (1)..(1209): Ortholog of  Ceres SEQ ID NO 13594604 as cited in SEQ ID NO 52106

SEQ ID NO: 93883 - protein, 291 aa, Arabidopsis thaliana; identical to SEQ ID NO: 90127
  peptide (1)..(291): Ceres Seq. ID no. 12722248

SEQ ID NO: 93884 - protein, 260 aa, Arabidopsis thaliana; identical to SEQ ID NO: 90128
  peptide (1)..(260): Ceres Seq. ID no. 12722249

SEQ ID NO: 93885 - protein, 258 aa, Arabidopsis thaliana; identical to SEQ ID NO: 90129
  peptide (1)..(258): Ceres Seq. ID no. 12722250

SEQ ID NO: 93886 - DNA, 858 bp, Arabidopsis thaliana; identical to SEQ ID NO: 90130
  misc_feature (1)..(858): Ceres Seq. ID no. 12722257
  misc_feature (1)..(858): Ortholog of  Ceres SEQ ID NO 14316404 as cited in SEQ ID NO 57641
  misc_feature (1)..(858): Ortholog of  Ceres SEQ ID NO 12611159 as cited in SEQ ID NO 59821

SEQ ID NO: 93887 - protein, 268 aa, Arabidopsis thaliana; identical to SEQ ID NO: 90131
  peptide (1)..(268): Ceres Seq. ID no. 12722258

SEQ ID NO: 93888 - DNA, 1560 bp, Arabidopsis thaliana; identical to SEQ ID NO: 90132
  misc_feature (1)..(1560): Ceres Seq. ID no. 12722285
  misc_feature (1)..(1560): Ortholog of  Ceres SEQ ID NO 12614670 as cited in SEQ ID NO 68565

SEQ ID NO: 93889 - protein, 519 aa, Arabidopsis thaliana; identical to SEQ ID NO: 90133
  peptide (1)..(519): Ceres Seq. ID no. 12722286

SEQ ID NO: 93890 - protein, 514 aa, Arabidopsis thaliana; identical to SEQ ID NO: 90134
  peptide (1)..(514): Ceres Seq. ID no. 12722287

SEQ ID NO: 93891 - protein, 496 aa, Arabidopsis thaliana; identical to SEQ ID NO: 90135
  peptide (1)..(496): Ceres Seq. ID no. 12722288

SEQ ID NO: 93892 - DNA, 1018 bp, Arabidopsis thaliana; identical to SEQ ID NO: 90136
  misc_feature (1)..(1018): Ceres Seq. ID no. 12722293
  misc_feature (1)..(1018): Ortholog of  Ceres SEQ ID NO 13594503 as cited in SEQ ID NO 51336
  misc_feature (1)..(1018): Ortholog of  Ceres SEQ ID NO 13599595 as cited in SEQ ID NO 0

SEQ ID NO: 93893 - protein, 256 aa, Arabidopsis thaliana; identical to SEQ ID NO: 90137
  peptide (1)..(256): Ceres Seq. ID no. 12722294

SEQ ID NO: 93894 - protein, 242 aa, Arabidopsis thaliana; identical to SEQ ID NO: 90138
  peptide (1)..(242): Ceres Seq. ID no. 12722295

SEQ ID NO: 93895 - DNA, 879 bp, Arabidopsis thaliana; identical to SEQ ID NO: 90139
  misc_feature (1)..(879): Ceres Seq. ID no. 12722305
  misc_feature (1)..(879): Ortholog of  Ceres SEQ ID NO 12582736 as cited in SEQ ID NO 51489

SEQ ID NO: 93896 - protein, 292 aa, Arabidopsis thaliana; identical to SEQ ID NO: 90140
  peptide (1)..(292): Ceres Seq. ID no. 12722306

SEQ ID NO: 93897 - DNA, 1116 bp, Arabidopsis thaliana; identical to SEQ ID NO: 90141
  misc_feature (1)..(1116): Ceres Seq. ID no. 12722311
  misc_feature (1)..(1116): Ortholog of  Ceres SEQ ID NO 13659394 as cited in SEQ ID NO 67049

SEQ ID NO: 93898 - protein, 371 aa, Arabidopsis thaliana; identical to SEQ ID NO: 90142
  peptide (1)..(371): Ceres Seq. ID no. 12722312

SEQ ID NO: 93899 - protein, 332 aa, Arabidopsis thaliana; identical to SEQ ID NO: 90143
  peptide (1)..(332): Ceres Seq. ID no. 12722313

SEQ ID NO: 93900 - protein, 276 aa, Arabidopsis thaliana; identical to SEQ ID NO: 90144
  peptide (1)..(276): Ceres Seq. ID no. 12722314

SEQ ID NO: 93901 - DNA, 1767 bp, Arabidopsis thaliana; identical to SEQ ID NO: 90145
  misc_feature (1)..(1767): Ceres Seq. ID no. 12722327
  misc_feature (1)..(1767): Ortholog of  Ceres SEQ ID NO 12586556 as cited in SEQ ID NO 64667
  misc_feature (1)..(1767): Ortholog of  Ceres SEQ ID NO 13660894 as cited in SEQ ID NO 67475

SEQ ID NO: 93902 - protein, 588 aa, Arabidopsis thaliana; identical to SEQ ID NO: 90146
  peptide (1)..(588): Ceres Seq. ID no. 12722328

SEQ ID NO: 93903 - protein, 490 aa, Arabidopsis thaliana; identical to SEQ ID NO: 90147
  peptide (1)..(490): Ceres Seq. ID no. 12722329

SEQ ID NO: 93904 - protein, 482 aa, Arabidopsis thaliana; identical to SEQ ID NO: 90148
  peptide (1)..(482): Ceres Seq. ID no. 12722330

SEQ ID NO: 93905 - DNA, 2682 bp, Arabidopsis thaliana; identical to SEQ ID NO: 90149
  misc_feature (1)..(2682): Ceres Seq. ID no. 12722353
  misc_feature (1)..(2682): Ortholog of  Ceres SEQ ID NO 12586556 as cited in SEQ ID NO 64667
  misc_feature (1)..(2682): Ortholog of  Ceres SEQ ID NO 13660894 as cited in SEQ ID NO 67475

SEQ ID NO: 93906 - protein, 893 aa, Arabidopsis thaliana; identical to SEQ ID NO: 90150
  peptide (1)..(893): Ceres Seq. ID no. 12722354

SEQ ID NO: 93907 - protein, 810 aa, Arabidopsis thaliana; identical to SEQ ID NO: 90151
  peptide (1)..(810): Ceres Seq. ID no. 12722355

SEQ ID NO: 93908 - protein, 799 aa, Arabidopsis thaliana; identical to SEQ ID NO: 90152
  peptide (1)..(799): Ceres Seq. ID no. 12722356

SEQ ID NO: 93909 - DNA, 2616 bp, Arabidopsis thaliana; identical to SEQ ID NO: 90153
  misc_feature (1)..(2616): Ceres Seq. ID no. 12722373
  misc_feature (1)..(2616): Ortholog of  Ceres SEQ ID NO 14313674 as cited in SEQ ID NO 59602

SEQ ID NO: 93910 - protein, 716 aa, Arabidopsis thaliana; identical to SEQ ID NO: 90154
  peptide (1)..(716): Ceres Seq. ID no. 12722374

SEQ ID NO: 93911 - protein, 585 aa, Arabidopsis thaliana; identical to SEQ ID NO: 90155
  peptide (1)..(585): Ceres Seq. ID no. 12722375

SEQ ID NO: 93912 - protein, 516 aa, Arabidopsis thaliana; identical to SEQ ID NO: 90156
  peptide (1)..(516): Ceres Seq. ID no. 12722376

SEQ ID NO: 93913 - DNA, 1951 bp, Arabidopsis thaliana; identical to SEQ ID NO: 90157
  misc_feature (1)..(1951): Ceres Seq. ID no. 12722399
  misc_feature (1)..(1951): Ortholog of  Ceres SEQ ID NO 13594037 as cited in SEQ ID NO 55666
  misc_feature (1)..(1951): Ortholog of  Ceres SEQ ID NO 13657707 as cited in SEQ ID NO 66407

SEQ ID NO: 93914 - protein, 601 aa, Arabidopsis thaliana; identical to SEQ ID NO: 90158
  peptide (1)..(601): Ceres Seq. ID no. 12722400

SEQ ID NO: 93915 - protein, 587 aa, Arabidopsis thaliana; identical to SEQ ID NO: 90159
  peptide (1)..(587): Ceres Seq. ID no. 12722401

SEQ ID NO: 93916 - protein, 455 aa, Arabidopsis thaliana; identical to SEQ ID NO: 90160
  peptide (1)..(455): Ceres Seq. ID no. 12722402

SEQ ID NO: 93917 - DNA, 1357 bp, Arabidopsis thaliana; identical to SEQ ID NO: 90161
  misc_feature (1)..(1357): Ceres Seq. ID no. 12722652
  misc_feature (1)..(1357): Ortholog of  Ceres SEQ ID NO 14302828 as cited in SEQ ID NO 65549

SEQ ID NO: 93918 - protein, 398 aa, Arabidopsis thaliana; identical to SEQ ID NO: 22998
  peptide (1)..(398): Ceres Seq. ID no. 12722653

SEQ ID NO: 93919 - protein, 377 aa, Arabidopsis thaliana; identical to SEQ ID NO: 22999
  peptide (1)..(377): Ceres Seq. ID no. 12722654

SEQ ID NO: 93920 - protein, 364 aa, Arabidopsis thaliana; identical to SEQ ID NO: 23000
  peptide (1)..(364): Ceres Seq. ID no. 12722655

SEQ ID NO: 93921 - DNA, 1156 bp, Arabidopsis thaliana; identical to SEQ ID NO: 90165
  misc_feature (1)..(1156): Ceres Seq. ID no. 12722660
  misc_feature (1)..(1156): Ortholog of  Ceres SEQ ID NO 14303336 as cited in SEQ ID NO 54567

SEQ ID NO: 93922 - protein, 96 aa, Arabidopsis thaliana; identical to SEQ ID NO: 90166
  peptide (1)..(96): Ceres Seq. ID no. 12722661

SEQ ID NO: 93923 - protein, 89 aa, Arabidopsis thaliana; identical to SEQ ID NO: 90167
  peptide (1)..(89): Ceres Seq. ID no. 12722662

SEQ ID NO: 93924 - protein, 62 aa, Arabidopsis thaliana; identical to SEQ ID NO: 90168
  peptide (1)..(62): Ceres Seq. ID no. 12722663

SEQ ID NO: 93925 - DNA, 3126 bp, Arabidopsis thaliana; identical to SEQ ID NO: 90169
  misc_feature (1)..(3126): Ceres Seq. ID no. 12722728
  misc_feature (1)..(3126): Ortholog of  Ceres SEQ ID NO 13597957 as cited in SEQ ID NO 60744

SEQ ID NO: 93926 - protein, 818 aa, Arabidopsis thaliana; identical to SEQ ID NO: 90170
  peptide (1)..(818): Ceres Seq. ID no. 12722729

SEQ ID NO: 93927 - protein, 790 aa, Arabidopsis thaliana; identical to SEQ ID NO: 90171
  peptide (1)..(790): Ceres Seq. ID no. 12722730

SEQ ID NO: 93928 - protein, 716 aa, Arabidopsis thaliana; identical to SEQ ID NO: 90172
  peptide (1)..(716): Ceres Seq. ID no. 12722731

SEQ ID NO: 93929 - DNA, 3690 bp, Arabidopsis thaliana; identical to SEQ ID NO: 90173
  misc_feature (1)..(3690): Ceres Seq. ID no. 12722872
  misc_feature (1)..(3690): Ortholog of  Ceres SEQ ID NO 13600310 as cited in SEQ ID NO 5086

SEQ ID NO: 93930 - protein, 1229 aa, Arabidopsis thaliana; identical to SEQ ID NO: 90174
  peptide (1)..(1229): Ceres Seq. ID no. 12722873

SEQ ID NO: 93931 - protein, 1172 aa, Arabidopsis thaliana; identical to SEQ ID NO: 90175
  peptide (1)..(1172): Ceres Seq. ID no. 12722874

SEQ ID NO: 93932 - protein, 1080 aa, Arabidopsis thaliana; identical to SEQ ID NO: 90176
  peptide (1)..(1080): Ceres Seq. ID no. 12722875

SEQ ID NO: 93933 - DNA, 621 bp, Arabidopsis thaliana; identical to SEQ ID NO: 90177
  misc_feature (1)..(621): Ceres Seq. ID no. 12722895
  misc_feature (1)..(621): Ortholog of  Ceres SEQ ID NO 14303374 as cited in SEQ ID NO 54088
  misc_feature (1)..(621): Ortholog of  Ceres SEQ ID NO 13639250 as cited in SEQ ID NO 56555
  misc_feature (1)..(621): Ortholog of  Ceres SEQ ID NO 15177034 as cited in SEQ ID NO 60024
  misc_feature (1)..(621): Ortholog of  Ceres SEQ ID NO 13598257 as cited in SEQ ID NO 63008
  misc_feature (1)..(621): Ortholog of  Ceres SEQ ID NO 13597309 as cited in SEQ ID NO 63851
  misc_feature (1)..(621): Ortholog of  Ceres SEQ ID NO 12599167 as cited in SEQ ID NO 64443

SEQ ID NO: 93934 - protein, 206 aa, Arabidopsis thaliana; identical to SEQ ID NO: 90178
  peptide (1)..(206): Ceres Seq. ID no. 12722896

SEQ ID NO: 93935 - protein, 191 aa, Arabidopsis thaliana; identical to SEQ ID NO: 90179
  peptide (1)..(191): Ceres Seq. ID no. 12722897

SEQ ID NO: 93936 - DNA, 1500 bp, Arabidopsis thaliana; identical to SEQ ID NO: 90180
  misc_feature (1)..(1500): Ceres Seq. ID no. 12722908
  misc_feature (1)..(1500): Ortholog of  Ceres SEQ ID NO 13594209 as cited in SEQ ID NO 59089
  misc_feature (1)..(1500): Ortholog of  Ceres SEQ ID NO 13502874 as cited in SEQ ID NO 66298
  misc_feature (1)..(1500): Ortholog of  Ceres SEQ ID NO 12614124 as cited in SEQ ID NO 68392

SEQ ID NO: 93937 - protein, 499 aa, Arabidopsis thaliana; identical to SEQ ID NO: 90181
  peptide (1)..(499): Ceres Seq. ID no. 12722909

SEQ ID NO: 93938 - protein, 377 aa, Arabidopsis thaliana; identical to SEQ ID NO: 90182
  peptide (1)..(377): Ceres Seq. ID no. 12722910

SEQ ID NO: 93939 - DNA, 1008 bp, Arabidopsis thaliana; identical to SEQ ID NO: 90183
  misc_feature (1)..(1008): Ceres Seq. ID no. 12722911
  misc_feature (1)..(1008): Ortholog of  Ceres SEQ ID NO 13660872 as cited in SEQ ID NO 60830

SEQ ID NO: 93940 - protein, 335 aa, Arabidopsis thaliana; identical to SEQ ID NO: 90184
  peptide (1)..(335): Ceres Seq. ID no. 12722912

SEQ ID NO: 93941 - protein, 300 aa, Arabidopsis thaliana; identical to SEQ ID NO: 90185
  peptide (1)..(300): Ceres Seq. ID no. 12722913

SEQ ID NO: 93942 - protein, 201 aa, Arabidopsis thaliana; identical to SEQ ID NO: 90186
  peptide (1)..(201): Ceres Seq. ID no. 12722914

SEQ ID NO: 93943 - DNA, 2224 bp, Arabidopsis thaliana; identical to SEQ ID NO: 90187
  misc_feature (1)..(2224): Ceres Seq. ID no. 12722933
  misc_feature (1)..(2224): Ortholog of  Ceres SEQ ID NO 15169037 as cited in SEQ ID NO 58715
  misc_feature (1)..(2224): Ortholog of  Ceres SEQ ID NO 15224680 as cited in SEQ ID NO 59829
  misc_feature (1)..(2224): Ortholog of  Ceres SEQ ID NO 12627215 as cited in SEQ ID NO 60976

SEQ ID NO: 93944 - protein, 631 aa, Arabidopsis thaliana; identical to SEQ ID NO: 90188
  peptide (1)..(631): Ceres Seq. ID no. 12722934

SEQ ID NO: 93945 - protein, 600 aa, Arabidopsis thaliana; identical to SEQ ID NO: 90189
  peptide (1)..(600): Ceres Seq. ID no. 12722935

SEQ ID NO: 93946 - protein, 570 aa, Arabidopsis thaliana; identical to SEQ ID NO: 90190
  peptide (1)..(570): Ceres Seq. ID no. 12722936

SEQ ID NO: 93947 - DNA, 3270 bp, Arabidopsis thaliana; identical to SEQ ID NO: 90191
  misc_feature (1)..(3270): Ceres Seq. ID no. 12722955
  misc_feature (1)..(3270): Ortholog of  Ceres SEQ ID NO 13600310 as cited in SEQ ID NO 5086

SEQ ID NO: 93948 - protein, 1089 aa, Arabidopsis thaliana; identical to SEQ ID NO: 90192
  peptide (1)..(1089): Ceres Seq. ID no. 12722956

SEQ ID NO: 93949 - protein, 1084 aa, Arabidopsis thaliana; identical to SEQ ID NO: 90193
  peptide (1)..(1084): Ceres Seq. ID no. 12722957

SEQ ID NO: 93950 - protein, 1021 aa, Arabidopsis thaliana; identical to SEQ ID NO: 90194
  peptide (1)..(1021): Ceres Seq. ID no. 12722958

SEQ ID NO: 93951 - DNA, 961 bp, Arabidopsis thaliana; identical to SEQ ID NO: 90195
  misc_feature (1)..(961): Ceres Seq. ID no. 12722959
  misc_feature (1)..(961): Ortholog of  Ceres SEQ ID NO 12333459 as cited in SEQ ID NO 20477
  misc_feature (1)..(961): Ortholog of  Ceres SEQ ID NO 15176155 as cited in SEQ ID NO 0

SEQ ID NO: 93952 - protein, 245 aa, Arabidopsis thaliana; identical to SEQ ID NO: 90196
  peptide (1)..(245): Ceres Seq. ID no. 12722960

SEQ ID NO: 93953 - DNA, 1605 bp, Arabidopsis thaliana; identical to SEQ ID NO: 90197
  misc_feature (1)..(1605): Ceres Seq. ID no. 12722978
  misc_feature (1)..(1605): Ortholog of  Ceres SEQ ID NO 15176588 as cited in SEQ ID NO 60461

SEQ ID NO: 93954 - protein, 534 aa, Arabidopsis thaliana; identical to SEQ ID NO: 90198
  peptide (1)..(534): Ceres Seq. ID no. 12722979

SEQ ID NO: 93955 - protein, 448 aa, Arabidopsis thaliana; identical to SEQ ID NO: 90199
  peptide (1)..(448): Ceres Seq. ID no. 12722980

SEQ ID NO: 93956 - protein, 409 aa, Arabidopsis thaliana; identical to SEQ ID NO: 90200
  peptide (1)..(409): Ceres Seq. ID no. 12722981

SEQ ID NO: 93957 - DNA, 918 bp, Arabidopsis thaliana; identical to SEQ ID NO: 90201
  misc_feature (1)..(918): Ceres Seq. ID no. 12722982
  misc_feature (1)..(918): Ortholog of  Ceres SEQ ID NO 15179163 as cited in SEQ ID NO 0

SEQ ID NO: 93958 - protein, 220 aa, Arabidopsis thaliana; identical to SEQ ID NO: 90202
  peptide (1)..(220): Ceres Seq. ID no. 12722983

SEQ ID NO: 93959 - protein, 197 aa, Arabidopsis thaliana; identical to SEQ ID NO: 75073
  peptide (1)..(197): Ceres Seq. ID no. 12722984

SEQ ID NO: 93960 - protein, 110 aa, Arabidopsis thaliana; identical to SEQ ID NO: 75074
  peptide (1)..(110): Ceres Seq. ID no. 12722985

SEQ ID NO: 93961 - DNA, 1896 bp, Arabidopsis thaliana; identical to SEQ ID NO: 90205
  misc_feature (1)..(1896): Ceres Seq. ID no. 12723002
  misc_feature (1)..(1896): Ortholog of  Ceres SEQ ID NO 14311232 as cited in SEQ ID NO 53073

SEQ ID NO: 93962 - protein, 569 aa, Arabidopsis thaliana; identical to SEQ ID NO: 90206
  peptide (1)..(569): Ceres Seq. ID no. 12723003

SEQ ID NO: 93963 - protein, 487 aa, Arabidopsis thaliana; identical to SEQ ID NO: 86417
  peptide (1)..(487): Ceres Seq. ID no. 12723004

SEQ ID NO: 93964 - protein, 461 aa, Arabidopsis thaliana; identical to SEQ ID NO: 86418
  peptide (1)..(461): Ceres Seq. ID no. 12723005

SEQ ID NO: 93965 - DNA, 972 bp, Arabidopsis thaliana; identical to SEQ ID NO: 90209
  misc_feature (1)..(972): Ceres Seq. ID no. 12723010
  misc_feature (1)..(972): Ortholog of  Ceres SEQ ID NO 15174863 as cited in SEQ ID NO 51281
  misc_feature (1)..(972): Ortholog of  Ceres SEQ ID NO 12614972 as cited in SEQ ID NO 61986
  misc_feature (1)..(972): Ortholog of  Ceres SEQ ID NO 14302317 as cited in SEQ ID NO 63244
  misc_feature (1)..(972): Ortholog of  Ceres SEQ ID NO 12625706 as cited in SEQ ID NO 64144
  misc_feature (1)..(972): Ortholog of  Ceres SEQ ID NO 13584933 as cited in SEQ ID NO 65009
  misc_feature (1)..(972): Ortholog of  Ceres SEQ ID NO 12634984 as cited in SEQ ID NO 0
  misc_feature (1)..(972): Ortholog of  Ceres SEQ ID NO 13599377 as cited in SEQ ID NO 0

SEQ ID NO: 93966 - protein, 323 aa, Arabidopsis thaliana; identical to SEQ ID NO: 90210
  peptide (1)..(323): Ceres Seq. ID no. 12723011

SEQ ID NO: 93967 - protein, 321 aa, Arabidopsis thaliana; identical to SEQ ID NO: 90211
  peptide (1)..(321): Ceres Seq. ID no. 12723012

SEQ ID NO: 93968 - DNA, 1050 bp, Arabidopsis thaliana; identical to SEQ ID NO: 90212
  misc_feature (1)..(1050): Ceres Seq. ID no. 12723062
  misc_feature (1)..(1050): Ortholog of  Ceres SEQ ID NO 13597380 as cited in SEQ ID NO 64054
  misc_feature (1)..(1050): Ortholog of  Ceres SEQ ID NO 12625474 as cited in SEQ ID NO 64169
  misc_feature (1)..(1050): Ortholog of  Ceres SEQ ID NO 13597502 as cited in SEQ ID NO 64681

SEQ ID NO: 93969 - protein, 349 aa, Arabidopsis thaliana; identical to SEQ ID NO: 90213
  peptide (1)..(349): Ceres Seq. ID no. 12723063

SEQ ID NO: 93970 - protein, 311 aa, Arabidopsis thaliana; identical to SEQ ID NO: 90214
  peptide (1)..(311): Ceres Seq. ID no. 12723064

SEQ ID NO: 93971 - protein, 255 aa, Arabidopsis thaliana; identical to SEQ ID NO: 90215
  peptide (1)..(255): Ceres Seq. ID no. 12723065

SEQ ID NO: 93972 - DNA, 1938 bp, Arabidopsis thaliana; identical to SEQ ID NO: 90216
  misc_feature (1)..(1938): Ceres Seq. ID no. 12723110
  misc_feature (1)..(1938): Ortholog of  Ceres SEQ ID NO 15171212 as cited in SEQ ID NO 56899
  misc_feature (1)..(1938): Ortholog of  Ceres SEQ ID NO 12613725 as cited in SEQ ID NO 68196

SEQ ID NO: 93973 - protein, 591 aa, Arabidopsis thaliana; identical to SEQ ID NO: 90217
  peptide (1)..(591): Ceres Seq. ID no. 12723111

SEQ ID NO: 93974 - protein, 547 aa, Arabidopsis thaliana; identical to SEQ ID NO: 90218
  peptide (1)..(547): Ceres Seq. ID no. 12723112

SEQ ID NO: 93975 - protein, 532 aa, Arabidopsis thaliana; identical to SEQ ID NO: 90219
  peptide (1)..(532): Ceres Seq. ID no. 12723113

SEQ ID NO: 93976 - DNA, 1028 bp, Arabidopsis thaliana; identical to SEQ ID NO: 90220
  misc_feature (1)..(1028): Ceres Seq. ID no. 12723139
  misc_feature (1)..(1028): Ortholog of  Ceres SEQ ID NO 15178083 as cited in SEQ ID NO 56185
  misc_feature (1)..(1028): Ortholog of  Ceres SEQ ID NO 15225046 as cited in SEQ ID NO 57061
  misc_feature (1)..(1028): Ortholog of  Ceres SEQ ID NO 15173586 as cited in SEQ ID NO 61901
  misc_feature (1)..(1028): Ortholog of  Ceres SEQ ID NO 15179881 as cited in SEQ ID NO 66861

SEQ ID NO: 93977 - protein, 249 aa, Arabidopsis thaliana; identical to SEQ ID NO: 90221
  peptide (1)..(249): Ceres Seq. ID no. 12723140

SEQ ID NO: 93978 - protein, 231 aa, Arabidopsis thaliana; identical to SEQ ID NO: 90222
  peptide (1)..(231): Ceres Seq. ID no. 12723141

SEQ ID NO: 93979 - protein, 217 aa, Arabidopsis thaliana; identical to SEQ ID NO: 90223
  peptide (1)..(217): Ceres Seq. ID no. 12723142

SEQ ID NO: 93980 - DNA, 1174 bp, Arabidopsis thaliana; identical to SEQ ID NO: 90224
  misc_feature (1)..(1174): Ceres Seq. ID no. 12723147
  misc_feature (1)..(1174): Ortholog of  Ceres SEQ ID NO 12474685 as cited in SEQ ID NO 88
  misc_feature (1)..(1174): Ortholog of  Ceres SEQ ID NO 13638574 as cited in SEQ ID NO 51223
  misc_feature (1)..(1174): Ortholog of  Ceres SEQ ID NO 12610790 as cited in SEQ ID NO 56123
  misc_feature (1)..(1174): Ortholog of  Ceres SEQ ID NO 14315399 as cited in SEQ ID NO 57112
  misc_feature (1)..(1174): Ortholog of  Ceres SEQ ID NO 13596388 as cited in SEQ ID NO 62129
  misc_feature (1)..(1174): Ortholog of  Ceres SEQ ID NO 13655636 as cited in SEQ ID NO 63519
  misc_feature (1)..(1174): Ortholog of  Ceres SEQ ID NO 13655896 as cited in SEQ ID NO 64970

SEQ ID NO: 93981 - protein, 326 aa, Arabidopsis thaliana; identical to SEQ ID NO: 90225
  peptide (1)..(326): Ceres Seq. ID no. 12723148

SEQ ID NO: 93982 - protein, 306 aa, Arabidopsis thaliana; identical to SEQ ID NO: 90226
  peptide (1)..(306): Ceres Seq. ID no. 12723149

SEQ ID NO: 93983 - protein, 289 aa, Arabidopsis thaliana; identical to SEQ ID NO: 90227
  peptide (1)..(289): Ceres Seq. ID no. 12723150

SEQ ID NO: 93984 - DNA, 1539 bp, Arabidopsis thaliana; identical to SEQ ID NO: 90228
  misc_feature (1)..(1539): Ceres Seq. ID no. 12723159
  misc_feature (1)..(1539): Ortholog of  Ceres SEQ ID NO 13600220 as cited in SEQ ID NO 0

SEQ ID NO: 93985 - protein, 512 aa, Arabidopsis thaliana; identical to SEQ ID NO: 90229
  peptide (1)..(512): Ceres Seq. ID no. 12723160

SEQ ID NO: 93986 - protein, 426 aa, Arabidopsis thaliana; identical to SEQ ID NO: 90230
  peptide (1)..(426): Ceres Seq. ID no. 12723161

SEQ ID NO: 93987 - protein, 354 aa, Arabidopsis thaliana; identical to SEQ ID NO: 90231
  peptide (1)..(354): Ceres Seq. ID no. 12723162

SEQ ID NO: 93988 - DNA, 2586 bp, Arabidopsis thaliana; identical to SEQ ID NO: 90232
  misc_feature (1)..(2586): Ceres Seq. ID no. 12723163
  misc_feature (1)..(2586): Ortholog of  Ceres SEQ ID NO 15168977 as cited in SEQ ID NO 20587

SEQ ID NO: 93989 - protein, 861 aa, Arabidopsis thaliana; identical to SEQ ID NO: 90233
  peptide (1)..(861): Ceres Seq. ID no. 12723164

SEQ ID NO: 93990 - protein, 831 aa, Arabidopsis thaliana; identical to SEQ ID NO: 90234
  peptide (1)..(831): Ceres Seq. ID no. 12723165

SEQ ID NO: 93991 - protein, 701 aa, Arabidopsis thaliana; identical to SEQ ID NO: 90235
  peptide (1)..(701): Ceres Seq. ID no. 12723166

SEQ ID NO: 93992 - DNA, 1815 bp, Arabidopsis thaliana; identical to SEQ ID NO: 90236
  misc_feature (1)..(1815): Ceres Seq. ID no. 12723177
  misc_feature (1)..(1815): Ortholog of  Ceres SEQ ID NO 13593834 as cited in SEQ ID NO 53551

SEQ ID NO: 93993 - protein, 604 aa, Arabidopsis thaliana; identical to SEQ ID NO: 90237
  peptide (1)..(604): Ceres Seq. ID no. 12723178

SEQ ID NO: 93994 - protein, 578 aa, Arabidopsis thaliana; identical to SEQ ID NO: 90238
  peptide (1)..(578): Ceres Seq. ID no. 12723179

SEQ ID NO: 93995 - protein, 491 aa, Arabidopsis thaliana; identical to SEQ ID NO: 90239
  peptide (1)..(491): Ceres Seq. ID no. 12723180

SEQ ID NO: 93996 - DNA, 1350 bp, Arabidopsis thaliana; identical to SEQ ID NO: 90240
  misc_feature (1)..(1350): Ceres Seq. ID no. 12723189
  misc_feature (1)..(1350): Ortholog of  Ceres SEQ ID NO 13600220 as cited in SEQ ID NO 0

SEQ ID NO: 93997 - protein, 449 aa, Arabidopsis thaliana; identical to SEQ ID NO: 90241
  peptide (1)..(449): Ceres Seq. ID no. 12723190

SEQ ID NO: 93998 - protein, 363 aa, Arabidopsis thaliana; identical to SEQ ID NO: 90242
  peptide (1)..(363): Ceres Seq. ID no. 12723191

SEQ ID NO: 93999 - protein, 292 aa, Arabidopsis thaliana; identical to SEQ ID NO: 90243
  peptide (1)..(292): Ceres Seq. ID no. 12723192

SEQ ID NO: 94000 - DNA, 1005 bp, Arabidopsis thaliana; identical to SEQ ID NO: 90244
  misc_feature (1)..(1005): Ceres Seq. ID no. 12723239
  misc_feature (1)..(1005): Ortholog of  Ceres SEQ ID NO 13662367 as cited in SEQ ID NO 67774

SEQ ID NO: 94001 - protein, 334 aa, Arabidopsis thaliana; identical to SEQ ID NO: 90245
  peptide (1)..(334): Ceres Seq. ID no. 12723240

SEQ ID NO: 94002 - protein, 325 aa, Arabidopsis thaliana; identical to SEQ ID NO: 90246
  peptide (1)..(325): Ceres Seq. ID no. 12723241

SEQ ID NO: 94003 - protein, 276 aa, Arabidopsis thaliana; identical to SEQ ID NO: 90247
  peptide (1)..(276): Ceres Seq. ID no. 12723242

SEQ ID NO: 94004 - DNA, 1406 bp, Arabidopsis thaliana; identical to SEQ ID NO: 90248
  misc_feature (1)..(1406): Ceres Seq. ID no. 12723259
  misc_feature (1)..(1406): Ortholog of  Ceres SEQ ID NO 13596585 as cited in SEQ ID NO 62424
  misc_feature (1)..(1406): Ortholog of  Ceres SEQ ID NO 15225240 as cited in SEQ ID NO 66495

SEQ ID NO: 94005 - protein, 385 aa, Arabidopsis thaliana; identical to SEQ ID NO: 90249
  peptide (1)..(385): Ceres Seq. ID no. 12723260

SEQ ID NO: 94006 - protein, 320 aa, Arabidopsis thaliana; identical to SEQ ID NO: 90250
  peptide (1)..(320): Ceres Seq. ID no. 12723261

SEQ ID NO: 94007 - protein, 293 aa, Arabidopsis thaliana; identical to SEQ ID NO: 90251
  peptide (1)..(293): Ceres Seq. ID no. 12723262

SEQ ID NO: 94008 - DNA, 849 bp, Arabidopsis thaliana; identical to SEQ ID NO: 90252
  misc_feature (1)..(849): Ceres Seq. ID no. 12723267
  misc_feature (1)..(849): Ortholog of  Ceres SEQ ID NO 13597380 as cited in SEQ ID NO 64054
  misc_feature (1)..(849): Ortholog of  Ceres SEQ ID NO 12625474 as cited in SEQ ID NO 64169

SEQ ID NO: 94009 - protein, 282 aa, Arabidopsis thaliana; identical to SEQ ID NO: 90253
  peptide (1)..(282): Ceres Seq. ID no. 12723268

SEQ ID NO: 94010 - protein, 226 aa, Arabidopsis thaliana; identical to SEQ ID NO: 90254
  peptide (1)..(226): Ceres Seq. ID no. 12723269

SEQ ID NO: 94011 - protein, 196 aa, Arabidopsis thaliana; identical to SEQ ID NO: 90255
  peptide (1)..(196): Ceres Seq. ID no. 12723270

SEQ ID NO: 94012 - DNA, 676 bp, Arabidopsis thaliana; identical to SEQ ID NO: 90256
  misc_feature (1)..(676): Ceres Seq. ID no. 12723283
  misc_feature (1)..(676): Ortholog of  Ceres SEQ ID NO 12610954 as cited in SEQ ID NO 55930
  misc_feature (1)..(676): Ortholog of  Ceres SEQ ID NO 12625335 as cited in SEQ ID NO 63326
  misc_feature (1)..(676): Ortholog of  Ceres SEQ ID NO 12566590 as cited in SEQ ID NO 0
  misc_feature (1)..(676): Ortholog of  Ceres SEQ ID NO 14305152 as cited in SEQ ID NO 0
  misc_feature (1)..(676): Ortholog of  Ceres SEQ ID NO 15179949 as cited in SEQ ID NO 0

SEQ ID NO: 94013 - protein, 179 aa, Arabidopsis thaliana; identical to SEQ ID NO: 90257
  peptide (1)..(179): Ceres Seq. ID no. 12723284

SEQ ID NO: 94014 - protein, 162 aa, Arabidopsis thaliana; identical to SEQ ID NO: 90258
  peptide (1)..(162): Ceres Seq. ID no. 12723285

SEQ ID NO: 94015 - protein, 110 aa, Arabidopsis thaliana; identical to SEQ ID NO: 90259
  peptide (1)..(110): Ceres Seq. ID no. 12723286

SEQ ID NO: 94016 - DNA, 993 bp, Arabidopsis thaliana; identical to SEQ ID NO: 90260
  misc_feature (1)..(993): Ceres Seq. ID no. 12723287
  misc_feature (1)..(993): Ortholog of  Ceres SEQ ID NO 13623732 as cited in SEQ ID NO 0

SEQ ID NO: 94017 - protein, 330 aa, Arabidopsis thaliana; identical to SEQ ID NO: 90261
  peptide (1)..(330): Ceres Seq. ID no. 12723288

SEQ ID NO: 94018 - protein, 320 aa, Arabidopsis thaliana; identical to SEQ ID NO: 90262
  peptide (1)..(320): Ceres Seq. ID no. 12723289

SEQ ID NO: 94019 - protein, 303 aa, Arabidopsis thaliana; identical to SEQ ID NO: 90263
  peptide (1)..(303): Ceres Seq. ID no. 12723290

SEQ ID NO: 94020 - DNA, 1689 bp, Arabidopsis thaliana; identical to SEQ ID NO: 90264
  misc_feature (1)..(1689): Ceres Seq. ID no. 12723294
  misc_feature (1)..(1689): Ortholog of  Ceres SEQ ID NO 15177858 as cited in SEQ ID NO 51624
  misc_feature (1)..(1689): Ortholog of  Ceres SEQ ID NO 15171249 as cited in SEQ ID NO 52276
  misc_feature (1)..(1689): Ortholog of  Ceres SEQ ID NO 13594189 as cited in SEQ ID NO 58890

SEQ ID NO: 94021 - protein, 428 aa, Arabidopsis thaliana; identical to SEQ ID NO: 90265
  peptide (1)..(428): Ceres Seq. ID no. 12723295

SEQ ID NO: 94022 - protein, 368 aa, Arabidopsis thaliana; identical to SEQ ID NO: 90266
  peptide (1)..(368): Ceres Seq. ID no. 12723296

SEQ ID NO: 94023 - protein, 358 aa, Arabidopsis thaliana; identical to SEQ ID NO: 90267
  peptide (1)..(358): Ceres Seq. ID no. 12723297

SEQ ID NO: 94024 - DNA, 2566 bp, Arabidopsis thaliana; identical to SEQ ID NO: 90268
  misc_feature (1)..(2566): Ceres Seq. ID no. 12723302
  misc_feature (1)..(2566): Ortholog of  Ceres SEQ ID NO 13655640 as cited in SEQ ID NO 63844
  misc_feature (1)..(2566): Ortholog of  Ceres SEQ ID NO 13584744 as cited in SEQ ID NO 69137

SEQ ID NO: 94025 - protein, 632 aa, Arabidopsis thaliana; identical to SEQ ID NO: 90269
  peptide (1)..(632): Ceres Seq. ID no. 12723303

SEQ ID NO: 94026 - protein, 565 aa, Arabidopsis thaliana; identical to SEQ ID NO: 90270
  peptide (1)..(565): Ceres Seq. ID no. 12723304

SEQ ID NO: 94027 - protein, 376 aa, Arabidopsis thaliana; identical to SEQ ID NO: 90271
  peptide (1)..(376): Ceres Seq. ID no. 12723305

SEQ ID NO: 94028 - DNA, 1457 bp, Arabidopsis thaliana; identical to SEQ ID NO: 90272
  misc_feature (1)..(1457): Ceres Seq. ID no. 12723306
  misc_feature (1)..(1457): Ortholog of  Ceres SEQ ID NO 14308099 as cited in SEQ ID NO 58651
  misc_feature (1)..(1457): Ortholog of  Ceres SEQ ID NO 13596893 as cited in SEQ ID NO 62932

SEQ ID NO: 94029 - protein, 423 aa, Arabidopsis thaliana; identical to SEQ ID NO: 90273
  peptide (1)..(423): Ceres Seq. ID no. 12723307

SEQ ID NO: 94030 - protein, 363 aa, Arabidopsis thaliana; identical to SEQ ID NO: 90274
  peptide (1)..(363): Ceres Seq. ID no. 12723308

SEQ ID NO: 94031 - protein, 329 aa, Arabidopsis thaliana; identical to SEQ ID NO: 90275
  peptide (1)..(329): Ceres Seq. ID no. 12723309

SEQ ID NO: 94032 - DNA, 725 bp, Arabidopsis thaliana; identical to SEQ ID NO: 90276
  misc_feature (1)..(725): Ceres Seq. ID no. 12723324
  misc_feature (1)..(725): Ortholog of  Ceres SEQ ID NO 15172913 as cited in SEQ ID NO 51824
  misc_feature (1)..(725): Ortholog of  Ceres SEQ ID NO 13654659 as cited in SEQ ID NO 61998

SEQ ID NO: 94033 - protein, 177 aa, Arabidopsis thaliana; identical to SEQ ID NO: 90277
  peptide (1)..(177): Ceres Seq. ID no. 12723325

SEQ ID NO: 94034 - DNA, 2724 bp, Arabidopsis thaliana; identical to SEQ ID NO: 90278
  misc_feature (1)..(2724): Ceres Seq. ID no. 12723338
  misc_feature (1)..(2724): Ortholog of  Ceres SEQ ID NO 13624427 as cited in SEQ ID NO 0

SEQ ID NO: 94035 - protein, 907 aa, Arabidopsis thaliana; identical to SEQ ID NO: 90279
  peptide (1)..(907): Ceres Seq. ID no. 12723339

SEQ ID NO: 94036 - protein, 811 aa, Arabidopsis thaliana; identical to SEQ ID NO: 90280
  peptide (1)..(811): Ceres Seq. ID no. 12723340

SEQ ID NO: 94037 - protein, 774 aa, Arabidopsis thaliana; identical to SEQ ID NO: 90281
  peptide (1)..(774): Ceres Seq. ID no. 12723341

SEQ ID NO: 94038 - DNA, 2013 bp, Arabidopsis thaliana; identical to SEQ ID NO: 90282
  misc_feature (1)..(2013): Ceres Seq. ID no. 12723362
  misc_feature (1)..(2013): Ortholog of  Ceres SEQ ID NO 15180309 as cited in SEQ ID NO 1272

SEQ ID NO: 94039 - protein, 573 aa, Arabidopsis thaliana; identical to SEQ ID NO: 90283
  peptide (1)..(573): Ceres Seq. ID no. 12723363

SEQ ID NO: 94040 - protein, 476 aa, Arabidopsis thaliana; identical to SEQ ID NO: 90284
  peptide (1)..(476): Ceres Seq. ID no. 12723364

SEQ ID NO: 94041 - protein, 469 aa, Arabidopsis thaliana; identical to SEQ ID NO: 90285
  peptide (1)..(469): Ceres Seq. ID no. 12723365

SEQ ID NO: 94042 - DNA, 2415 bp, Arabidopsis thaliana; identical to SEQ ID NO: 90286
  misc_feature (1)..(2415): Ceres Seq. ID no. 12723377
  misc_feature (1)..(2415): Ortholog of  Ceres SEQ ID NO 13582534 as cited in SEQ ID NO 57409

SEQ ID NO: 94043 - protein, 804 aa, Arabidopsis thaliana; identical to SEQ ID NO: 90287
  peptide (1)..(804): Ceres Seq. ID no. 12723378

SEQ ID NO: 94044 - protein, 803 aa, Arabidopsis thaliana; identical to SEQ ID NO: 90288
  peptide (1)..(803): Ceres Seq. ID no. 12723379

SEQ ID NO: 94045 - protein, 792 aa, Arabidopsis thaliana; identical to SEQ ID NO: 90289
  peptide (1)..(792): Ceres Seq. ID no. 12723380

SEQ ID NO: 94046 - DNA, 1942 bp, Arabidopsis thaliana; identical to SEQ ID NO: 90290
  misc_feature (1)..(1942): Ceres Seq. ID no. 12723381
  misc_feature (1)..(1942): Ortholog of  Ceres SEQ ID NO 14307682 as cited in SEQ ID NO 54529

SEQ ID NO: 94047 - protein, 583 aa, Arabidopsis thaliana; identical to SEQ ID NO: 90291
  peptide (1)..(583): Ceres Seq. ID no. 12723382

SEQ ID NO: 94048 - protein, 521 aa, Arabidopsis thaliana; identical to SEQ ID NO: 90292
  peptide (1)..(521): Ceres Seq. ID no. 12723383

SEQ ID NO: 94049 - protein, 519 aa, Arabidopsis thaliana; identical to SEQ ID NO: 90293
  peptide (1)..(519): Ceres Seq. ID no. 12723384

SEQ ID NO: 94050 - DNA, 1863 bp, Arabidopsis thaliana; identical to SEQ ID NO: 90294
  misc_feature (1)..(1863): Ceres Seq. ID no. 12723420
  misc_feature (1)..(1863): Ortholog of  Ceres SEQ ID NO 14303423 as cited in SEQ ID NO 54243
  misc_feature (1)..(1863): Ortholog of  Ceres SEQ ID NO 12611314 as cited in SEQ ID NO 56535
  misc_feature (1)..(1863): Ortholog of  Ceres SEQ ID NO 15178046 as cited in SEQ ID NO 60380
  misc_feature (1)..(1863): Ortholog of  Ceres SEQ ID NO 14312016 as cited in SEQ ID NO 60412
  misc_feature (1)..(1863): Ortholog of  Ceres SEQ ID NO 13661438 as cited in SEQ ID NO 61414

SEQ ID NO: 94051 - protein, 404 aa, Arabidopsis thaliana; identical to SEQ ID NO: 90295
  peptide (1)..(404): Ceres Seq. ID no. 12723421

SEQ ID NO: 94052 - protein, 388 aa, Arabidopsis thaliana; identical to SEQ ID NO: 90296
  peptide (1)..(388): Ceres Seq. ID no. 12723422

SEQ ID NO: 94053 - protein, 299 aa, Arabidopsis thaliana; identical to SEQ ID NO: 90297
  peptide (1)..(299): Ceres Seq. ID no. 12723423

SEQ ID NO: 94054 - DNA, 2202 bp, Arabidopsis thaliana; identical to SEQ ID NO: 90298
  misc_feature (1)..(2202): Ceres Seq. ID no. 12723428
  misc_feature (1)..(2202): Ortholog of  Ceres SEQ ID NO 14306279 as cited in SEQ ID NO 56860

SEQ ID NO: 94055 - protein, 733 aa, Arabidopsis thaliana; identical to SEQ ID NO: 90299
  peptide (1)..(733): Ceres Seq. ID no. 12723429

SEQ ID NO: 94056 - protein, 692 aa, Arabidopsis thaliana; identical to SEQ ID NO: 90300
  peptide (1)..(692): Ceres Seq. ID no. 12723430

SEQ ID NO: 94057 - protein, 649 aa, Arabidopsis thaliana; identical to SEQ ID NO: 90301
  peptide (1)..(649): Ceres Seq. ID no. 12723431

SEQ ID NO: 94058 - DNA, 642 bp, Arabidopsis thaliana; identical to SEQ ID NO: 90302
  misc_feature (1)..(642): Ceres Seq. ID no. 12723445
  misc_feature (1)..(642): Ortholog of  Ceres SEQ ID NO 14303374 as cited in SEQ ID NO 54088

SEQ ID NO: 94059 - protein, 213 aa, Arabidopsis thaliana; identical to SEQ ID NO: 90303
  peptide (1)..(213): Ceres Seq. ID no. 12723446

SEQ ID NO: 94060 - DNA, 1113 bp, Arabidopsis thaliana; identical to SEQ ID NO: 90304
  misc_feature (1)..(1113): Ceres Seq. ID no. 12723453
  misc_feature (1)..(1113): Ortholog of  Ceres SEQ ID NO 13594852 as cited in SEQ ID NO 51956

SEQ ID NO: 94061 - protein, 370 aa, Arabidopsis thaliana; identical to SEQ ID NO: 90305
  peptide (1)..(370): Ceres Seq. ID no. 12723454

SEQ ID NO: 94062 - protein, 366 aa, Arabidopsis thaliana; identical to SEQ ID NO: 90306
  peptide (1)..(366): Ceres Seq. ID no. 12723455

SEQ ID NO: 94063 - protein, 295 aa, Arabidopsis thaliana; identical to SEQ ID NO: 90307
  peptide (1)..(295): Ceres Seq. ID no. 12723456

SEQ ID NO: 94064 - DNA, 1558 bp, Arabidopsis thaliana; identical to SEQ ID NO: 90308
  misc_feature (1)..(1558): Ceres Seq. ID no. 12723483
  misc_feature (1)..(1558): Ortholog of  Ceres SEQ ID NO 14306538 as cited in SEQ ID NO 53117

SEQ ID NO: 94065 - protein, 414 aa, Arabidopsis thaliana; identical to SEQ ID NO: 90309
  peptide (1)..(414): Ceres Seq. ID no. 12723484

SEQ ID NO: 94066 - protein, 394 aa, Arabidopsis thaliana; identical to SEQ ID NO: 90310
  peptide (1)..(394): Ceres Seq. ID no. 12723485

SEQ ID NO: 94067 - protein, 375 aa, Arabidopsis thaliana; identical to SEQ ID NO: 90311
  peptide (1)..(375): Ceres Seq. ID no. 12723486

SEQ ID NO: 94068 - DNA, 1050 bp, Arabidopsis thaliana; identical to SEQ ID NO: 90312
  misc_feature (1)..(1050): Ceres Seq. ID no. 12723494
  misc_feature (1)..(1050): Ortholog of  Ceres SEQ ID NO 13582350 as cited in SEQ ID NO 56734
  misc_feature (1)..(1050): Ortholog of  Ceres SEQ ID NO 12582113 as cited in SEQ ID NO 58349
  misc_feature (1)..(1050): Ortholog of  Ceres SEQ ID NO 12615466 as cited in SEQ ID NO 62761
  misc_feature (1)..(1050): Ortholog of  Ceres SEQ ID NO 14314080 as cited in SEQ ID NO 63105
  misc_feature (1)..(1050): Ortholog of  Ceres SEQ ID NO 13597295 as cited in SEQ ID NO 63743
  misc_feature (1)..(1050): Ortholog of  Ceres SEQ ID NO 12617090 as cited in SEQ ID NO 64005
  misc_feature (1)..(1050): Ortholog of  Ceres SEQ ID NO 13597439 as cited in SEQ ID NO 64081
  misc_feature (1)..(1050): Ortholog of  Ceres SEQ ID NO 13597233 as cited in SEQ ID NO 64370
  misc_feature (1)..(1050): Ortholog of  Ceres SEQ ID NO 13598327 as cited in SEQ ID NO 68040
  misc_feature (1)..(1050): Ortholog of  Ceres SEQ ID NO 13599438 as cited in SEQ ID NO 0

SEQ ID NO: 94069 - protein, 349 aa, Arabidopsis thaliana; identical to SEQ ID NO: 90313
  peptide (1)..(349): Ceres Seq. ID no. 12723495

SEQ ID NO: 94070 - protein, 306 aa, Arabidopsis thaliana; identical to SEQ ID NO: 90314
  peptide (1)..(306): Ceres Seq. ID no. 12723496

SEQ ID NO: 94071 - protein, 269 aa, Arabidopsis thaliana; identical to SEQ ID NO: 90315
  peptide (1)..(269): Ceres Seq. ID no. 12723497

SEQ ID NO: 94072 - DNA, 1362 bp, Arabidopsis thaliana; identical to SEQ ID NO: 90316
  misc_feature (1)..(1362): Ceres Seq. ID no. 12723498
  misc_feature (1)..(1362): Ortholog of  Ceres SEQ ID NO 13582281 as cited in SEQ ID NO 51014
  misc_feature (1)..(1362): Ortholog of  Ceres SEQ ID NO 15176795 as cited in SEQ ID NO 54453
  misc_feature (1)..(1362): Ortholog of  Ceres SEQ ID NO 14310508 as cited in SEQ ID NO 58965
  misc_feature (1)..(1362): Ortholog of  Ceres SEQ ID NO 12617417 as cited in SEQ ID NO 65089

SEQ ID NO: 94073 - protein, 453 aa, Arabidopsis thaliana; identical to SEQ ID NO: 90317
  peptide (1)..(453): Ceres Seq. ID no. 12723499

SEQ ID NO: 94074 - protein, 445 aa, Arabidopsis thaliana; identical to SEQ ID NO: 90318
  peptide (1)..(445): Ceres Seq. ID no. 12723500

SEQ ID NO: 94075 - protein, 436 aa, Arabidopsis thaliana; identical to SEQ ID NO: 90319
  peptide (1)..(436): Ceres Seq. ID no. 12723501

SEQ ID NO: 94076 - DNA, 1254 bp, Arabidopsis thaliana; identical to SEQ ID NO: 90320
  misc_feature (1)..(1254): Ceres Seq. ID no. 12723511
  misc_feature (1)..(1254): Ortholog of  Ceres SEQ ID NO 13596921 as cited in SEQ ID NO 62368
  misc_feature (1)..(1254): Ortholog of  Ceres SEQ ID NO 13600673 as cited in SEQ ID NO 0

SEQ ID NO: 94077 - protein, 331 aa, Arabidopsis thaliana; identical to SEQ ID NO: 90321
  peptide (1)..(331): Ceres Seq. ID no. 12723512

SEQ ID NO: 94078 - DNA, 1572 bp, Arabidopsis thaliana; identical to SEQ ID NO: 90322
  misc_feature (1)..(1572): Ceres Seq. ID no. 12723521
  misc_feature (1)..(1572): Ortholog of  Ceres SEQ ID NO 15171856 as cited in SEQ ID NO 55120

SEQ ID NO: 94079 - protein, 523 aa, Arabidopsis thaliana; identical to SEQ ID NO: 90323
  peptide (1)..(523): Ceres Seq. ID no. 12723522

SEQ ID NO: 94080 - protein, 403 aa, Arabidopsis thaliana; identical to SEQ ID NO: 90324
  peptide (1)..(403): Ceres Seq. ID no. 12723523

SEQ ID NO: 94081 - protein, 400 aa, Arabidopsis thaliana; identical to SEQ ID NO: 90325
  peptide (1)..(400): Ceres Seq. ID no. 12723524

SEQ ID NO: 94082 - DNA, 1886 bp, Arabidopsis thaliana; identical to SEQ ID NO: 90326
  misc_feature (1)..(1886): Ceres Seq. ID no. 12723537
  misc_feature (1)..(1886): Ortholog of  Ceres SEQ ID NO 13638136 as cited in SEQ ID NO 58644
  misc_feature (1)..(1886): Ortholog of  Ceres SEQ ID NO 13596868 as cited in SEQ ID NO 62806
  misc_feature (1)..(1886): Ortholog of  Ceres SEQ ID NO 14302836 as cited in SEQ ID NO 65013
  misc_feature (1)..(1886): Ortholog of  Ceres SEQ ID NO 12566239 as cited in SEQ ID NO 0

SEQ ID NO: 94083 - protein, 423 aa, Arabidopsis thaliana; identical to SEQ ID NO: 90327
  peptide (1)..(423): Ceres Seq. ID no. 12723538

SEQ ID NO: 94084 - protein, 379 aa, Arabidopsis thaliana; identical to SEQ ID NO: 90328
  peptide (1)..(379): Ceres Seq. ID no. 12723539

SEQ ID NO: 94085 - protein, 358 aa, Arabidopsis thaliana; identical to SEQ ID NO: 90329
  peptide (1)..(358): Ceres Seq. ID no. 12723540

SEQ ID NO: 94086 - DNA, 1720 bp, Arabidopsis thaliana; identical to SEQ ID NO: 90330
  misc_feature (1)..(1720): Ceres Seq. ID no. 12723568
  misc_feature (1)..(1720): Ortholog of  Ceres SEQ ID NO 13594209 as cited in SEQ ID NO 59089
  misc_feature (1)..(1720): Ortholog of  Ceres SEQ ID NO 13502874 as cited in SEQ ID NO 66298
  misc_feature (1)..(1720): Ortholog of  Ceres SEQ ID NO 12614124 as cited in SEQ ID NO 68392

SEQ ID NO: 94087 - protein, 491 aa, Arabidopsis thaliana; identical to SEQ ID NO: 90331
  peptide (1)..(491): Ceres Seq. ID no. 12723569

SEQ ID NO: 94088 - protein, 308 aa, Arabidopsis thaliana; identical to SEQ ID NO: 90332
  peptide (1)..(308): Ceres Seq. ID no. 12723570

SEQ ID NO: 94089 - protein, 247 aa, Arabidopsis thaliana; identical to SEQ ID NO: 90333
  peptide (1)..(247): Ceres Seq. ID no. 12723571

SEQ ID NO: 94090 - DNA, 483 bp, Arabidopsis thaliana; identical to SEQ ID NO: 90334
  misc_feature (1)..(483): Ceres Seq. ID no. 12723572
  misc_feature (1)..(483): Ortholog of  Ceres SEQ ID NO 13596742 as cited in SEQ ID NO 63012
  misc_feature (1)..(483): Ortholog of  Ceres SEQ ID NO 15173334 as cited in SEQ ID NO 63797

SEQ ID NO: 94091 - protein, 160 aa, Arabidopsis thaliana; identical to SEQ ID NO: 90335
  peptide (1)..(160): Ceres Seq. ID no. 12723573

SEQ ID NO: 94092 - protein, 151 aa, Arabidopsis thaliana; identical to SEQ ID NO: 90336
  peptide (1)..(151): Ceres Seq. ID no. 12723574

SEQ ID NO: 94093 - protein, 92 aa, Arabidopsis thaliana; identical to SEQ ID NO: 90337
  peptide (1)..(92): Ceres Seq. ID no. 12723575

SEQ ID NO: 94094 - DNA, 2889 bp, Arabidopsis thaliana; identical to SEQ ID NO: 90338
  misc_feature (1)..(2889): Ceres Seq. ID no. 12723580
  misc_feature (1)..(2889): Ortholog of  Ceres SEQ ID NO 15227147 as cited in SEQ ID NO 61351

SEQ ID NO: 94095 - protein, 962 aa, Arabidopsis thaliana; identical to SEQ ID NO: 90339
  peptide (1)..(962): Ceres Seq. ID no. 12723581

SEQ ID NO: 94096 - protein, 958 aa, Arabidopsis thaliana; identical to SEQ ID NO: 90340
  peptide (1)..(958): Ceres Seq. ID no. 12723582

SEQ ID NO: 94097 - protein, 879 aa, Arabidopsis thaliana; identical to SEQ ID NO: 78691
  peptide (1)..(879): Ceres Seq. ID no. 12723583

SEQ ID NO: 94098 - DNA, 3177 bp, Arabidopsis thaliana; identical to SEQ ID NO: 90342
  misc_feature (1)..(3177): Ceres Seq. ID no. 12723584
  misc_feature (1)..(3177): Ortholog of  Ceres SEQ ID NO 13646569 as cited in SEQ ID NO 20745

SEQ ID NO: 94099 - protein, 964 aa, Arabidopsis thaliana; identical to SEQ ID NO: 90343
  peptide (1)..(964): Ceres Seq. ID no. 12723585

SEQ ID NO: 94100 - protein, 949 aa, Arabidopsis thaliana; identical to SEQ ID NO: 90344
  peptide (1)..(949): Ceres Seq. ID no. 12723586

SEQ ID NO: 94101 - protein, 884 aa, Arabidopsis thaliana; identical to SEQ ID NO: 90345
  peptide (1)..(884): Ceres Seq. ID no. 12723587

SEQ ID NO: 94102 - DNA, 1803 bp, Arabidopsis thaliana; identical to SEQ ID NO: 90346
  misc_feature (1)..(1803): Ceres Seq. ID no. 12723588
  misc_feature (1)..(1803): Ortholog of  Ceres SEQ ID NO 13599779 as cited in SEQ ID NO 0

SEQ ID NO: 94103 - protein, 600 aa, Arabidopsis thaliana; identical to SEQ ID NO: 90347
  peptide (1)..(600): Ceres Seq. ID no. 12723589

SEQ ID NO: 94104 - protein, 549 aa, Arabidopsis thaliana; identical to SEQ ID NO: 90348
  peptide (1)..(549): Ceres Seq. ID no. 12723590

SEQ ID NO: 94105 - protein, 542 aa, Arabidopsis thaliana; identical to SEQ ID NO: 90349
  peptide (1)..(542): Ceres Seq. ID no. 12723591

SEQ ID NO: 94106 - DNA, 1563 bp, Arabidopsis thaliana; identical to SEQ ID NO: 90350
  misc_feature (1)..(1563): Ceres Seq. ID no. 12723601
  misc_feature (1)..(1563): Ortholog of  Ceres SEQ ID NO 12612314 as cited in SEQ ID NO 51420

SEQ ID NO: 94107 - protein, 520 aa, Arabidopsis thaliana; identical to SEQ ID NO: 90351
  peptide (1)..(520): Ceres Seq. ID no. 12723602

SEQ ID NO: 94108 - protein, 499 aa, Arabidopsis thaliana; identical to SEQ ID NO: 90352
  peptide (1)..(499): Ceres Seq. ID no. 12723603

SEQ ID NO: 94109 - protein, 361 aa, Arabidopsis thaliana; identical to SEQ ID NO: 90353
  peptide (1)..(361): Ceres Seq. ID no. 12723604

SEQ ID NO: 94110 - DNA, 1062 bp, Arabidopsis thaliana; identical to SEQ ID NO: 90354
  misc_feature (1)..(1062): Ceres Seq. ID no. 12723611
  misc_feature (1)..(1062): Ortholog of  Ceres SEQ ID NO 15225667 as cited in SEQ ID NO 50951
  misc_feature (1)..(1062): Ortholog of  Ceres SEQ ID NO 13594298 as cited in SEQ ID NO 57803
  misc_feature (1)..(1062): Ortholog of  Ceres SEQ ID NO 13503476 as cited in SEQ ID NO 61978
  misc_feature (1)..(1062): Ortholog of  Ceres SEQ ID NO 12578438 as cited in SEQ ID NO 62201
  misc_feature (1)..(1062): Ortholog of  Ceres SEQ ID NO 12617675 as cited in SEQ ID NO 64656

SEQ ID NO: 94111 - protein, 303 aa, Arabidopsis thaliana; identical to SEQ ID NO: 90355
  peptide (1)..(303): Ceres Seq. ID no. 12723612

SEQ ID NO: 94112 - protein, 285 aa, Arabidopsis thaliana; identical to SEQ ID NO: 90356
  peptide (1)..(285): Ceres Seq. ID no. 12723613

SEQ ID NO: 94113 - protein, 212 aa, Arabidopsis thaliana; identical to SEQ ID NO: 90357
  peptide (1)..(212): Ceres Seq. ID no. 12723614

SEQ ID NO: 94114 - DNA, 1059 bp, Arabidopsis thaliana; identical to SEQ ID NO: 90358
  misc_feature (1)..(1059): Ceres Seq. ID no. 12723619
  misc_feature (1)..(1059): Ortholog of  Ceres SEQ ID NO 14311671 as cited in SEQ ID NO 51251
  misc_feature (1)..(1059): Ortholog of  Ceres SEQ ID NO 14307355 as cited in SEQ ID NO 54610
  misc_feature (1)..(1059): Ortholog of  Ceres SEQ ID NO 13594298 as cited in SEQ ID NO 57803
  misc_feature (1)..(1059): Ortholog of  Ceres SEQ ID NO 14301894 as cited in SEQ ID NO 61677
  misc_feature (1)..(1059): Ortholog of  Ceres SEQ ID NO 13503476 as cited in SEQ ID NO 61978
  misc_feature (1)..(1059): Ortholog of  Ceres SEQ ID NO 12578438 as cited in SEQ ID NO 62201
  misc_feature (1)..(1059): Ortholog of  Ceres SEQ ID NO 12617675 as cited in SEQ ID NO 64656

SEQ ID NO: 94115 - protein, 284 aa, Arabidopsis thaliana; identical to SEQ ID NO: 90359
  peptide (1)..(284): Ceres Seq. ID no. 12723620

SEQ ID NO: 94116 - protein, 208 aa, Arabidopsis thaliana; identical to SEQ ID NO: 90360
  peptide (1)..(208): Ceres Seq. ID no. 12723621

SEQ ID NO: 94117 - protein, 165 aa, Arabidopsis thaliana; identical to SEQ ID NO: 90361
  peptide (1)..(165): Ceres Seq. ID no. 12723622

SEQ ID NO: 94118 - DNA, 2388 bp, Arabidopsis thaliana; identical to SEQ ID NO: 90362
  misc_feature (1)..(2388): Ceres Seq. ID no. 12723627
  misc_feature (1)..(2388): Ortholog of  Ceres SEQ ID NO 15176298 as cited in SEQ ID NO 58961

SEQ ID NO: 94119 - protein, 647 aa, Arabidopsis thaliana; identical to SEQ ID NO: 90363
  peptide (1)..(647): Ceres Seq. ID no. 12723628

SEQ ID NO: 94120 - protein, 646 aa, Arabidopsis thaliana; identical to SEQ ID NO: 90364
  peptide (1)..(646): Ceres Seq. ID no. 12723629

SEQ ID NO: 94121 - protein, 639 aa, Arabidopsis thaliana; identical to SEQ ID NO: 90365
  peptide (1)..(639): Ceres Seq. ID no. 12723630

SEQ ID NO: 94122 - DNA, 3165 bp, Arabidopsis thaliana; identical to SEQ ID NO: 90366
  misc_feature (1)..(3165): Ceres Seq. ID no. 12723631
  misc_feature (1)..(3165): Ortholog of  Ceres SEQ ID NO 13593889 as cited in SEQ ID NO 53305
  misc_feature (1)..(3165): Ortholog of  Ceres SEQ ID NO 13581959 as cited in SEQ ID NO 56156

SEQ ID NO: 94123 - protein, 1054 aa, Arabidopsis thaliana; identical to SEQ ID NO: 90367
  peptide (1)..(1054): Ceres Seq. ID no. 12723632

SEQ ID NO: 94124 - protein, 990 aa, Arabidopsis thaliana; identical to SEQ ID NO: 90368
  peptide (1)..(990): Ceres Seq. ID no. 12723633

SEQ ID NO: 94125 - protein, 987 aa, Arabidopsis thaliana; identical to SEQ ID NO: 90369
  peptide (1)..(987): Ceres Seq. ID no. 12723634

SEQ ID NO: 94126 - DNA, 1179 bp, Arabidopsis thaliana; identical to SEQ ID NO: 90370
  misc_feature (1)..(1179): Ceres Seq. ID no. 12723635
  misc_feature (1)..(1179): Ortholog of  Ceres SEQ ID NO 14315223 as cited in SEQ ID NO 52527
  misc_feature (1)..(1179): Ortholog of  Ceres SEQ ID NO 14307085 as cited in SEQ ID NO 54749

SEQ ID NO: 94127 - protein, 333 aa, Arabidopsis thaliana; identical to SEQ ID NO: 90371
  peptide (1)..(333): Ceres Seq. ID no. 12723636

SEQ ID NO: 94128 - protein, 210 aa, Arabidopsis thaliana; identical to SEQ ID NO: 90372
  peptide (1)..(210): Ceres Seq. ID no. 12723637

SEQ ID NO: 94129 - protein, 172 aa, Arabidopsis thaliana; identical to SEQ ID NO: 90373
  peptide (1)..(172): Ceres Seq. ID no. 12723638

SEQ ID NO: 94130 - DNA, 1251 bp, Arabidopsis thaliana; identical to SEQ ID NO: 90374
  misc_feature (1)..(1251): Ceres Seq. ID no. 12723643
  misc_feature (1)..(1251): Ortholog of  Ceres SEQ ID NO 13657138 as cited in SEQ ID NO 65923

SEQ ID NO: 94131 - protein, 416 aa, Arabidopsis thaliana; identical to SEQ ID NO: 90375
  peptide (1)..(416): Ceres Seq. ID no. 12723644

SEQ ID NO: 94132 - protein, 378 aa, Arabidopsis thaliana; identical to SEQ ID NO: 90376
  peptide (1)..(378): Ceres Seq. ID no. 12723645

SEQ ID NO: 94133 - protein, 350 aa, Arabidopsis thaliana; identical to SEQ ID NO: 90377
  peptide (1)..(350): Ceres Seq. ID no. 12723646

SEQ ID NO: 94134 - DNA, 1499 bp, Arabidopsis thaliana; identical to SEQ ID NO: 90378
  misc_feature (1)..(1499): Ceres Seq. ID no. 12723660
  misc_feature (1)..(1499): Ortholog of  Ceres SEQ ID NO 14308389 as cited in SEQ ID NO 55226
  misc_feature (1)..(1499): Ortholog of  Ceres SEQ ID NO 13597162 as cited in SEQ ID NO 63955
  misc_feature (1)..(1499): Ortholog of  Ceres SEQ ID NO 14313567 as cited in SEQ ID NO 68074

SEQ ID NO: 94135 - protein, 451 aa, Arabidopsis thaliana; identical to SEQ ID NO: 90379
  peptide (1)..(451): Ceres Seq. ID no. 12723661

SEQ ID NO: 94136 - protein, 443 aa, Arabidopsis thaliana; identical to SEQ ID NO: 90380
  peptide (1)..(443): Ceres Seq. ID no. 12723662

SEQ ID NO: 94137 - protein, 408 aa, Arabidopsis thaliana; identical to SEQ ID NO: 90381
  peptide (1)..(408): Ceres Seq. ID no. 12723663

SEQ ID NO: 94138 - DNA, 1341 bp, Arabidopsis thaliana; identical to SEQ ID NO: 90382
  misc_feature (1)..(1341): Ceres Seq. ID no. 12723664
  misc_feature (1)..(1341): Ortholog of  Ceres SEQ ID NO 14307464 as cited in SEQ ID NO 59636

SEQ ID NO: 94139 - protein, 373 aa, Arabidopsis thaliana; identical to SEQ ID NO: 90383
  peptide (1)..(373): Ceres Seq. ID no. 12723665

SEQ ID NO: 94140 - protein, 331 aa, Arabidopsis thaliana; identical to SEQ ID NO: 90384
  peptide (1)..(331): Ceres Seq. ID no. 12723666

SEQ ID NO: 94141 - protein, 296 aa, Arabidopsis thaliana; identical to SEQ ID NO: 90385
  peptide (1)..(296): Ceres Seq. ID no. 12723667

SEQ ID NO: 94142 - DNA, 1398 bp, Arabidopsis thaliana; identical to SEQ ID NO: 90386
  misc_feature (1)..(1398): Ceres Seq. ID no. 12723702
  misc_feature (1)..(1398): Ortholog of  Ceres SEQ ID NO 13596816 as cited in SEQ ID NO 62287

SEQ ID NO: 94143 - protein, 465 aa, Arabidopsis thaliana; identical to SEQ ID NO: 90387
  peptide (1)..(465): Ceres Seq. ID no. 12723703

SEQ ID NO: 94144 - protein, 383 aa, Arabidopsis thaliana; identical to SEQ ID NO: 90388
  peptide (1)..(383): Ceres Seq. ID no. 12723704

SEQ ID NO: 94145 - protein, 336 aa, Arabidopsis thaliana; identical to SEQ ID NO: 90389
  peptide (1)..(336): Ceres Seq. ID no. 12723705

SEQ ID NO: 94146 - DNA, 3157 bp, Arabidopsis thaliana; identical to SEQ ID NO: 90390
  misc_feature (1)..(3157): Ceres Seq. ID no. 12723709
  misc_feature (1)..(3157): Ortholog of  Ceres SEQ ID NO 14305417 as cited in SEQ ID NO 0

SEQ ID NO: 94147 - protein, 963 aa, Arabidopsis thaliana; identical to SEQ ID NO: 90391
  peptide (1)..(963): Ceres Seq. ID no. 12723710

SEQ ID NO: 94148 - protein, 880 aa, Arabidopsis thaliana; identical to SEQ ID NO: 90392
  peptide (1)..(880): Ceres Seq. ID no. 12723711

SEQ ID NO: 94149 - protein, 789 aa, Arabidopsis thaliana; identical to SEQ ID NO: 90393
  peptide (1)..(789): Ceres Seq. ID no. 12723712

SEQ ID NO: 94150 - DNA, 2497 bp, Arabidopsis thaliana; identical to SEQ ID NO: 90394
  misc_feature (1)..(2497): Ceres Seq. ID no. 12723720
  misc_feature (1)..(2497): Ortholog of  Ceres SEQ ID NO 13582297 as cited in SEQ ID NO 56486
  misc_feature (1)..(2497): Ortholog of  Ceres SEQ ID NO 13586936 as cited in SEQ ID NO 0

SEQ ID NO: 94151 - protein, 607 aa, Arabidopsis thaliana; identical to SEQ ID NO: 90395
  peptide (1)..(607): Ceres Seq. ID no. 12723721

SEQ ID NO: 94152 - protein, 554 aa, Arabidopsis thaliana; identical to SEQ ID NO: 90396
  peptide (1)..(554): Ceres Seq. ID no. 12723722

SEQ ID NO: 94153 - protein, 545 aa, Arabidopsis thaliana; identical to SEQ ID NO: 90397
  peptide (1)..(545): Ceres Seq. ID no. 12723723

SEQ ID NO: 94154 - DNA, 1487 bp, Arabidopsis thaliana; identical to SEQ ID NO: 90398
  misc_feature (1)..(1487): Ceres Seq. ID no. 12723756
  misc_feature (1)..(1487): Ortholog of  Ceres SEQ ID NO 15169415 as cited in SEQ ID NO 59010
  misc_feature (1)..(1487): Ortholog of  Ceres SEQ ID NO 13656546 as cited in SEQ ID NO 65729

SEQ ID NO: 94155 - protein, 388 aa, Arabidopsis thaliana; identical to SEQ ID NO: 90399
  peptide (1)..(388): Ceres Seq. ID no. 12723757

SEQ ID NO: 94156 - protein, 381 aa, Arabidopsis thaliana; identical to SEQ ID NO: 90400
  peptide (1)..(381): Ceres Seq. ID no. 12723758

SEQ ID NO: 94157 - protein, 345 aa, Arabidopsis thaliana; identical to SEQ ID NO: 90401
  peptide (1)..(345): Ceres Seq. ID no. 12723759

SEQ ID NO: 94158 - DNA, 1240 bp, Arabidopsis thaliana; identical to SEQ ID NO: 90402
  misc_feature (1)..(1240): Ceres Seq. ID no. 12723764
  misc_feature (1)..(1240): Ortholog of  Ceres SEQ ID NO 13597407 as cited in SEQ ID NO 64106

SEQ ID NO: 94159 - protein, 370 aa, Arabidopsis thaliana; identical to SEQ ID NO: 90403
  peptide (1)..(370): Ceres Seq. ID no. 12723765

SEQ ID NO: 94160 - protein, 368 aa, Arabidopsis thaliana; identical to SEQ ID NO: 90404
  peptide (1)..(368): Ceres Seq. ID no. 12723766

SEQ ID NO: 94161 - protein, 346 aa, Arabidopsis thaliana; identical to SEQ ID NO: 90405
  peptide (1)..(346): Ceres Seq. ID no. 12723767

SEQ ID NO: 94162 - DNA, 1532 bp, Arabidopsis thaliana; identical to SEQ ID NO: 90406
  misc_feature (1)..(1532): Ceres Seq. ID no. 12723776
  misc_feature (1)..(1532): Ortholog of  Ceres SEQ ID NO 12617197 as cited in SEQ ID NO 63406
  misc_feature (1)..(1532): Ortholog of  Ceres SEQ ID NO 13597804 as cited in SEQ ID NO 64182
  misc_feature (1)..(1532): Ortholog of  Ceres SEQ ID NO 13598565 as cited in SEQ ID NO 65250
  misc_feature (1)..(1532): Ortholog of  Ceres SEQ ID NO 13598597 as cited in SEQ ID NO 65496
  misc_feature (1)..(1532): Ortholog of  Ceres SEQ ID NO 13596284 as cited in SEQ ID NO 68273

SEQ ID NO: 94163 - protein, 291 aa, Arabidopsis thaliana; identical to SEQ ID NO: 90407
  peptide (1)..(291): Ceres Seq. ID no. 12723777

SEQ ID NO: 94164 - protein, 196 aa, Arabidopsis thaliana; identical to SEQ ID NO: 81331
  peptide (1)..(196): Ceres Seq. ID no. 12723778

SEQ ID NO: 94165 - DNA, 1410 bp, Arabidopsis thaliana; identical to SEQ ID NO: 90409
  misc_feature (1)..(1410): Ceres Seq. ID no. 12723783
  misc_feature (1)..(1410): Ortholog of  Ceres SEQ ID NO 15176919 as cited in SEQ ID NO 54698
  misc_feature (1)..(1410): Ortholog of  Ceres SEQ ID NO 14302702 as cited in SEQ ID NO 57154
  misc_feature (1)..(1410): Ortholog of  Ceres SEQ ID NO 15179344 as cited in SEQ ID NO 0

SEQ ID NO: 94166 - protein, 402 aa, Arabidopsis thaliana; identical to SEQ ID NO: 90410
  peptide (1)..(402): Ceres Seq. ID no. 12723784

SEQ ID NO: 94167 - protein, 378 aa, Arabidopsis thaliana; identical to SEQ ID NO: 23756
  peptide (1)..(378): Ceres Seq. ID no. 12723785

SEQ ID NO: 94168 - protein, 375 aa, Arabidopsis thaliana; identical to SEQ ID NO: 23757
  peptide (1)..(375): Ceres Seq. ID no. 12723786

SEQ ID NO: 94169 - DNA, 1229 bp, Arabidopsis thaliana; identical to SEQ ID NO: 90413
  misc_feature (1)..(1229): Ceres Seq. ID no. 12723798
  misc_feature (1)..(1229): Ortholog of  Ceres SEQ ID NO 15177091 as cited in SEQ ID NO 52140
  misc_feature (1)..(1229): Ortholog of  Ceres SEQ ID NO 13597324 as cited in SEQ ID NO 64842
  misc_feature (1)..(1229): Ortholog of  Ceres SEQ ID NO 13658672 as cited in SEQ ID NO 66627

SEQ ID NO: 94170 - protein, 268 aa, Arabidopsis thaliana; identical to SEQ ID NO: 35071
  peptide (1)..(268): Ceres Seq. ID no. 12723799

SEQ ID NO: 94171 - protein, 140 aa, Arabidopsis thaliana; identical to SEQ ID NO: 35072
  peptide (1)..(140): Ceres Seq. ID no. 12723800

SEQ ID NO: 94172 - DNA, 842 bp, Arabidopsis thaliana; identical to SEQ ID NO: 90416
  misc_feature (1)..(842): Ceres Seq. ID no. 12723809
  misc_feature (1)..(842): Ortholog of  Ceres SEQ ID NO 14314534 as cited in SEQ ID NO 52434
  misc_feature (1)..(842): Ortholog of  Ceres SEQ ID NO 13656436 as cited in SEQ ID NO 69154

SEQ ID NO: 94173 - protein, 232 aa, Arabidopsis thaliana; identical to SEQ ID NO: 90417
  peptide (1)..(232): Ceres Seq. ID no. 12723810

SEQ ID NO: 94174 - protein, 217 aa, Arabidopsis thaliana; identical to SEQ ID NO: 30179
  peptide (1)..(217): Ceres Seq. ID no. 12723811

SEQ ID NO: 94175 - DNA, 800 bp, Arabidopsis thaliana; identical to SEQ ID NO: 90419
  misc_feature (1)..(800): Ceres Seq. ID no. 12723812
  misc_feature (1)..(800): Ortholog of  Ceres SEQ ID NO 14314534 as cited in SEQ ID NO 52434
  misc_feature (1)..(800): Ortholog of  Ceres SEQ ID NO 13656436 as cited in SEQ ID NO 69154

SEQ ID NO: 94176 - protein, 217 aa, Arabidopsis thaliana; identical to SEQ ID NO: 30179
  peptide (1)..(217): Ceres Seq. ID no. 12723813

SEQ ID NO: 94177 - DNA, 1278 bp, Arabidopsis thaliana; identical to SEQ ID NO: 90421
  misc_feature (1)..(1278): Ceres Seq. ID no. 12723829
  misc_feature (1)..(1278): Ortholog of  Ceres SEQ ID NO 12611884 as cited in SEQ ID NO 51018
  misc_feature (1)..(1278): Ortholog of  Ceres SEQ ID NO 15177083 as cited in SEQ ID NO 51917
  misc_feature (1)..(1278): Ortholog of  Ceres SEQ ID NO 12609093 as cited in SEQ ID NO 52008
  misc_feature (1)..(1278): Ortholog of  Ceres SEQ ID NO 12609839 as cited in SEQ ID NO 52022
  misc_feature (1)..(1278): Ortholog of  Ceres SEQ ID NO 13638931 as cited in SEQ ID NO 52200
  misc_feature (1)..(1278): Ortholog of  Ceres SEQ ID NO 13638885 as cited in SEQ ID NO 55803
  misc_feature (1)..(1278): Ortholog of  Ceres SEQ ID NO 14301452 as cited in SEQ ID NO 60984
  misc_feature (1)..(1278): Ortholog of  Ceres SEQ ID NO 12587429 as cited in SEQ ID NO 63113
  misc_feature (1)..(1278): Ortholog of  Ceres SEQ ID NO 12615635 as cited in SEQ ID NO 63133
  misc_feature (1)..(1278): Ortholog of  Ceres SEQ ID NO 12586351 as cited in SEQ ID NO 64028
  misc_feature (1)..(1278): Ortholog of  Ceres SEQ ID NO 15173174 as cited in SEQ ID NO 64046
  misc_feature (1)..(1278): Ortholog of  Ceres SEQ ID NO 13654441 as cited in SEQ ID NO 67814
  misc_feature (1)..(1278): Ortholog of  Ceres SEQ ID NO 12635608 as cited in SEQ ID NO 0
  misc_feature (1)..(1278): Ortholog of  Ceres SEQ ID NO 14309027 as cited in SEQ ID NO 0

SEQ ID NO: 94178 - protein, 137 aa, Arabidopsis thaliana; identical to SEQ ID NO: 90422
  peptide (1)..(137): Ceres Seq. ID no. 12723830

SEQ ID NO: 94179 - protein, 122 aa, Arabidopsis thaliana; identical to SEQ ID NO: 90423
  peptide (1)..(122): Ceres Seq. ID no. 12723831

SEQ ID NO: 94180 - protein, 105 aa, Arabidopsis thaliana; identical to SEQ ID NO: 90424
  peptide (1)..(105): Ceres Seq. ID no. 12723832

SEQ ID NO: 94181 - DNA, 1930 bp, Arabidopsis thaliana; identical to SEQ ID NO: 90425
  misc_feature (1)..(1930): Ceres Seq. ID no. 12723854
  misc_feature (1)..(1930): Ortholog of  Ceres SEQ ID NO 14306569 as cited in SEQ ID NO 53008
  misc_feature (1)..(1930): Ortholog of  Ceres SEQ ID NO 14304855 as cited in SEQ ID NO 53974

SEQ ID NO: 94182 - protein, 487 aa, Arabidopsis thaliana; identical to SEQ ID NO: 90426
  peptide (1)..(487): Ceres Seq. ID no. 12723855

SEQ ID NO: 94183 - protein, 456 aa, Arabidopsis thaliana; identical to SEQ ID NO: 90427
  peptide (1)..(456): Ceres Seq. ID no. 12723856

SEQ ID NO: 94184 - protein, 443 aa, Arabidopsis thaliana; identical to SEQ ID NO: 90428
  peptide (1)..(443): Ceres Seq. ID no. 12723857

SEQ ID NO: 94185 - DNA, 1391 bp, Arabidopsis thaliana; identical to SEQ ID NO: 90429
  misc_feature (1)..(1391): Ceres Seq. ID no. 12723858
  misc_feature (1)..(1391): Ortholog of  Ceres SEQ ID NO 14308430 as cited in SEQ ID NO 55350
  misc_feature (1)..(1391): Ortholog of  Ceres SEQ ID NO 15177799 as cited in SEQ ID NO 59221
  misc_feature (1)..(1391): Ortholog of  Ceres SEQ ID NO 13662846 as cited in SEQ ID NO 65519

SEQ ID NO: 94186 - protein, 239 aa, Arabidopsis thaliana; identical to SEQ ID NO: 90430
  peptide (1)..(239): Ceres Seq. ID no. 12723859

SEQ ID NO: 94187 - protein, 179 aa, Arabidopsis thaliana; identical to SEQ ID NO: 90431
  peptide (1)..(179): Ceres Seq. ID no. 12723860

SEQ ID NO: 94188 - protein, 137 aa, Arabidopsis thaliana; identical to SEQ ID NO: 90432
  peptide (1)..(137): Ceres Seq. ID no. 12723861

SEQ ID NO: 94189 - DNA, 1149 bp, Arabidopsis thaliana; identical to SEQ ID NO: 90433
  misc_feature (1)..(1149): Ceres Seq. ID no. 12723870
  misc_feature (1)..(1149): Ortholog of  Ceres SEQ ID NO 13599900 as cited in SEQ ID NO 531

SEQ ID NO: 94190 - protein, 382 aa, Arabidopsis thaliana; identical to SEQ ID NO: 90434
  peptide (1)..(382): Ceres Seq. ID no. 12723871

SEQ ID NO: 94191 - protein, 238 aa, Arabidopsis thaliana; identical to SEQ ID NO: 90435
  peptide (1)..(238): Ceres Seq. ID no. 12723872

SEQ ID NO: 94192 - protein, 230 aa, Arabidopsis thaliana; identical to SEQ ID NO: 90436
  peptide (1)..(230): Ceres Seq. ID no. 12723873

SEQ ID NO: 94193 - DNA, 1428 bp, Arabidopsis thaliana; identical to SEQ ID NO: 90437
  misc_feature (1)..(1428): Ceres Seq. ID no. 12723898
  misc_feature (1)..(1428): Ortholog of  Ceres SEQ ID NO 13648575 as cited in SEQ ID NO 20407

SEQ ID NO: 94194 - protein, 475 aa, Arabidopsis thaliana; identical to SEQ ID NO: 90438
  peptide (1)..(475): Ceres Seq. ID no. 12723899

SEQ ID NO: 94195 - protein, 473 aa, Arabidopsis thaliana; identical to SEQ ID NO: 90439
  peptide (1)..(473): Ceres Seq. ID no. 12723900

SEQ ID NO: 94196 - protein, 391 aa, Arabidopsis thaliana; identical to SEQ ID NO: 90440
  peptide (1)..(391): Ceres Seq. ID no. 12723901

SEQ ID NO: 94197 - DNA, 1995 bp, Arabidopsis thaliana; identical to SEQ ID NO: 90441
  misc_feature (1)..(1995): Ceres Seq. ID no. 12723902
  misc_feature (1)..(1995): Ortholog of  Ceres SEQ ID NO 13655640 as cited in SEQ ID NO 63844

SEQ ID NO: 94198 - protein, 664 aa, Arabidopsis thaliana; identical to SEQ ID NO: 90442
  peptide (1)..(664): Ceres Seq. ID no. 12723903

SEQ ID NO: 94199 - protein, 604 aa, Arabidopsis thaliana; identical to SEQ ID NO: 90443
  peptide (1)..(604): Ceres Seq. ID no. 12723904

SEQ ID NO: 94200 - protein, 431 aa, Arabidopsis thaliana; identical to SEQ ID NO: 90444
  peptide (1)..(431): Ceres Seq. ID no. 12723905

SEQ ID NO: 94201 - DNA, 1293 bp, Arabidopsis thaliana; identical to SEQ ID NO: 90445
  misc_feature (1)..(1293): Ceres Seq. ID no. 12723962
  misc_feature (1)..(1293): Ortholog of  Ceres SEQ ID NO 15174752 as cited in SEQ ID NO 53279
  misc_feature (1)..(1293): Ortholog of  Ceres SEQ ID NO 14308389 as cited in SEQ ID NO 55226
  misc_feature (1)..(1293): Ortholog of  Ceres SEQ ID NO 15177652 as cited in SEQ ID NO 56858
  misc_feature (1)..(1293): Ortholog of  Ceres SEQ ID NO 15226087 as cited in SEQ ID NO 58655
  misc_feature (1)..(1293): Ortholog of  Ceres SEQ ID NO 13662197 as cited in SEQ ID NO 63622
  misc_feature (1)..(1293): Ortholog of  Ceres SEQ ID NO 14308049 as cited in SEQ ID NO 66203
  misc_feature (1)..(1293): Ortholog of  Ceres SEQ ID NO 14313292 as cited in SEQ ID NO 67393
  misc_feature (1)..(1293): Ortholog of  Ceres SEQ ID NO 14313567 as cited in SEQ ID NO 68074

SEQ ID NO: 94202 - protein, 430 aa, Arabidopsis thaliana; identical to SEQ ID NO: 90446
  peptide (1)..(430): Ceres Seq. ID no. 12723963

SEQ ID NO: 94203 - protein, 312 aa, Arabidopsis thaliana; identical to SEQ ID NO: 90447
  peptide (1)..(312): Ceres Seq. ID no. 12723964

SEQ ID NO: 94204 - protein, 272 aa, Arabidopsis thaliana; identical to SEQ ID NO: 90448
  peptide (1)..(272): Ceres Seq. ID no. 12723965

SEQ ID NO: 94205 - DNA, 786 bp, Arabidopsis thaliana; identical to SEQ ID NO: 90449
  misc_feature (1)..(786): Ceres Seq. ID no. 12723988
  misc_feature (1)..(786): Ortholog of  Ceres SEQ ID NO 14316404 as cited in SEQ ID NO 57641
  misc_feature (1)..(786): Ortholog of  Ceres SEQ ID NO 12611159 as cited in SEQ ID NO 59821

SEQ ID NO: 94206 - protein, 261 aa, Arabidopsis thaliana; identical to SEQ ID NO: 90450
  peptide (1)..(261): Ceres Seq. ID no. 12723989

SEQ ID NO: 94207 - protein, 250 aa, Arabidopsis thaliana; identical to SEQ ID NO: 90451
  peptide (1)..(250): Ceres Seq. ID no. 12723990

SEQ ID NO: 94208 - protein, 172 aa, Arabidopsis thaliana; identical to SEQ ID NO: 90452
  peptide (1)..(172): Ceres Seq. ID no. 12723991

SEQ ID NO: 94209 - DNA, 1410 bp, Arabidopsis thaliana; identical to SEQ ID NO: 90453
  misc_feature (1)..(1410): Ceres Seq. ID no. 12723995
  misc_feature (1)..(1410): Ortholog of  Ceres SEQ ID NO 14311870 as cited in SEQ ID NO 51574
  misc_feature (1)..(1410): Ortholog of  Ceres SEQ ID NO 15174583 as cited in SEQ ID NO 53693
  misc_feature (1)..(1410): Ortholog of  Ceres SEQ ID NO 13581563 as cited in SEQ ID NO 58942
  misc_feature (1)..(1410): Ortholog of  Ceres SEQ ID NO 13658707 as cited in SEQ ID NO 66286
  misc_feature (1)..(1410): Ortholog of  Ceres SEQ ID NO 13654528 as cited in SEQ ID NO 68080

SEQ ID NO: 94210 - protein, 469 aa, Arabidopsis thaliana; identical to SEQ ID NO: 90454
  peptide (1)..(469): Ceres Seq. ID no. 12723996

SEQ ID NO: 94211 - protein, 396 aa, Arabidopsis thaliana; identical to SEQ ID NO: 90455
  peptide (1)..(396): Ceres Seq. ID no. 12723997

SEQ ID NO: 94212 - DNA, 1365 bp, Arabidopsis thaliana; identical to SEQ ID NO: 90456
  misc_feature (1)..(1365): Ceres Seq. ID no. 12724024
  misc_feature (1)..(1365): Ortholog of  Ceres SEQ ID NO 14309755 as cited in SEQ ID NO 20741
  misc_feature (1)..(1365): Ortholog of  Ceres SEQ ID NO 13638746 as cited in SEQ ID NO 59296
  misc_feature (1)..(1365): Ortholog of  Ceres SEQ ID NO 13596474 as cited in SEQ ID NO 62169
  misc_feature (1)..(1365): Ortholog of  Ceres SEQ ID NO 13598714 as cited in SEQ ID NO 62656
  misc_feature (1)..(1365): Ortholog of  Ceres SEQ ID NO 13597519 as cited in SEQ ID NO 64759
  misc_feature (1)..(1365): Ortholog of  Ceres SEQ ID NO 13595926 as cited in SEQ ID NO 67778
  misc_feature (1)..(1365): Ortholog of  Ceres SEQ ID NO 13587054 as cited in SEQ ID NO 0

SEQ ID NO: 94213 - protein, 354 aa, Arabidopsis thaliana; identical to SEQ ID NO: 90457
  peptide (1)..(354): Ceres Seq. ID no. 12724025

SEQ ID NO: 94214 - protein, 332 aa, Arabidopsis thaliana; identical to SEQ ID NO: 90458
  peptide (1)..(332): Ceres Seq. ID no. 12724026

SEQ ID NO: 94215 - protein, 241 aa, Arabidopsis thaliana; identical to SEQ ID NO: 90459
  peptide (1)..(241): Ceres Seq. ID no. 12724027

SEQ ID NO: 94216 - DNA, 1758 bp, Arabidopsis thaliana; identical to SEQ ID NO: 90460
  misc_feature (1)..(1758): Ceres Seq. ID no. 12724048
  misc_feature (1)..(1758): Ortholog of  Ceres SEQ ID NO 15178464 as cited in SEQ ID NO 67743

SEQ ID NO: 94217 - protein, 420 aa, Arabidopsis thaliana; identical to SEQ ID NO: 90461
  peptide (1)..(420): Ceres Seq. ID no. 12724049

SEQ ID NO: 94218 - protein, 398 aa, Arabidopsis thaliana; identical to SEQ ID NO: 90462
  peptide (1)..(398): Ceres Seq. ID no. 12724050

SEQ ID NO: 94219 - protein, 397 aa, Arabidopsis thaliana; identical to SEQ ID NO: 90463
  peptide (1)..(397): Ceres Seq. ID no. 12724051

SEQ ID NO: 94220 - DNA, 939 bp, Arabidopsis thaliana; identical to SEQ ID NO: 90464
  misc_feature (1)..(939): Ceres Seq. ID no. 12724052
  misc_feature (1)..(939): Ortholog of  Ceres SEQ ID NO 15178027 as cited in SEQ ID NO 55634
  misc_feature (1)..(939): Ortholog of  Ceres SEQ ID NO 13597537 as cited in SEQ ID NO 64962

SEQ ID NO: 94221 - protein, 312 aa, Arabidopsis thaliana; identical to SEQ ID NO: 90465
  peptide (1)..(312): Ceres Seq. ID no. 12724053

SEQ ID NO: 94222 - protein, 298 aa, Arabidopsis thaliana; identical to SEQ ID NO: 90466
  peptide (1)..(298): Ceres Seq. ID no. 12724054

SEQ ID NO: 94223 - protein, 294 aa, Arabidopsis thaliana; identical to SEQ ID NO: 90467
  peptide (1)..(294): Ceres Seq. ID no. 12724055

SEQ ID NO: 94224 - DNA, 1026 bp, Arabidopsis thaliana; identical to SEQ ID NO: 90468
  misc_feature (1)..(1026): Ceres Seq. ID no. 12724060
  misc_feature (1)..(1026): Ortholog of  Ceres SEQ ID NO 13502952 as cited in SEQ ID NO 62271
  misc_feature (1)..(1026): Ortholog of  Ceres SEQ ID NO 13502973 as cited in SEQ ID NO 68052
  misc_feature (1)..(1026): Ortholog of  Ceres SEQ ID NO 13596000 as cited in SEQ ID NO 68188
  misc_feature (1)..(1026): Ortholog of  Ceres SEQ ID NO 15179420 as cited in SEQ ID NO 0

SEQ ID NO: 94225 - protein, 341 aa, Arabidopsis thaliana; identical to SEQ ID NO: 90469
  peptide (1)..(341): Ceres Seq. ID no. 12724061

SEQ ID NO: 94226 - protein, 303 aa, Arabidopsis thaliana; identical to SEQ ID NO: 90470
  peptide (1)..(303): Ceres Seq. ID no. 12724062

SEQ ID NO: 94227 - protein, 271 aa, Arabidopsis thaliana; identical to SEQ ID NO: 90471
  peptide (1)..(271): Ceres Seq. ID no. 12724063

SEQ ID NO: 94228 - DNA, 1785 bp, Arabidopsis thaliana; identical to SEQ ID NO: 90472
  misc_feature (1)..(1785): Ceres Seq. ID no. 12724064
  misc_feature (1)..(1785): Ortholog of  Ceres SEQ ID NO 13659971 as cited in SEQ ID NO 67565
  misc_feature (1)..(1785): Ortholog of  Ceres SEQ ID NO 13500385 as cited in SEQ ID NO 67583

SEQ ID NO: 94229 - protein, 594 aa, Arabidopsis thaliana; identical to SEQ ID NO: 90473
  peptide (1)..(594): Ceres Seq. ID no. 12724065

SEQ ID NO: 94230 - protein, 502 aa, Arabidopsis thaliana; identical to SEQ ID NO: 90474
  peptide (1)..(502): Ceres Seq. ID no. 12724066

SEQ ID NO: 94231 - protein, 414 aa, Arabidopsis thaliana; identical to SEQ ID NO: 90475
  peptide (1)..(414): Ceres Seq. ID no. 12724067

SEQ ID NO: 94232 - DNA, 1026 bp, Arabidopsis thaliana; identical to SEQ ID NO: 90476
  misc_feature (1)..(1026): Ceres Seq. ID no. 12724068
  misc_feature (1)..(1026): Ortholog of  Ceres SEQ ID NO 15172539 as cited in SEQ ID NO 57333
  misc_feature (1)..(1026): Ortholog of  Ceres SEQ ID NO 14315951 as cited in SEQ ID NO 57634
  misc_feature (1)..(1026): Ortholog of  Ceres SEQ ID NO 13597324 as cited in SEQ ID NO 64842
  misc_feature (1)..(1026): Ortholog of  Ceres SEQ ID NO 13658672 as cited in SEQ ID NO 66627

SEQ ID NO: 94233 - protein, 341 aa, Arabidopsis thaliana; identical to SEQ ID NO: 90477
  peptide (1)..(341): Ceres Seq. ID no. 12724069

SEQ ID NO: 94234 - protein, 200 aa, Arabidopsis thaliana; identical to SEQ ID NO: 90478
  peptide (1)..(200): Ceres Seq. ID no. 12724070

SEQ ID NO: 94235 - protein, 170 aa, Arabidopsis thaliana; identical to SEQ ID NO: 90479
  peptide (1)..(170): Ceres Seq. ID no. 12724071

SEQ ID NO: 94236 - DNA, 1799 bp, Arabidopsis thaliana; identical to SEQ ID NO: 90480
  misc_feature (1)..(1799): Ceres Seq. ID no. 12724084
  misc_feature (1)..(1799): Ortholog of  Ceres SEQ ID NO 13582619 as cited in SEQ ID NO 56520
  misc_feature (1)..(1799): Ortholog of  Ceres SEQ ID NO 12611392 as cited in SEQ ID NO 56826
  misc_feature (1)..(1799): Ortholog of  Ceres SEQ ID NO 13660872 as cited in SEQ ID NO 60830
  misc_feature (1)..(1799): Ortholog of  Ceres SEQ ID NO 12616221 as cited in SEQ ID NO 63291

SEQ ID NO: 94237 - protein, 469 aa, Arabidopsis thaliana; identical to SEQ ID NO: 90481
  peptide (1)..(469): Ceres Seq. ID no. 12724085

SEQ ID NO: 94238 - protein, 460 aa, Arabidopsis thaliana; identical to SEQ ID NO: 90482
  peptide (1)..(460): Ceres Seq. ID no. 12724086

SEQ ID NO: 94239 - DNA, 2442 bp, Arabidopsis thaliana; identical to SEQ ID NO: 90483
  misc_feature (1)..(2442): Ceres Seq. ID no. 12724098
  misc_feature (1)..(2442): Ortholog of  Ceres SEQ ID NO 13600310 as cited in SEQ ID NO 5086
  misc_feature (1)..(2442): Ortholog of  Ceres SEQ ID NO 15172491 as cited in SEQ ID NO 58719
  misc_feature (1)..(2442): Ortholog of  Ceres SEQ ID NO 15180362 as cited in SEQ ID NO 0

SEQ ID NO: 94240 - protein, 813 aa, Arabidopsis thaliana; identical to SEQ ID NO: 90484
  peptide (1)..(813): Ceres Seq. ID no. 12724099

SEQ ID NO: 94241 - protein, 789 aa, Arabidopsis thaliana; identical to SEQ ID NO: 90485
  peptide (1)..(789): Ceres Seq. ID no. 12724100

SEQ ID NO: 94242 - protein, 729 aa, Arabidopsis thaliana; identical to SEQ ID NO: 90486
  peptide (1)..(729): Ceres Seq. ID no. 12724101

SEQ ID NO: 94243 - DNA, 954 bp, Arabidopsis thaliana; identical to SEQ ID NO: 90487
  misc_feature (1)..(954): Ceres Seq. ID no. 12724102
  misc_feature (1)..(954): Ortholog of  Ceres SEQ ID NO 14303446 as cited in SEQ ID NO 59378

SEQ ID NO: 94244 - protein, 317 aa, Arabidopsis thaliana; identical to SEQ ID NO: 90488
  peptide (1)..(317): Ceres Seq. ID no. 12724103

SEQ ID NO: 94245 - protein, 191 aa, Arabidopsis thaliana; identical to SEQ ID NO: 90489
  peptide (1)..(191): Ceres Seq. ID no. 12724104

SEQ ID NO: 94246 - DNA, 2214 bp, Arabidopsis thaliana; identical to SEQ ID NO: 90490
  misc_feature (1)..(2214): Ceres Seq. ID no. 12724109
  misc_feature (1)..(2214): Ortholog of  Ceres SEQ ID NO 12586556 as cited in SEQ ID NO 64667
  misc_feature (1)..(2214): Ortholog of  Ceres SEQ ID NO 13660894 as cited in SEQ ID NO 67475

SEQ ID NO: 94247 - protein, 737 aa, Arabidopsis thaliana; identical to SEQ ID NO: 90491
  peptide (1)..(737): Ceres Seq. ID no. 12724110

SEQ ID NO: 94248 - protein, 589 aa, Arabidopsis thaliana; identical to SEQ ID NO: 90492
  peptide (1)..(589): Ceres Seq. ID no. 12724111

SEQ ID NO: 94249 - protein, 577 aa, Arabidopsis thaliana; identical to SEQ ID NO: 90493
  peptide (1)..(577): Ceres Seq. ID no. 12724112

SEQ ID NO: 94250 - DNA, 825 bp, Arabidopsis thaliana; identical to SEQ ID NO: 90494
  misc_feature (1)..(825): Ceres Seq. ID no. 12724113
  misc_feature (1)..(825): Ortholog of  Ceres SEQ ID NO 14311074 as cited in SEQ ID NO 53253

SEQ ID NO: 94251 - protein, 274 aa, Arabidopsis thaliana; identical to SEQ ID NO: 90495
  peptide (1)..(274): Ceres Seq. ID no. 12724114

SEQ ID NO: 94252 - DNA, 1101 bp, Arabidopsis thaliana; identical to SEQ ID NO: 90496
  misc_feature (1)..(1101): Ceres Seq. ID no. 12724115
  misc_feature (1)..(1101): Ortholog of  Ceres SEQ ID NO 12625831 as cited in SEQ ID NO 65139

SEQ ID NO: 94253 - protein, 366 aa, Arabidopsis thaliana; identical to SEQ ID NO: 90497
  peptide (1)..(366): Ceres Seq. ID no. 12724116

SEQ ID NO: 94254 - protein, 254 aa, Arabidopsis thaliana; identical to SEQ ID NO: 90498
  peptide (1)..(254): Ceres Seq. ID no. 12724117

SEQ ID NO: 94255 - protein, 233 aa, Arabidopsis thaliana; identical to SEQ ID NO: 90499
  peptide (1)..(233): Ceres Seq. ID no. 12724118

SEQ ID NO: 94256 - DNA, 681 bp, Arabidopsis thaliana; identical to SEQ ID NO: 90500
  misc_feature (1)..(681): Ceres Seq. ID no. 12724127
  misc_feature (1)..(681): Ortholog of  Ceres SEQ ID NO 12609869 as cited in SEQ ID NO 52065
  misc_feature (1)..(681): Ortholog of  Ceres SEQ ID NO 14301506 as cited in SEQ ID NO 61159
  misc_feature (1)..(681): Ortholog of  Ceres SEQ ID NO 13597124 as cited in SEQ ID NO 64173
  misc_feature (1)..(681): Ortholog of  Ceres SEQ ID NO 12780602 as cited in SEQ ID NO 65695

SEQ ID NO: 94257 - protein, 226 aa, Arabidopsis thaliana; identical to SEQ ID NO: 90501
  peptide (1)..(226): Ceres Seq. ID no. 12724128

SEQ ID NO: 94258 - protein, 143 aa, Arabidopsis thaliana; identical to SEQ ID NO: 90502
  peptide (1)..(143): Ceres Seq. ID no. 12724129

SEQ ID NO: 94259 - DNA, 648 bp, Arabidopsis thaliana; identical to SEQ ID NO: 90503
  misc_feature (1)..(648): Ceres Seq. ID no. 12724130
  misc_feature (1)..(648): Ortholog of  Ceres SEQ ID NO 14305854 as cited in SEQ ID NO 52331
  misc_feature (1)..(648): Ortholog of  Ceres SEQ ID NO 15168588 as cited in SEQ ID NO 60235

SEQ ID NO: 94260 - protein, 215 aa, Arabidopsis thaliana; identical to SEQ ID NO: 90504
  peptide (1)..(215): Ceres Seq. ID no. 12724131

SEQ ID NO: 94261 - protein, 150 aa, Arabidopsis thaliana; identical to SEQ ID NO: 90505
  peptide (1)..(150): Ceres Seq. ID no. 12724132

SEQ ID NO: 94262 - DNA, 1596 bp, Arabidopsis thaliana; identical to SEQ ID NO: 90506
  misc_feature (1)..(1596): Ceres Seq. ID no. 12724155
  misc_feature (1)..(1596): Ortholog of  Ceres SEQ ID NO 13656091 as cited in SEQ ID NO 69094

SEQ ID NO: 94263 - protein, 531 aa, Arabidopsis thaliana; identical to SEQ ID NO: 90507
  peptide (1)..(531): Ceres Seq. ID no. 12724156

SEQ ID NO: 94264 - protein, 523 aa, Arabidopsis thaliana; identical to SEQ ID NO: 90508
  peptide (1)..(523): Ceres Seq. ID no. 12724157

SEQ ID NO: 94265 - protein, 392 aa, Arabidopsis thaliana; identical to SEQ ID NO: 90509
  peptide (1)..(392): Ceres Seq. ID no. 12724158

SEQ ID NO: 94266 - DNA, 1695 bp, Arabidopsis thaliana; identical to SEQ ID NO: 90510
  misc_feature (1)..(1695): Ceres Seq. ID no. 12724159
  misc_feature (1)..(1695): Ortholog of  Ceres SEQ ID NO 14311028 as cited in SEQ ID NO 54464
  misc_feature (1)..(1695): Ortholog of  Ceres SEQ ID NO 13656091 as cited in SEQ ID NO 69094

SEQ ID NO: 94267 - protein, 564 aa, Arabidopsis thaliana; identical to SEQ ID NO: 90511
  peptide (1)..(564): Ceres Seq. ID no. 12724160

SEQ ID NO: 94268 - protein, 477 aa, Arabidopsis thaliana; identical to SEQ ID NO: 90512
  peptide (1)..(477): Ceres Seq. ID no. 12724161

SEQ ID NO: 94269 - protein, 468 aa, Arabidopsis thaliana; identical to SEQ ID NO: 90513
  peptide (1)..(468): Ceres Seq. ID no. 12724162

SEQ ID NO: 94270 - DNA, 1530 bp, Arabidopsis thaliana; identical to SEQ ID NO: 90514
  misc_feature (1)..(1530): Ceres Seq. ID no. 12724163
  misc_feature (1)..(1530): Ortholog of  Ceres SEQ ID NO 13656091 as cited in SEQ ID NO 69094

SEQ ID NO: 94271 - protein, 509 aa, Arabidopsis thaliana; identical to SEQ ID NO: 90515
  peptide (1)..(509): Ceres Seq. ID no. 12724164

SEQ ID NO: 94272 - protein, 435 aa, Arabidopsis thaliana; identical to SEQ ID NO: 90516
  peptide (1)..(435): Ceres Seq. ID no. 12724165

SEQ ID NO: 94273 - protein, 383 aa, Arabidopsis thaliana; identical to SEQ ID NO: 90517
  peptide (1)..(383): Ceres Seq. ID no. 12724166

SEQ ID NO: 94274 - DNA, 1332 bp, Arabidopsis thaliana; identical to SEQ ID NO: 90518
  misc_feature (1)..(1332): Ceres Seq. ID no. 12724179
  misc_feature (1)..(1332): Ortholog of  Ceres SEQ ID NO 14303790 as cited in SEQ ID NO 55525

SEQ ID NO: 94275 - protein, 443 aa, Arabidopsis thaliana; identical to SEQ ID NO: 90519
  peptide (1)..(443): Ceres Seq. ID no. 12724180

SEQ ID NO: 94276 - protein, 313 aa, Arabidopsis thaliana; identical to SEQ ID NO: 90520
  peptide (1)..(313): Ceres Seq. ID no. 12724181

SEQ ID NO: 94277 - protein, 292 aa, Arabidopsis thaliana; identical to SEQ ID NO: 90521
  peptide (1)..(292): Ceres Seq. ID no. 12724182

SEQ ID NO: 94278 - DNA, 696 bp, Arabidopsis thaliana; identical to SEQ ID NO: 90522
  misc_feature (1)..(696): Ceres Seq. ID no. 12724191
  misc_feature (1)..(696): Ortholog of  Ceres SEQ ID NO 14313088 as cited in SEQ ID NO 58870
  misc_feature (1)..(696): Ortholog of  Ceres SEQ ID NO 14314571 as cited in SEQ ID NO 59360

SEQ ID NO: 94279 - protein, 231 aa, Arabidopsis thaliana; identical to SEQ ID NO: 90523
  peptide (1)..(231): Ceres Seq. ID no. 12724192

SEQ ID NO: 94280 - protein, 224 aa, Arabidopsis thaliana; identical to SEQ ID NO: 90524
  peptide (1)..(224): Ceres Seq. ID no. 12724193

SEQ ID NO: 94281 - protein, 222 aa, Arabidopsis thaliana; identical to SEQ ID NO: 90525
  peptide (1)..(222): Ceres Seq. ID no. 12724194

SEQ ID NO: 94282 - DNA, 1401 bp, Arabidopsis thaliana; identical to SEQ ID NO: 90526
  misc_feature (1)..(1401): Ceres Seq. ID no. 12724197
  misc_feature (1)..(1401): Ortholog of  Ceres SEQ ID NO 15171438 as cited in SEQ ID NO 51665
  misc_feature (1)..(1401): Ortholog of  Ceres SEQ ID NO 15170203 as cited in SEQ ID NO 53291
  misc_feature (1)..(1401): Ortholog of  Ceres SEQ ID NO 14303083 as cited in SEQ ID NO 66573

SEQ ID NO: 94283 - protein, 466 aa, Arabidopsis thaliana; identical to SEQ ID NO: 90527
  peptide (1)..(466): Ceres Seq. ID no. 12724198

SEQ ID NO: 94284 - protein, 293 aa, Arabidopsis thaliana; identical to SEQ ID NO: 90528
  peptide (1)..(293): Ceres Seq. ID no. 12724199

SEQ ID NO: 94285 - DNA, 1691 bp, Arabidopsis thaliana; identical to SEQ ID NO: 90529
  misc_feature (1)..(1691): Ceres Seq. ID no. 12724226
  misc_feature (1)..(1691): Ortholog of  Ceres SEQ ID NO 13597546 as cited in SEQ ID NO 65017
  misc_feature (1)..(1691): Ortholog of  Ceres SEQ ID NO 14308015 as cited in SEQ ID NO 65798
  misc_feature (1)..(1691): Ortholog of  Ceres SEQ ID NO 14307908 as cited in SEQ ID NO 67189
  misc_feature (1)..(1691): Ortholog of  Ceres SEQ ID NO 13654353 as cited in SEQ ID NO 68318

SEQ ID NO: 94286 - protein, 522 aa, Arabidopsis thaliana; identical to SEQ ID NO: 90530
  peptide (1)..(522): Ceres Seq. ID no. 12724227

SEQ ID NO: 94287 - protein, 513 aa, Arabidopsis thaliana; identical to SEQ ID NO: 90531
  peptide (1)..(513): Ceres Seq. ID no. 12724228

SEQ ID NO: 94288 - protein, 446 aa, Arabidopsis thaliana; identical to SEQ ID NO: 90532
  peptide (1)..(446): Ceres Seq. ID no. 12724229

SEQ ID NO: 94289 - DNA, 2424 bp, Arabidopsis thaliana; identical to SEQ ID NO: 90533
  misc_feature (1)..(2424): Ceres Seq. ID no. 12724230
  misc_feature (1)..(2424): Ortholog of  Ceres SEQ ID NO 14316208 as cited in SEQ ID NO 53539
  misc_feature (1)..(2424): Ortholog of  Ceres SEQ ID NO 14305019 as cited in SEQ ID NO 53897

SEQ ID NO: 94290 - protein, 241 aa, Arabidopsis thaliana; identical to SEQ ID NO: 90534
  peptide (1)..(241): Ceres Seq. ID no. 12724231

SEQ ID NO: 94291 - protein, 237 aa, Arabidopsis thaliana; identical to SEQ ID NO: 90535
  peptide (1)..(237): Ceres Seq. ID no. 12724232

SEQ ID NO: 94292 - protein, 236 aa, Arabidopsis thaliana; identical to SEQ ID NO: 90536
  peptide (1)..(236): Ceres Seq. ID no. 12724233

SEQ ID NO: 94293 - DNA, 1113 bp, Arabidopsis thaliana; identical to SEQ ID NO: 90537
  misc_feature (1)..(1113): Ceres Seq. ID no. 12724242
  misc_feature (1)..(1113): Ortholog of  Ceres SEQ ID NO 13593889 as cited in SEQ ID NO 53305
  misc_feature (1)..(1113): Ortholog of  Ceres SEQ ID NO 13581959 as cited in SEQ ID NO 56156

SEQ ID NO: 94294 - protein, 370 aa, Arabidopsis thaliana; identical to SEQ ID NO: 90538
  peptide (1)..(370): Ceres Seq. ID no. 12724243

SEQ ID NO: 94295 - protein, 366 aa, Arabidopsis thaliana; identical to SEQ ID NO: 90539
  peptide (1)..(366): Ceres Seq. ID no. 12724244

SEQ ID NO: 94296 - protein, 330 aa, Arabidopsis thaliana; identical to SEQ ID NO: 90540
  peptide (1)..(330): Ceres Seq. ID no. 12724245

SEQ ID NO: 94297 - DNA, 2820 bp, Arabidopsis thaliana; identical to SEQ ID NO: 90541
  misc_feature (1)..(2820): Ceres Seq. ID no. 12724263
  misc_feature (1)..(2820): Ortholog of  Ceres SEQ ID NO 13593889 as cited in SEQ ID NO 53305
  misc_feature (1)..(2820): Ortholog of  Ceres SEQ ID NO 13581959 as cited in SEQ ID NO 56156

SEQ ID NO: 94298 - protein, 820 aa, Arabidopsis thaliana; identical to SEQ ID NO: 90542
  peptide (1)..(820): Ceres Seq. ID no. 12724264

SEQ ID NO: 94299 - protein, 765 aa, Arabidopsis thaliana; identical to SEQ ID NO: 90543
  peptide (1)..(765): Ceres Seq. ID no. 12724265

SEQ ID NO: 94300 - protein, 737 aa, Arabidopsis thaliana; identical to SEQ ID NO: 90544
  peptide (1)..(737): Ceres Seq. ID no. 12724266

SEQ ID NO: 94301 - DNA, 964 bp, Arabidopsis thaliana; identical to SEQ ID NO: 90545
  misc_feature (1)..(964): Ceres Seq. ID no. 12724275
  misc_feature (1)..(964): Ortholog of  Ceres SEQ ID NO 14308278 as cited in SEQ ID NO 55403
  misc_feature (1)..(964): Ortholog of  Ceres SEQ ID NO 12618176 as cited in SEQ ID NO 64489
  misc_feature (1)..(964): Ortholog of  Ceres SEQ ID NO 15179231 as cited in SEQ ID NO 0

SEQ ID NO: 94302 - protein, 221 aa, Arabidopsis thaliana; identical to SEQ ID NO: 90546
  peptide (1)..(221): Ceres Seq. ID no. 12724276

SEQ ID NO: 94303 - protein, 212 aa, Arabidopsis thaliana; identical to SEQ ID NO: 90547
  peptide (1)..(212): Ceres Seq. ID no. 12724277

SEQ ID NO: 94304 - protein, 183 aa, Arabidopsis thaliana; identical to SEQ ID NO: 90548
  peptide (1)..(183): Ceres Seq. ID no. 12724278

SEQ ID NO: 94305 - DNA, 1092 bp, Arabidopsis thaliana; identical to SEQ ID NO: 90549
  misc_feature (1)..(1092): Ceres Seq. ID no. 12724283
  misc_feature (1)..(1092): Ortholog of  Ceres SEQ ID NO 13658153 as cited in SEQ ID NO 66326

SEQ ID NO: 94306 - protein, 363 aa, Arabidopsis thaliana; identical to SEQ ID NO: 90550
  peptide (1)..(363): Ceres Seq. ID no. 12724284

SEQ ID NO: 94307 - protein, 351 aa, Arabidopsis thaliana; identical to SEQ ID NO: 90551
  peptide (1)..(351): Ceres Seq. ID no. 12724285

SEQ ID NO: 94308 - protein, 215 aa, Arabidopsis thaliana; identical to SEQ ID NO: 90552
  peptide (1)..(215): Ceres Seq. ID no. 12724286

SEQ ID NO: 94309 - DNA, 951 bp, Arabidopsis thaliana; identical to SEQ ID NO: 90553
  misc_feature (1)..(951): Ceres Seq. ID no. 12724287
  misc_feature (1)..(951): Ortholog of  Ceres SEQ ID NO 12484482 as cited in SEQ ID NO 53324

SEQ ID NO: 94310 - protein, 316 aa, Arabidopsis thaliana; identical to SEQ ID NO: 90554
  peptide (1)..(316): Ceres Seq. ID no. 12724288

SEQ ID NO: 94311 - protein, 313 aa, Arabidopsis thaliana; identical to SEQ ID NO: 90555
  peptide (1)..(313): Ceres Seq. ID no. 12724289

SEQ ID NO: 94312 - protein, 309 aa, Arabidopsis thaliana; identical to SEQ ID NO: 90556
  peptide (1)..(309): Ceres Seq. ID no. 12724290

SEQ ID NO: 94313 - DNA, 1521 bp, Arabidopsis thaliana; identical to SEQ ID NO: 90557
  misc_feature (1)..(1521): Ceres Seq. ID no. 12724298
  misc_feature (1)..(1521): Ortholog of  Ceres SEQ ID NO 13595861 as cited in SEQ ID NO 58153
  misc_feature (1)..(1521): Ortholog of  Ceres SEQ ID NO 13584292 as cited in SEQ ID NO 63687

SEQ ID NO: 94314 - protein, 334 aa, Arabidopsis thaliana; identical to SEQ ID NO: 90558
  peptide (1)..(334): Ceres Seq. ID no. 12724299

SEQ ID NO: 94315 - protein, 299 aa, Arabidopsis thaliana; identical to SEQ ID NO: 90559
  peptide (1)..(299): Ceres Seq. ID no. 12724300

SEQ ID NO: 94316 - protein, 276 aa, Arabidopsis thaliana; identical to SEQ ID NO: 90560
  peptide (1)..(276): Ceres Seq. ID no. 12724301

SEQ ID NO: 94317 - DNA, 1125 bp, Arabidopsis thaliana; identical to SEQ ID NO: 90561
  misc_feature (1)..(1125): Ceres Seq. ID no. 12724302
  misc_feature (1)..(1125): Ortholog of  Ceres SEQ ID NO 13585587 as cited in SEQ ID NO 65515

SEQ ID NO: 94318 - protein, 374 aa, Arabidopsis thaliana; identical to SEQ ID NO: 90562
  peptide (1)..(374): Ceres Seq. ID no. 12724303

SEQ ID NO: 94319 - protein, 348 aa, Arabidopsis thaliana; identical to SEQ ID NO: 88886
  peptide (1)..(348): Ceres Seq. ID no. 12724304

SEQ ID NO: 94320 - protein, 306 aa, Arabidopsis thaliana; identical to SEQ ID NO: 88887
  peptide (1)..(306): Ceres Seq. ID no. 12724305

SEQ ID NO: 94321 - DNA, 1071 bp, Arabidopsis thaliana; identical to SEQ ID NO: 90565
  misc_feature (1)..(1071): Ceres Seq. ID no. 12724330
  misc_feature (1)..(1071): Ortholog of  Ceres SEQ ID NO 14313599 as cited in SEQ ID NO 54989
  misc_feature (1)..(1071): Ortholog of  Ceres SEQ ID NO 15176204 as cited in SEQ ID NO 55608
  misc_feature (1)..(1071): Ortholog of  Ceres SEQ ID NO 15225111 as cited in SEQ ID NO 58444
  misc_feature (1)..(1071): Ortholog of  Ceres SEQ ID NO 14313064 as cited in SEQ ID NO 59543
  misc_feature (1)..(1071): Ortholog of  Ceres SEQ ID NO 13584238 as cited in SEQ ID NO 64216
  misc_feature (1)..(1071): Ortholog of  Ceres SEQ ID NO 13661001 as cited in SEQ ID NO 67531
  misc_feature (1)..(1071): Ortholog of  Ceres SEQ ID NO 15178920 as cited in SEQ ID NO 0

SEQ ID NO: 94322 - protein, 286 aa, Arabidopsis thaliana; identical to SEQ ID NO: 90566
  peptide (1)..(286): Ceres Seq. ID no. 12724331

SEQ ID NO: 94323 - protein, 282 aa, Arabidopsis thaliana; identical to SEQ ID NO: 90567
  peptide (1)..(282): Ceres Seq. ID no. 12724332

SEQ ID NO: 94324 - DNA, 1730 bp, Arabidopsis thaliana; identical to SEQ ID NO: 90568
  misc_feature (1)..(1730): Ceres Seq. ID no. 12724350
  misc_feature (1)..(1730): Ortholog of  Ceres SEQ ID NO 14316204 as cited in SEQ ID NO 59644

SEQ ID NO: 94325 - protein, 436 aa, Arabidopsis thaliana; identical to SEQ ID NO: 90569
  peptide (1)..(436): Ceres Seq. ID no. 12724351

SEQ ID NO: 94326 - protein, 403 aa, Arabidopsis thaliana; identical to SEQ ID NO: 90570
  peptide (1)..(403): Ceres Seq. ID no. 12724352

SEQ ID NO: 94327 - DNA, 983 bp, Arabidopsis thaliana; identical to SEQ ID NO: 90571
  misc_feature (1)..(983): Ceres Seq. ID no. 12724364
  misc_feature (1)..(983): Ortholog of  Ceres SEQ ID NO 14312281 as cited in SEQ ID NO 59172
  misc_feature (1)..(983): Ortholog of  Ceres SEQ ID NO 14302299 as cited in SEQ ID NO 68665
  misc_feature (1)..(983): Ortholog of  Ceres SEQ ID NO 15174396 as cited in SEQ ID NO 0

SEQ ID NO: 94328 - protein, 233 aa, Arabidopsis thaliana; identical to SEQ ID NO: 90572
  peptide (1)..(233): Ceres Seq. ID no. 12724365

SEQ ID NO: 94329 - protein, 146 aa, Arabidopsis thaliana; identical to SEQ ID NO: 90573
  peptide (1)..(146): Ceres Seq. ID no. 12724366

SEQ ID NO: 94330 - DNA, 1860 bp, Arabidopsis thaliana; identical to SEQ ID NO: 90574
  misc_feature (1)..(1860): Ceres Seq. ID no. 12724367
  misc_feature (1)..(1860): Ortholog of  Ceres SEQ ID NO 14303366 as cited in SEQ ID NO 54418
  misc_feature (1)..(1860): Ortholog of  Ceres SEQ ID NO 13503610 as cited in SEQ ID NO 62416
  misc_feature (1)..(1860): Ortholog of  Ceres SEQ ID NO 13657610 as cited in SEQ ID NO 66165
  misc_feature (1)..(1860): Ortholog of  Ceres SEQ ID NO 13598312 as cited in SEQ ID NO 68448
  misc_feature (1)..(1860): Ortholog of  Ceres SEQ ID NO 13596100 as cited in SEQ ID NO 68573

SEQ ID NO: 94331 - protein, 497 aa, Arabidopsis thaliana; identical to SEQ ID NO: 23374
  peptide (1)..(497): Ceres Seq. ID no. 12724368

SEQ ID NO: 94332 - protein, 492 aa, Arabidopsis thaliana; identical to SEQ ID NO: 23375
  peptide (1)..(492): Ceres Seq. ID no. 12724369

SEQ ID NO: 94333 - protein, 460 aa, Arabidopsis thaliana; identical to SEQ ID NO: 23376
  peptide (1)..(460): Ceres Seq. ID no. 12724370

SEQ ID NO: 94334 - DNA, 3048 bp, Arabidopsis thaliana; identical to SEQ ID NO: 90578
  misc_feature (1)..(3048): Ceres Seq. ID no. 12724375
  misc_feature (1)..(3048): Ortholog of  Ceres SEQ ID NO 13518411 as cited in SEQ ID NO 55230
  misc_feature (1)..(3048): Ortholog of  Ceres SEQ ID NO 13654989 as cited in SEQ ID NO 63117
  misc_feature (1)..(3048): Ortholog of  Ceres SEQ ID NO 13584744 as cited in SEQ ID NO 69137

SEQ ID NO: 94335 - protein, 708 aa, Arabidopsis thaliana; identical to SEQ ID NO: 90579
  peptide (1)..(708): Ceres Seq. ID no. 12724376

SEQ ID NO: 94336 - protein, 386 aa, Arabidopsis thaliana; identical to SEQ ID NO: 90580
  peptide (1)..(386): Ceres Seq. ID no. 12724377

SEQ ID NO: 94337 - protein, 373 aa, Arabidopsis thaliana; identical to SEQ ID NO: 90581
  peptide (1)..(373): Ceres Seq. ID no. 12724378

SEQ ID NO: 94338 - DNA, 1709 bp, Arabidopsis thaliana; identical to SEQ ID NO: 90582
  misc_feature (1)..(1709): Ceres Seq. ID no. 12724407
  misc_feature (1)..(1709): Ortholog of  Ceres SEQ ID NO 15178169 as cited in SEQ ID NO 58511

SEQ ID NO: 94339 - protein, 468 aa, Arabidopsis thaliana; identical to SEQ ID NO: 90583
  peptide (1)..(468): Ceres Seq. ID no. 12724408

SEQ ID NO: 94340 - protein, 461 aa, Arabidopsis thaliana; identical to SEQ ID NO: 90584
  peptide (1)..(461): Ceres Seq. ID no. 12724409

SEQ ID NO: 94341 - protein, 398 aa, Arabidopsis thaliana; identical to SEQ ID NO: 90585
  peptide (1)..(398): Ceres Seq. ID no. 12724410

SEQ ID NO: 94342 - DNA, 1241 bp, Arabidopsis thaliana; identical to SEQ ID NO: 90586
  misc_feature (1)..(1241): Ceres Seq. ID no. 12724415
  misc_feature (1)..(1241): Ortholog of  Ceres SEQ ID NO 13596474 as cited in SEQ ID NO 62169
  misc_feature (1)..(1241): Ortholog of  Ceres SEQ ID NO 13598714 as cited in SEQ ID NO 62656
  misc_feature (1)..(1241): Ortholog of  Ceres SEQ ID NO 13596969 as cited in SEQ ID NO 63375
  misc_feature (1)..(1241): Ortholog of  Ceres SEQ ID NO 13597519 as cited in SEQ ID NO 64759
  misc_feature (1)..(1241): Ortholog of  Ceres SEQ ID NO 13587054 as cited in SEQ ID NO 0

SEQ ID NO: 94343 - protein, 336 aa, Arabidopsis thaliana; identical to SEQ ID NO: 90587
  peptide (1)..(336): Ceres Seq. ID no. 12724416

SEQ ID NO: 94344 - protein, 335 aa, Arabidopsis thaliana; identical to SEQ ID NO: 90588
  peptide (1)..(335): Ceres Seq. ID no. 12724417

SEQ ID NO: 94345 - protein, 327 aa, Arabidopsis thaliana; identical to SEQ ID NO: 90589
  peptide (1)..(327): Ceres Seq. ID no. 12724418

SEQ ID NO: 94346 - DNA, 2232 bp, Arabidopsis thaliana; identical to SEQ ID NO: 90590
  misc_feature (1)..(2232): Ceres Seq. ID no. 12724430
  misc_feature (1)..(2232): Ortholog of  Ceres SEQ ID NO 12586556 as cited in SEQ ID NO 64667
  misc_feature (1)..(2232): Ortholog of  Ceres SEQ ID NO 13660894 as cited in SEQ ID NO 67475

SEQ ID NO: 94347 - protein, 743 aa, Arabidopsis thaliana; identical to SEQ ID NO: 90591
  peptide (1)..(743): Ceres Seq. ID no. 12724431

SEQ ID NO: 94348 - protein, 717 aa, Arabidopsis thaliana; identical to SEQ ID NO: 90592
  peptide (1)..(717): Ceres Seq. ID no. 12724432

SEQ ID NO: 94349 - protein, 690 aa, Arabidopsis thaliana; identical to SEQ ID NO: 90593
  peptide (1)..(690): Ceres Seq. ID no. 12724433

SEQ ID NO: 94350 - DNA, 1845 bp, Arabidopsis thaliana; identical to SEQ ID NO: 90594
  misc_feature (1)..(1845): Ceres Seq. ID no. 12724478
  misc_feature (1)..(1845): Ortholog of  Ceres SEQ ID NO 13585382 as cited in SEQ ID NO 63889

SEQ ID NO: 94351 - protein, 614 aa, Arabidopsis thaliana; identical to SEQ ID NO: 90595
  peptide (1)..(614): Ceres Seq. ID no. 12724479

SEQ ID NO: 94352 - protein, 571 aa, Arabidopsis thaliana; identical to SEQ ID NO: 90596
  peptide (1)..(571): Ceres Seq. ID no. 12724480

SEQ ID NO: 94353 - protein, 453 aa, Arabidopsis thaliana; identical to SEQ ID NO: 90597
  peptide (1)..(453): Ceres Seq. ID no. 12724481

SEQ ID NO: 94354 - DNA, 1371 bp, Arabidopsis thaliana; identical to SEQ ID NO: 90598
  misc_feature (1)..(1371): Ceres Seq. ID no. 12724488
  misc_feature (1)..(1371): Ortholog of  Ceres SEQ ID NO 13599613 as cited in SEQ ID NO 0

SEQ ID NO: 94355 - protein, 456 aa, Arabidopsis thaliana; identical to SEQ ID NO: 90599
  peptide (1)..(456): Ceres Seq. ID no. 12724489

SEQ ID NO: 94356 - DNA, 2364 bp, Arabidopsis thaliana; identical to SEQ ID NO: 90600
  misc_feature (1)..(2364): Ceres Seq. ID no. 12724494
  misc_feature (1)..(2364): Ortholog of  Ceres SEQ ID NO 12586556 as cited in SEQ ID NO 64667
  misc_feature (1)..(2364): Ortholog of  Ceres SEQ ID NO 13660894 as cited in SEQ ID NO 67475

SEQ ID NO: 94357 - protein, 787 aa, Arabidopsis thaliana; identical to SEQ ID NO: 90601
  peptide (1)..(787): Ceres Seq. ID no. 12724495

SEQ ID NO: 94358 - protein, 783 aa, Arabidopsis thaliana; identical to SEQ ID NO: 90602
  peptide (1)..(783): Ceres Seq. ID no. 12724496

SEQ ID NO: 94359 - protein, 741 aa, Arabidopsis thaliana; identical to SEQ ID NO: 88898
  peptide (1)..(741): Ceres Seq. ID no. 12724497

SEQ ID NO: 94360 - DNA, 993 bp, Arabidopsis thaliana; identical to SEQ ID NO: 90604
  misc_feature (1)..(993): Ceres Seq. ID no. 12724534
  misc_feature (1)..(993): Ortholog of  Ceres SEQ ID NO 13647762 as cited in SEQ ID NO 20426

SEQ ID NO: 94361 - protein, 330 aa, Arabidopsis thaliana; identical to SEQ ID NO: 90605
  peptide (1)..(330): Ceres Seq. ID no. 12724535

SEQ ID NO: 94362 - protein, 328 aa, Arabidopsis thaliana; identical to SEQ ID NO: 90606
  peptide (1)..(328): Ceres Seq. ID no. 12724536

SEQ ID NO: 94363 - protein, 294 aa, Arabidopsis thaliana; identical to SEQ ID NO: 90607
  peptide (1)..(294): Ceres Seq. ID no. 12724537

SEQ ID NO: 94364 - DNA, 729 bp, Arabidopsis thaliana; identical to SEQ ID NO: 90608
  misc_feature (1)..(729): Ceres Seq. ID no. 12724541
  misc_feature (1)..(729): Ortholog of  Ceres SEQ ID NO 13528157 as cited in SEQ ID NO 60102

SEQ ID NO: 94365 - protein, 242 aa, Arabidopsis thaliana; identical to SEQ ID NO: 90609
  peptide (1)..(242): Ceres Seq. ID no. 12724542

SEQ ID NO: 94366 - protein, 216 aa, Arabidopsis thaliana; identical to SEQ ID NO: 90610
  peptide (1)..(216): Ceres Seq. ID no. 12724543

SEQ ID NO: 94367 - protein, 189 aa, Arabidopsis thaliana; identical to SEQ ID NO: 90611
  peptide (1)..(189): Ceres Seq. ID no. 12724544

SEQ ID NO: 94368 - DNA, 2379 bp, Arabidopsis thaliana; identical to SEQ ID NO: 90612
  misc_feature (1)..(2379): Ceres Seq. ID no. 12724555
  misc_feature (1)..(2379): Ortholog of  Ceres SEQ ID NO 14304565 as cited in SEQ ID NO 53297
  misc_feature (1)..(2379): Ortholog of  Ceres SEQ ID NO 15225368 as cited in SEQ ID NO 58345
  misc_feature (1)..(2379): Ortholog of  Ceres SEQ ID NO 15172170 as cited in SEQ ID NO 58957
  misc_feature (1)..(2379): Ortholog of  Ceres SEQ ID NO 13584744 as cited in SEQ ID NO 69137

SEQ ID NO: 94369 - protein, 792 aa, Arabidopsis thaliana; identical to SEQ ID NO: 90613
  peptide (1)..(792): Ceres Seq. ID no. 12724556

SEQ ID NO: 94370 - protein, 747 aa, Arabidopsis thaliana; identical to SEQ ID NO: 90614
  peptide (1)..(747): Ceres Seq. ID no. 12724557

SEQ ID NO: 94371 - protein, 598 aa, Arabidopsis thaliana; identical to SEQ ID NO: 90615
  peptide (1)..(598): Ceres Seq. ID no. 12724558

SEQ ID NO: 94372 - DNA, 1131 bp, Arabidopsis thaliana; identical to SEQ ID NO: 90616
  misc_feature (1)..(1131): Ceres Seq. ID no. 12724563
  misc_feature (1)..(1131): Ortholog of  Ceres SEQ ID NO 13654989 as cited in SEQ ID NO 63117
  misc_feature (1)..(1131): Ortholog of  Ceres SEQ ID NO 13584744 as cited in SEQ ID NO 69137

SEQ ID NO: 94373 - protein, 376 aa, Arabidopsis thaliana; identical to SEQ ID NO: 90617
  peptide (1)..(376): Ceres Seq. ID no. 12724564

SEQ ID NO: 94374 - protein, 299 aa, Arabidopsis thaliana; identical to SEQ ID NO: 48262
  peptide (1)..(299): Ceres Seq. ID no. 12724565

SEQ ID NO: 94375 - protein, 271 aa, Arabidopsis thaliana; identical to SEQ ID NO: 48263
  peptide (1)..(271): Ceres Seq. ID no. 12724566

SEQ ID NO: 94376 - DNA, 1164 bp, Arabidopsis thaliana; identical to SEQ ID NO: 90620
  misc_feature (1)..(1164): Ceres Seq. ID no. 12724567
  misc_feature (1)..(1164): Ortholog of  Ceres SEQ ID NO 13585587 as cited in SEQ ID NO 65515

SEQ ID NO: 94377 - protein, 387 aa, Arabidopsis thaliana; identical to SEQ ID NO: 90621
  peptide (1)..(387): Ceres Seq. ID no. 12724568

SEQ ID NO: 94378 - protein, 371 aa, Arabidopsis thaliana; identical to SEQ ID NO: 90622
  peptide (1)..(371): Ceres Seq. ID no. 12724569

SEQ ID NO: 94379 - protein, 329 aa, Arabidopsis thaliana; identical to SEQ ID NO: 90623
  peptide (1)..(329): Ceres Seq. ID no. 12724570

SEQ ID NO: 94380 - DNA, 2939 bp, Arabidopsis thaliana; identical to SEQ ID NO: 90624
  misc_feature (1)..(2939): Ceres Seq. ID no. 12724571
  misc_feature (1)..(2939): Ortholog of  Ceres SEQ ID NO 15168965 as cited in SEQ ID NO 20607
  misc_feature (1)..(2939): Ortholog of  Ceres SEQ ID NO 13597454 as cited in SEQ ID NO 64121
  misc_feature (1)..(2939): Ortholog of  Ceres SEQ ID NO 13623385 as cited in SEQ ID NO 0

SEQ ID NO: 94381 - protein, 902 aa, Arabidopsis thaliana; identical to SEQ ID NO: 90625
  peptide (1)..(902): Ceres Seq. ID no. 12724572

SEQ ID NO: 94382 - protein, 887 aa, Arabidopsis thaliana; identical to SEQ ID NO: 90626
  peptide (1)..(887): Ceres Seq. ID no. 12724573

SEQ ID NO: 94383 - protein, 831 aa, Arabidopsis thaliana; identical to SEQ ID NO: 90627
  peptide (1)..(831): Ceres Seq. ID no. 12724574

SEQ ID NO: 94384 - DNA, 1995 bp, Arabidopsis thaliana; identical to SEQ ID NO: 90628
  misc_feature (1)..(1995): Ceres Seq. ID no. 12724575
  misc_feature (1)..(1995): Ortholog of  Ceres SEQ ID NO 15171212 as cited in SEQ ID NO 56899
  misc_feature (1)..(1995): Ortholog of  Ceres SEQ ID NO 12613725 as cited in SEQ ID NO 68196

SEQ ID NO: 94385 - protein, 585 aa, Arabidopsis thaliana; identical to SEQ ID NO: 90629
  peptide (1)..(585): Ceres Seq. ID no. 12724576

SEQ ID NO: 94386 - protein, 557 aa, Arabidopsis thaliana; identical to SEQ ID NO: 88606
  peptide (1)..(557): Ceres Seq. ID no. 12724577

SEQ ID NO: 94387 - protein, 525 aa, Arabidopsis thaliana; identical to SEQ ID NO: 90631
  peptide (1)..(525): Ceres Seq. ID no. 12724578

SEQ ID NO: 94388 - DNA, 1267 bp, Arabidopsis thaliana; identical to SEQ ID NO: 90632
  misc_feature (1)..(1267): Ceres Seq. ID no. 12724617
  misc_feature (1)..(1267): Ortholog of  Ceres SEQ ID NO 15176230 as cited in SEQ ID NO 58796
  misc_feature (1)..(1267): Ortholog of  Ceres SEQ ID NO 14308156 as cited in SEQ ID NO 59006
  misc_feature (1)..(1267): Ortholog of  Ceres SEQ ID NO 13596321 as cited in SEQ ID NO 67976

SEQ ID NO: 94389 - protein, 340 aa, Arabidopsis thaliana; identical to SEQ ID NO: 90633
  peptide (1)..(340): Ceres Seq. ID no. 12724618

SEQ ID NO: 94390 - protein, 312 aa, Arabidopsis thaliana; identical to SEQ ID NO: 90634
  peptide (1)..(312): Ceres Seq. ID no. 12724619

SEQ ID NO: 94391 - protein, 297 aa, Arabidopsis thaliana; identical to SEQ ID NO: 90635
  peptide (1)..(297): Ceres Seq. ID no. 12724620

SEQ ID NO: 94392 - DNA, 918 bp, Arabidopsis thaliana; identical to SEQ ID NO: 90636
  misc_feature (1)..(918): Ceres Seq. ID no. 12724628
  misc_feature (1)..(918): Ortholog of  Ceres SEQ ID NO 15177059 as cited in SEQ ID NO 60196
  misc_feature (1)..(918): Ortholog of  Ceres SEQ ID NO 13502960 as cited in SEQ ID NO 67097

SEQ ID NO: 94393 - protein, 305 aa, Arabidopsis thaliana; identical to SEQ ID NO: 90637
  peptide (1)..(305): Ceres Seq. ID no. 12724629

SEQ ID NO: 94394 - protein, 248 aa, Arabidopsis thaliana; identical to SEQ ID NO: 90638
  peptide (1)..(248): Ceres Seq. ID no. 12724630

SEQ ID NO: 94395 - protein, 211 aa, Arabidopsis thaliana; identical to SEQ ID NO: 90639
  peptide (1)..(211): Ceres Seq. ID no. 12724631

SEQ ID NO: 94396 - DNA, 1185 bp, Arabidopsis thaliana; identical to SEQ ID NO: 90640
  misc_feature (1)..(1185): Ceres Seq. ID no. 12724632
  misc_feature (1)..(1185): Ortholog of  Ceres SEQ ID NO 13654989 as cited in SEQ ID NO 63117
  misc_feature (1)..(1185): Ortholog of  Ceres SEQ ID NO 13584744 as cited in SEQ ID NO 69137

SEQ ID NO: 94397 - protein, 394 aa, Arabidopsis thaliana; identical to SEQ ID NO: 90641
  peptide (1)..(394): Ceres Seq. ID no. 12724633

SEQ ID NO: 94398 - protein, 365 aa, Arabidopsis thaliana; identical to SEQ ID NO: 90642
  peptide (1)..(365): Ceres Seq. ID no. 12724634

SEQ ID NO: 94399 - DNA, 2133 bp, Arabidopsis thaliana; identical to SEQ ID NO: 90643
  misc_feature (1)..(2133): Ceres Seq. ID no. 12724635
  misc_feature (1)..(2133): Ortholog of  Ceres SEQ ID NO 14307164 as cited in SEQ ID NO 54775
  misc_feature (1)..(2133): Ortholog of  Ceres SEQ ID NO 13654989 as cited in SEQ ID NO 63117
  misc_feature (1)..(2133): Ortholog of  Ceres SEQ ID NO 13655640 as cited in SEQ ID NO 63844
  misc_feature (1)..(2133): Ortholog of  Ceres SEQ ID NO 13584744 as cited in SEQ ID NO 69137

SEQ ID NO: 94400 - protein, 710 aa, Arabidopsis thaliana; identical to SEQ ID NO: 90644
  peptide (1)..(710): Ceres Seq. ID no. 12724636

SEQ ID NO: 94401 - protein, 475 aa, Arabidopsis thaliana; identical to SEQ ID NO: 90645
  peptide (1)..(475): Ceres Seq. ID no. 12724637

SEQ ID NO: 94402 - protein, 461 aa, Arabidopsis thaliana; identical to SEQ ID NO: 90646
  peptide (1)..(461): Ceres Seq. ID no. 12724638

SEQ ID NO: 94403 - DNA, 933 bp, Arabidopsis thaliana; identical to SEQ ID NO: 90647
  misc_feature (1)..(933): Ceres Seq. ID no. 12724646
  misc_feature (1)..(933): Ortholog of  Ceres SEQ ID NO 15180793 as cited in SEQ ID NO 0

SEQ ID NO: 94404 - protein, 310 aa, Arabidopsis thaliana; identical to SEQ ID NO: 90648
  peptide (1)..(310): Ceres Seq. ID no. 12724647

SEQ ID NO: 94405 - protein, 234 aa, Arabidopsis thaliana; identical to SEQ ID NO: 90649
  peptide (1)..(234): Ceres Seq. ID no. 12724648

SEQ ID NO: 94406 - protein, 226 aa, Arabidopsis thaliana; identical to SEQ ID NO: 90650
  peptide (1)..(226): Ceres Seq. ID no. 12724649

SEQ ID NO: 94407 - DNA, 735 bp, Arabidopsis thaliana; identical to SEQ ID NO: 90651
  misc_feature (1)..(735): Ceres Seq. ID no. 12724654
  misc_feature (1)..(735): Ortholog of  Ceres SEQ ID NO 15180793 as cited in SEQ ID NO 0

SEQ ID NO: 94408 - protein, 244 aa, Arabidopsis thaliana; identical to SEQ ID NO: 69923
  peptide (1)..(244): Ceres Seq. ID no. 12724655

SEQ ID NO: 94409 - protein, 233 aa, Arabidopsis thaliana; identical to SEQ ID NO: 69924
  peptide (1)..(233): Ceres Seq. ID no. 12724656

SEQ ID NO: 94410 - protein, 199 aa, Arabidopsis thaliana; identical to SEQ ID NO: 90654
  peptide (1)..(199): Ceres Seq. ID no. 12724657

SEQ ID NO: 94411 - DNA, 561 bp, Arabidopsis thaliana; identical to SEQ ID NO: 90655
  misc_feature (1)..(561): Ceres Seq. ID no. 12724705
  misc_feature (1)..(561): Ortholog of  Ceres SEQ ID NO 14314792 as cited in SEQ ID NO 56837

SEQ ID NO: 94412 - protein, 186 aa, Arabidopsis thaliana; identical to SEQ ID NO: 90656
  peptide (1)..(186): Ceres Seq. ID no. 12724706

SEQ ID NO: 94413 - protein, 143 aa, Arabidopsis thaliana; identical to SEQ ID NO: 90657
  peptide (1)..(143): Ceres Seq. ID no. 12724707

SEQ ID NO: 94414 - protein, 138 aa, Arabidopsis thaliana; identical to SEQ ID NO: 90658
  peptide (1)..(138): Ceres Seq. ID no. 12724708

SEQ ID NO: 94415 - DNA, 2025 bp, Arabidopsis thaliana; identical to SEQ ID NO: 90659
  misc_feature (1)..(2025): Ceres Seq. ID no. 12724712
  misc_feature (1)..(2025): Ortholog of  Ceres SEQ ID NO 13655640 as cited in SEQ ID NO 63844

SEQ ID NO: 94416 - protein, 674 aa, Arabidopsis thaliana; identical to SEQ ID NO: 90660
  peptide (1)..(674): Ceres Seq. ID no. 12724713

SEQ ID NO: 94417 - protein, 630 aa, Arabidopsis thaliana; identical to SEQ ID NO: 90661
  peptide (1)..(630): Ceres Seq. ID no. 12724714

SEQ ID NO: 94418 - protein, 571 aa, Arabidopsis thaliana; identical to SEQ ID NO: 90662
  peptide (1)..(571): Ceres Seq. ID no. 12724715

SEQ ID NO: 94419 - DNA, 801 bp, Arabidopsis thaliana; identical to SEQ ID NO: 90663
  misc_feature (1)..(801): Ceres Seq. ID no. 12724740
  misc_feature (1)..(801): Ortholog of  Ceres SEQ ID NO 14316161 as cited in SEQ ID NO 52384
  misc_feature (1)..(801): Ortholog of  Ceres SEQ ID NO 14315249 as cited in SEQ ID NO 52512
  misc_feature (1)..(801): Ortholog of  Ceres SEQ ID NO 15174595 as cited in SEQ ID NO 53460
  misc_feature (1)..(801): Ortholog of  Ceres SEQ ID NO 13503553 as cited in SEQ ID NO 64822
  misc_feature (1)..(801): Ortholog of  Ceres SEQ ID NO 13660155 as cited in SEQ ID NO 67635

SEQ ID NO: 94420 - protein, 266 aa, Arabidopsis thaliana; identical to SEQ ID NO: 90664
  peptide (1)..(266): Ceres Seq. ID no. 12724741

SEQ ID NO: 94421 - protein, 226 aa, Arabidopsis thaliana; identical to SEQ ID NO: 90665
  peptide (1)..(226): Ceres Seq. ID no. 12724742

SEQ ID NO: 94422 - protein, 200 aa, Arabidopsis thaliana; identical to SEQ ID NO: 90666
  peptide (1)..(200): Ceres Seq. ID no. 12724743

SEQ ID NO: 94423 - DNA, 1095 bp, Arabidopsis thaliana; identical to SEQ ID NO: 90667
  misc_feature (1)..(1095): Ceres Seq. ID no. 12724748
  misc_feature (1)..(1095): Ortholog of  Ceres SEQ ID NO 12636774 as cited in SEQ ID NO 372
  misc_feature (1)..(1095): Ortholog of  Ceres SEQ ID NO 12578315 as cited in SEQ ID NO 62451
  misc_feature (1)..(1095): Ortholog of  Ceres SEQ ID NO 12615466 as cited in SEQ ID NO 62761
  misc_feature (1)..(1095): Ortholog of  Ceres SEQ ID NO 13597295 as cited in SEQ ID NO 63743
  misc_feature (1)..(1095): Ortholog of  Ceres SEQ ID NO 12617090 as cited in SEQ ID NO 64005
  misc_feature (1)..(1095): Ortholog of  Ceres SEQ ID NO 13597233 as cited in SEQ ID NO 64370
  misc_feature (1)..(1095): Ortholog of  Ceres SEQ ID NO 13584577 as cited in SEQ ID NO 65298
  misc_feature (1)..(1095): Ortholog of  Ceres SEQ ID NO 13598327 as cited in SEQ ID NO 68040

SEQ ID NO: 94424 - protein, 364 aa, Arabidopsis thaliana; identical to SEQ ID NO: 90668
  peptide (1)..(364): Ceres Seq. ID no. 12724749

SEQ ID NO: 94425 - protein, 206 aa, Arabidopsis thaliana; identical to SEQ ID NO: 90669
  peptide (1)..(206): Ceres Seq. ID no. 12724750

SEQ ID NO: 94426 - protein, 188 aa, Arabidopsis thaliana; identical to SEQ ID NO: 90670
  peptide (1)..(188): Ceres Seq. ID no. 12724751

SEQ ID NO: 94427 - DNA, 1224 bp, Arabidopsis thaliana; identical to SEQ ID NO: 90671
  misc_feature (1)..(1224): Ceres Seq. ID no. 12724752
  misc_feature (1)..(1224): Ortholog of  Ceres SEQ ID NO 14303866 as cited in SEQ ID NO 53689
  misc_feature (1)..(1224): Ortholog of  Ceres SEQ ID NO 14315958 as cited in SEQ ID NO 59979
  misc_feature (1)..(1224): Ortholog of  Ceres SEQ ID NO 14303664 as cited in SEQ ID NO 65892
  misc_feature (1)..(1224): Ortholog of  Ceres SEQ ID NO 13597037 as cited in SEQ ID NO 69005

SEQ ID NO: 94428 - protein, 407 aa, Arabidopsis thaliana; identical to SEQ ID NO: 35169
  peptide (1)..(407): Ceres Seq. ID no. 12724753

SEQ ID NO: 94429 - protein, 262 aa, Arabidopsis thaliana; identical to SEQ ID NO: 35170
  peptide (1)..(262): Ceres Seq. ID no. 12724754

SEQ ID NO: 94430 - DNA, 2823 bp, Arabidopsis thaliana; identical to SEQ ID NO: 90674
  misc_feature (1)..(2823): Ceres Seq. ID no. 12724764
  misc_feature (1)..(2823): Ortholog of  Ceres SEQ ID NO 13654989 as cited in SEQ ID NO 63117

SEQ ID NO: 94431 - protein, 868 aa, Arabidopsis thaliana; identical to SEQ ID NO: 90675
  peptide (1)..(868): Ceres Seq. ID no. 12724765

SEQ ID NO: 94432 - protein, 691 aa, Arabidopsis thaliana; identical to SEQ ID NO: 90676
  peptide (1)..(691): Ceres Seq. ID no. 12724766

SEQ ID NO: 94433 - protein, 648 aa, Arabidopsis thaliana; identical to SEQ ID NO: 90677
  peptide (1)..(648): Ceres Seq. ID no. 12724767

SEQ ID NO: 94434 - DNA, 1323 bp, Arabidopsis thaliana; identical to SEQ ID NO: 90678
  misc_feature (1)..(1323): Ceres Seq. ID no. 12724802
  misc_feature (1)..(1323): Ortholog of  Ceres SEQ ID NO 15170911 as cited in SEQ ID NO 55290

SEQ ID NO: 94435 - protein, 339 aa, Arabidopsis thaliana; identical to SEQ ID NO: 90679
  peptide (1)..(339): Ceres Seq. ID no. 12724803

SEQ ID NO: 94436 - protein, 326 aa, Arabidopsis thaliana; identical to SEQ ID NO: 90680
  peptide (1)..(326): Ceres Seq. ID no. 12724804

SEQ ID NO: 94437 - protein, 299 aa, Arabidopsis thaliana; identical to SEQ ID NO: 90681
  peptide (1)..(299): Ceres Seq. ID no. 12724805

SEQ ID NO: 94438 - DNA, 879 bp, Arabidopsis thaliana; identical to SEQ ID NO: 90682
  misc_feature (1)..(879): Ceres Seq. ID no. 12724820
  misc_feature (1)..(879): Ortholog of  Ceres SEQ ID NO 15179955 as cited in SEQ ID NO 0

SEQ ID NO: 94439 - protein, 292 aa, Arabidopsis thaliana; identical to SEQ ID NO: 90683
  peptide (1)..(292): Ceres Seq. ID no. 12724821

SEQ ID NO: 94440 - protein, 192 aa, Arabidopsis thaliana; identical to SEQ ID NO: 90684
  peptide (1)..(192): Ceres Seq. ID no. 12724822

SEQ ID NO: 94441 - protein, 188 aa, Arabidopsis thaliana; identical to SEQ ID NO: 90685
  peptide (1)..(188): Ceres Seq. ID no. 12724823

SEQ ID NO: 94442 - DNA, 1572 bp, Arabidopsis thaliana; identical to SEQ ID NO: 90686
  misc_feature (1)..(1572): Ceres Seq. ID no. 12724855
  misc_feature (1)..(1572): Ortholog of  Ceres SEQ ID NO 13648040 as cited in SEQ ID NO 189
  misc_feature (1)..(1572): Ortholog of  Ceres SEQ ID NO 13600220 as cited in SEQ ID NO 0

SEQ ID NO: 94443 - protein, 523 aa, Arabidopsis thaliana; identical to SEQ ID NO: 90687
  peptide (1)..(523): Ceres Seq. ID no. 12724856

SEQ ID NO: 94444 - protein, 519 aa, Arabidopsis thaliana; identical to SEQ ID NO: 90688
  peptide (1)..(519): Ceres Seq. ID no. 12724857

SEQ ID NO: 94445 - protein, 426 aa, Arabidopsis thaliana; identical to SEQ ID NO: 90689
  peptide (1)..(426): Ceres Seq. ID no. 12724858

SEQ ID NO: 94446 - DNA, 1721 bp, Arabidopsis thaliana; identical to SEQ ID NO: 90690
  misc_feature (1)..(1721): Ceres Seq. ID no. 12724862
  misc_feature (1)..(1721): Ortholog of  Ceres SEQ ID NO 13654989 as cited in SEQ ID NO 63117
  misc_feature (1)..(1721): Ortholog of  Ceres SEQ ID NO 13655640 as cited in SEQ ID NO 63844
  misc_feature (1)..(1721): Ortholog of  Ceres SEQ ID NO 13584744 as cited in SEQ ID NO 69137

SEQ ID NO: 94447 - protein, 261 aa, Arabidopsis thaliana; identical to SEQ ID NO: 90691
  peptide (1)..(261): Ceres Seq. ID no. 12724863

SEQ ID NO: 94448 - protein, 199 aa, Arabidopsis thaliana; identical to SEQ ID NO: 90692
  peptide (1)..(199): Ceres Seq. ID no. 12724864

SEQ ID NO: 94449 - protein, 192 aa, Arabidopsis thaliana; identical to SEQ ID NO: 90693
  peptide (1)..(192): Ceres Seq. ID no. 12724865

SEQ ID NO: 94450 - DNA, 2794 bp, Arabidopsis thaliana; identical to SEQ ID NO: 90694
  misc_feature (1)..(2794): Ceres Seq. ID no. 12724878
  misc_feature (1)..(2794): Ortholog of  Ceres SEQ ID NO 13600310 as cited in SEQ ID NO 5086

SEQ ID NO: 94451 - protein, 754 aa, Arabidopsis thaliana; identical to SEQ ID NO: 90695
  peptide (1)..(754): Ceres Seq. ID no. 12724879

SEQ ID NO: 94452 - protein, 750 aa, Arabidopsis thaliana; identical to SEQ ID NO: 90696
  peptide (1)..(750): Ceres Seq. ID no. 12724880

SEQ ID NO: 94453 - protein, 684 aa, Arabidopsis thaliana; identical to SEQ ID NO: 90697
  peptide (1)..(684): Ceres Seq. ID no. 12724881

SEQ ID NO: 94454 - DNA, 1721 bp, Arabidopsis thaliana; identical to SEQ ID NO: 90698
  misc_feature (1)..(1721): Ceres Seq. ID no. 12724914
  misc_feature (1)..(1721): Ortholog of  Ceres SEQ ID NO 15225715 as cited in SEQ ID NO 54684

SEQ ID NO: 94455 - protein, 491 aa, Arabidopsis thaliana; identical to SEQ ID NO: 90699
  peptide (1)..(491): Ceres Seq. ID no. 12724915

SEQ ID NO: 94456 - protein, 377 aa, Arabidopsis thaliana; identical to SEQ ID NO: 90700
  peptide (1)..(377): Ceres Seq. ID no. 12724916

SEQ ID NO: 94457 - protein, 365 aa, Arabidopsis thaliana; identical to SEQ ID NO: 90701
  peptide (1)..(365): Ceres Seq. ID no. 12724917

SEQ ID NO: 94458 - DNA, 1305 bp, Arabidopsis thaliana; identical to SEQ ID NO: 90702
  misc_feature (1)..(1305): Ceres Seq. ID no. 12724930
  misc_feature (1)..(1305): Ortholog of  Ceres SEQ ID NO 12364737 as cited in SEQ ID NO 51089
  misc_feature (1)..(1305): Ortholog of  Ceres SEQ ID NO 14306553 as cited in SEQ ID NO 53121
  misc_feature (1)..(1305): Ortholog of  Ceres SEQ ID NO 13582301 as cited in SEQ ID NO 56509
  misc_feature (1)..(1305): Ortholog of  Ceres SEQ ID NO 13595567 as cited in SEQ ID NO 56760
  misc_feature (1)..(1305): Ortholog of  Ceres SEQ ID NO 13655302 as cited in SEQ ID NO 63307
  misc_feature (1)..(1305): Ortholog of  Ceres SEQ ID NO 13597380 as cited in SEQ ID NO 64054
  misc_feature (1)..(1305): Ortholog of  Ceres SEQ ID NO 12625474 as cited in SEQ ID NO 64169
  misc_feature (1)..(1305): Ortholog of  Ceres SEQ ID NO 13597502 as cited in SEQ ID NO 64681

SEQ ID NO: 94459 - protein, 390 aa, Arabidopsis thaliana; identical to SEQ ID NO: 90703
  peptide (1)..(390): Ceres Seq. ID no. 12724931

SEQ ID NO: 94460 - protein, 376 aa, Arabidopsis thaliana; identical to SEQ ID NO: 90704
  peptide (1)..(376): Ceres Seq. ID no. 12724932

SEQ ID NO: 94461 - protein, 216 aa, Arabidopsis thaliana; identical to SEQ ID NO: 90705
  peptide (1)..(216): Ceres Seq. ID no. 12724933

SEQ ID NO: 94462 - DNA, 1347 bp, Arabidopsis thaliana; identical to SEQ ID NO: 90706
  misc_feature (1)..(1347): Ceres Seq. ID no. 12724934
  misc_feature (1)..(1347): Ortholog of  Ceres SEQ ID NO 13596198 as cited in SEQ ID NO 68488

SEQ ID NO: 94463 - protein, 448 aa, Arabidopsis thaliana; identical to SEQ ID NO: 90707
  peptide (1)..(448): Ceres Seq. ID no. 12724935

SEQ ID NO: 94464 - protein, 374 aa, Arabidopsis thaliana; identical to SEQ ID NO: 90708
  peptide (1)..(374): Ceres Seq. ID no. 12724936

SEQ ID NO: 94465 - protein, 369 aa, Arabidopsis thaliana; identical to SEQ ID NO: 90709
  peptide (1)..(369): Ceres Seq. ID no. 12724937

SEQ ID NO: 94466 - DNA, 1331 bp, Arabidopsis thaliana; identical to SEQ ID NO: 90710
  misc_feature (1)..(1331): Ceres Seq. ID no. 12724950
  misc_feature (1)..(1331): Ortholog of  Ceres SEQ ID NO 13596392 as cited in SEQ ID NO 62136
  misc_feature (1)..(1331): Ortholog of  Ceres SEQ ID NO 14313244 as cited in SEQ ID NO 66802
  misc_feature (1)..(1331): Ortholog of  Ceres SEQ ID NO 13654360 as cited in SEQ ID NO 67980
  misc_feature (1)..(1331): Ortholog of  Ceres SEQ ID NO 13596394 as cited in SEQ ID NO 68561

SEQ ID NO: 94467 - protein, 369 aa, Arabidopsis thaliana; identical to SEQ ID NO: 90711
  peptide (1)..(369): Ceres Seq. ID no. 12724951

SEQ ID NO: 94468 - protein, 305 aa, Arabidopsis thaliana; identical to SEQ ID NO: 90712
  peptide (1)..(305): Ceres Seq. ID no. 12724952

SEQ ID NO: 94469 - protein, 276 aa, Arabidopsis thaliana; identical to SEQ ID NO: 90713
  peptide (1)..(276): Ceres Seq. ID no. 12724953

SEQ ID NO: 94470 - DNA, 1231 bp, Arabidopsis thaliana; identical to SEQ ID NO: 90714
  misc_feature (1)..(1231): Ceres Seq. ID no. 12724977
  misc_feature (1)..(1231): Ortholog of  Ceres SEQ ID NO 14316440 as cited in SEQ ID NO 58263
  misc_feature (1)..(1231): Ortholog of  Ceres SEQ ID NO 14302462 as cited in SEQ ID NO 65678

SEQ ID NO: 94471 - protein, 341 aa, Arabidopsis thaliana; identical to SEQ ID NO: 90715
  peptide (1)..(341): Ceres Seq. ID no. 12724978

SEQ ID NO: 94472 - protein, 221 aa, Arabidopsis thaliana; identical to SEQ ID NO: 90716
  peptide (1)..(221): Ceres Seq. ID no. 12724979

SEQ ID NO: 94473 - DNA, 1804 bp, Arabidopsis thaliana; identical to SEQ ID NO: 90717
  misc_feature (1)..(1804): Ceres Seq. ID no. 12724996
  misc_feature (1)..(1804): Ortholog of  Ceres SEQ ID NO 13598582 as cited in SEQ ID NO 65294
  misc_feature (1)..(1804): Ortholog of  Ceres SEQ ID NO 15176114 as cited in SEQ ID NO 67627
  misc_feature (1)..(1804): Ortholog of  Ceres SEQ ID NO 15176145 as cited in SEQ ID NO 0

SEQ ID NO: 94474 - protein, 460 aa, Arabidopsis thaliana; identical to SEQ ID NO: 90718
  peptide (1)..(460): Ceres Seq. ID no. 12724997

SEQ ID NO: 94475 - protein, 423 aa, Arabidopsis thaliana; identical to SEQ ID NO: 90719
  peptide (1)..(423): Ceres Seq. ID no. 12724998

SEQ ID NO: 94476 - protein, 396 aa, Arabidopsis thaliana; identical to SEQ ID NO: 90720
  peptide (1)..(396): Ceres Seq. ID no. 12724999

SEQ ID NO: 94477 - DNA, 1251 bp, Arabidopsis thaliana; identical to SEQ ID NO: 90721
  misc_feature (1)..(1251): Ceres Seq. ID no. 12725038
  misc_feature (1)..(1251): Ortholog of  Ceres SEQ ID NO 14308080 as cited in SEQ ID NO 55218

SEQ ID NO: 94478 - protein, 282 aa, Arabidopsis thaliana; identical to SEQ ID NO: 90722
  peptide (1)..(282): Ceres Seq. ID no. 12725039

SEQ ID NO: 94479 - protein, 279 aa, Arabidopsis thaliana; identical to SEQ ID NO: 44176
  peptide (1)..(279): Ceres Seq. ID no. 12725040

SEQ ID NO: 94480 - protein, 252 aa, Arabidopsis thaliana; identical to SEQ ID NO: 44177
  peptide (1)..(252): Ceres Seq. ID no. 12725041

SEQ ID NO: 94481 - DNA, 1706 bp, Arabidopsis thaliana; identical to SEQ ID NO: 90725
  misc_feature (1)..(1706): Ceres Seq. ID no. 12725045
  misc_feature (1)..(1706): Ortholog of  Ceres SEQ ID NO 14304220 as cited in SEQ ID NO 53418

SEQ ID NO: 94482 - protein, 412 aa, Arabidopsis thaliana; identical to SEQ ID NO: 90726
  peptide (1)..(412): Ceres Seq. ID no. 12725046

SEQ ID NO: 94483 - protein, 410 aa, Arabidopsis thaliana; identical to SEQ ID NO: 90727
  peptide (1)..(410): Ceres Seq. ID no. 12725047

SEQ ID NO: 94484 - protein, 330 aa, Arabidopsis thaliana; identical to SEQ ID NO: 90728
  peptide (1)..(330): Ceres Seq. ID no. 12725048

SEQ ID NO: 94485 - DNA, 811 bp, Arabidopsis thaliana; identical to SEQ ID NO: 90729
  misc_feature (1)..(811): Ceres Seq. ID no. 12725049
  misc_feature (1)..(811): Ortholog of  Ceres SEQ ID NO 12474478 as cited in SEQ ID NO 96
  misc_feature (1)..(811): Ortholog of  Ceres SEQ ID NO 13647991 as cited in SEQ ID NO 187

SEQ ID NO: 94486 - protein, 214 aa, Arabidopsis thaliana; identical to SEQ ID NO: 22357
  peptide (1)..(214): Ceres Seq. ID no. 12725050

SEQ ID NO: 94487 - protein, 201 aa, Arabidopsis thaliana; identical to SEQ ID NO: 22358
  peptide (1)..(201): Ceres Seq. ID no. 12725051

SEQ ID NO: 94488 - DNA, 1189 bp, Arabidopsis thaliana; identical to SEQ ID NO: 90732
  misc_feature (1)..(1189): Ceres Seq. ID no. 12725056
  misc_feature (1)..(1189): Ortholog of  Ceres SEQ ID NO 13594298 as cited in SEQ ID NO 57803
  misc_feature (1)..(1189): Ortholog of  Ceres SEQ ID NO 13503476 as cited in SEQ ID NO 61978
  misc_feature (1)..(1189): Ortholog of  Ceres SEQ ID NO 12578438 as cited in SEQ ID NO 62201
  misc_feature (1)..(1189): Ortholog of  Ceres SEQ ID NO 12617675 as cited in SEQ ID NO 64656

SEQ ID NO: 94489 - protein, 332 aa, Arabidopsis thaliana; identical to SEQ ID NO: 30747
  peptide (1)..(332): Ceres Seq. ID no. 12725057

SEQ ID NO: 94490 - protein, 322 aa, Arabidopsis thaliana; identical to SEQ ID NO: 30748
  peptide (1)..(322): Ceres Seq. ID no. 12725058

SEQ ID NO: 94491 - DNA, 657 bp, Arabidopsis thaliana; identical to SEQ ID NO: 90735
  misc_feature (1)..(657): Ceres Seq. ID no. 12725063
  misc_feature (1)..(657): Ortholog of  Ceres SEQ ID NO 13655108 as cited in SEQ ID NO 62996

SEQ ID NO: 94492 - protein, 152 aa, Arabidopsis thaliana; identical to SEQ ID NO: 27254
  peptide (1)..(152): Ceres Seq. ID no. 12725064

SEQ ID NO: 94493 - DNA, 2754 bp, Arabidopsis thaliana; identical to SEQ ID NO: 90737
  misc_feature (1)..(2754): Ceres Seq. ID no. 12725068
  misc_feature (1)..(2754): Ortholog of  Ceres SEQ ID NO 15168506 as cited in SEQ ID NO 57671
  misc_feature (1)..(2754): Ortholog of  Ceres SEQ ID NO 15180420 as cited in SEQ ID NO 0

SEQ ID NO: 94494 - protein, 846 aa, Arabidopsis thaliana; identical to SEQ ID NO: 44833
  peptide (1)..(846): Ceres Seq. ID no. 12725069

SEQ ID NO: 94495 - protein, 837 aa, Arabidopsis thaliana; identical to SEQ ID NO: 44834
  peptide (1)..(837): Ceres Seq. ID no. 12725070

SEQ ID NO: 94496 - protein, 692 aa, Arabidopsis thaliana; identical to SEQ ID NO: 44835
  peptide (1)..(692): Ceres Seq. ID no. 12725071

SEQ ID NO: 94497 - DNA, 911 bp, Arabidopsis thaliana; identical to SEQ ID NO: 90741
  misc_feature (1)..(911): Ceres Seq. ID no. 12725072
  misc_feature (1)..(911): Ortholog of  Ceres SEQ ID NO 13595495 as cited in SEQ ID NO 56624
  misc_feature (1)..(911): Ortholog of  Ceres SEQ ID NO 12608406 as cited in SEQ ID NO 58017
  misc_feature (1)..(911): Ortholog of  Ceres SEQ ID NO 13599397 as cited in SEQ ID NO 0

SEQ ID NO: 94498 - protein, 174 aa, Arabidopsis thaliana; identical to SEQ ID NO: 27087
  peptide (1)..(174): Ceres Seq. ID no. 12725073

SEQ ID NO: 94499 - protein, 147 aa, Arabidopsis thaliana; identical to SEQ ID NO: 27088
  peptide (1)..(147): Ceres Seq. ID no. 12725074

SEQ ID NO: 94500 - DNA, 1865 bp, Arabidopsis thaliana; identical to SEQ ID NO: 90744
  misc_feature (1)..(1865): Ceres Seq. ID no. 12725096
  misc_feature (1)..(1865): Ortholog of  Ceres SEQ ID NO 13585332 as cited in SEQ ID NO 60654
  misc_feature (1)..(1865): Ortholog of  Ceres SEQ ID NO 13502874 as cited in SEQ ID NO 66298
  misc_feature (1)..(1865): Ortholog of  Ceres SEQ ID NO 12614124 as cited in SEQ ID NO 68392

SEQ ID NO: 94501 - protein, 556 aa, Arabidopsis thaliana; identical to SEQ ID NO: 90745
  peptide (1)..(556): Ceres Seq. ID no. 12725097

SEQ ID NO: 94502 - protein, 538 aa, Arabidopsis thaliana; identical to SEQ ID NO: 90746
  peptide (1)..(538): Ceres Seq. ID no. 12725098

SEQ ID NO: 94503 - protein, 537 aa, Arabidopsis thaliana; identical to SEQ ID NO: 90747
  peptide (1)..(537): Ceres Seq. ID no. 12725099

SEQ ID NO: 94504 - DNA, 2126 bp, Arabidopsis thaliana; identical to SEQ ID NO: 90748
  misc_feature (1)..(2126): Ceres Seq. ID no. 12725137
  misc_feature (1)..(2126): Ortholog of  Ceres SEQ ID NO 14311055 as cited in SEQ ID NO 53705

SEQ ID NO: 94505 - protein, 569 aa, Arabidopsis thaliana; identical to SEQ ID NO: 90749
  peptide (1)..(569): Ceres Seq. ID no. 12725138

SEQ ID NO: 94506 - protein, 533 aa, Arabidopsis thaliana; identical to SEQ ID NO: 90750
  peptide (1)..(533): Ceres Seq. ID no. 12725139

SEQ ID NO: 94507 - protein, 497 aa, Arabidopsis thaliana; identical to SEQ ID NO: 90751
  peptide (1)..(497): Ceres Seq. ID no. 12725140

SEQ ID NO: 94508 - DNA, 1605 bp, Arabidopsis thaliana; identical to SEQ ID NO: 90752
  misc_feature (1)..(1605): Ceres Seq. ID no. 12725144
  misc_feature (1)..(1605): Ortholog of  Ceres SEQ ID NO 12612314 as cited in SEQ ID NO 51420
  misc_feature (1)..(1605): Ortholog of  Ceres SEQ ID NO 14306493 as cited in SEQ ID NO 53170
  misc_feature (1)..(1605): Ortholog of  Ceres SEQ ID NO 14311095 as cited in SEQ ID NO 53197

SEQ ID NO: 94509 - protein, 534 aa, Arabidopsis thaliana; identical to SEQ ID NO: 22006
  peptide (1)..(534): Ceres Seq. ID no. 12725145

SEQ ID NO: 94510 - protein, 504 aa, Arabidopsis thaliana; identical to SEQ ID NO: 22007
  peptide (1)..(504): Ceres Seq. ID no. 12725146

SEQ ID NO: 94511 - protein, 471 aa, Arabidopsis thaliana; identical to SEQ ID NO: 90755
  peptide (1)..(471): Ceres Seq. ID no. 12725147

SEQ ID NO: 94512 - DNA, 1011 bp, Arabidopsis thaliana; identical to SEQ ID NO: 90756
  misc_feature (1)..(1011): Ceres Seq. ID no. 12725156
  misc_feature (1)..(1011): Ortholog of  Ceres SEQ ID NO 13596474 as cited in SEQ ID NO 62169
  misc_feature (1)..(1011): Ortholog of  Ceres SEQ ID NO 13598714 as cited in SEQ ID NO 62656
  misc_feature (1)..(1011): Ortholog of  Ceres SEQ ID NO 13596969 as cited in SEQ ID NO 63375
  misc_feature (1)..(1011): Ortholog of  Ceres SEQ ID NO 13597519 as cited in SEQ ID NO 64759
  misc_feature (1)..(1011): Ortholog of  Ceres SEQ ID NO 13597870 as cited in SEQ ID NO 64982
  misc_feature (1)..(1011): Ortholog of  Ceres SEQ ID NO 13587054 as cited in SEQ ID NO 0

SEQ ID NO: 94513 - protein, 336 aa, Arabidopsis thaliana; identical to SEQ ID NO: 90757
  peptide (1)..(336): Ceres Seq. ID no. 12725157

SEQ ID NO: 94514 - protein, 274 aa, Arabidopsis thaliana; identical to SEQ ID NO: 90758
  peptide (1)..(274): Ceres Seq. ID no. 12725158

SEQ ID NO: 94515 - protein, 245 aa, Arabidopsis thaliana; identical to SEQ ID NO: 90759
  peptide (1)..(245): Ceres Seq. ID no. 12725159

SEQ ID NO: 94516 - DNA, 1128 bp, Arabidopsis thaliana; identical to SEQ ID NO: 90760
  misc_feature (1)..(1128): Ceres Seq. ID no. 12725164
  misc_feature (1)..(1128): Ortholog of  Ceres SEQ ID NO 14311832 as cited in SEQ ID NO 59054

SEQ ID NO: 94517 - protein, 307 aa, Arabidopsis thaliana; identical to SEQ ID NO: 90761
  peptide (1)..(307): Ceres Seq. ID no. 12725165

SEQ ID NO: 94518 - protein, 298 aa, Arabidopsis thaliana; identical to SEQ ID NO: 90762
  peptide (1)..(298): Ceres Seq. ID no. 12725166

SEQ ID NO: 94519 - protein, 251 aa, Arabidopsis thaliana; identical to SEQ ID NO: 90763
  peptide (1)..(251): Ceres Seq. ID no. 12725167

SEQ ID NO: 94520 - DNA, 1250 bp, Arabidopsis thaliana; identical to SEQ ID NO: 90764
  misc_feature (1)..(1250): Ceres Seq. ID no. 12725202
  misc_feature (1)..(1250): Ortholog of  Ceres SEQ ID NO 14311961 as cited in SEQ ID NO 51512

SEQ ID NO: 94521 - protein, 382 aa, Arabidopsis thaliana; identical to SEQ ID NO: 90765
  peptide (1)..(382): Ceres Seq. ID no. 12725203

SEQ ID NO: 94522 - protein, 371 aa, Arabidopsis thaliana; identical to SEQ ID NO: 90766
  peptide (1)..(371): Ceres Seq. ID no. 12725204

SEQ ID NO: 94523 - DNA, 1086 bp, Arabidopsis thaliana; identical to SEQ ID NO: 90767
  misc_feature (1)..(1086): Ceres Seq. ID no. 12725205
  misc_feature (1)..(1086): Ortholog of  Ceres SEQ ID NO 12609146 as cited in SEQ ID NO 52118
  misc_feature (1)..(1086): Ortholog of  Ceres SEQ ID NO 13638136 as cited in SEQ ID NO 58644
  misc_feature (1)..(1086): Ortholog of  Ceres SEQ ID NO 15177947 as cited in SEQ ID NO 60308
  misc_feature (1)..(1086): Ortholog of  Ceres SEQ ID NO 13596868 as cited in SEQ ID NO 62806
  misc_feature (1)..(1086): Ortholog of  Ceres SEQ ID NO 15225826 as cited in SEQ ID NO 64774
  misc_feature (1)..(1086): Ortholog of  Ceres SEQ ID NO 13595885 as cited in SEQ ID NO 69265
  misc_feature (1)..(1086): Ortholog of  Ceres SEQ ID NO 12566239 as cited in SEQ ID NO 0
  misc_feature (1)..(1086): Ortholog of  Ceres SEQ ID NO 13599119 as cited in SEQ ID NO 0

SEQ ID NO: 94524 - protein, 361 aa, Arabidopsis thaliana; identical to SEQ ID NO: 90768
  peptide (1)..(361): Ceres Seq. ID no. 12725206

SEQ ID NO: 94525 - protein, 352 aa, Arabidopsis thaliana; identical to SEQ ID NO: 90769
  peptide (1)..(352): Ceres Seq. ID no. 12725207

SEQ ID NO: 94526 - protein, 341 aa, Arabidopsis thaliana; identical to SEQ ID NO: 90770
  peptide (1)..(341): Ceres Seq. ID no. 12725208

SEQ ID NO: 94527 - DNA, 3066 bp, Arabidopsis thaliana; identical to SEQ ID NO: 90771
  misc_feature (1)..(3066): Ceres Seq. ID no. 12725211
  misc_feature (1)..(3066): Ortholog of  Ceres SEQ ID NO 14310362 as cited in SEQ ID NO 54251
  misc_feature (1)..(3066): Ortholog of  Ceres SEQ ID NO 12583314 as cited in SEQ ID NO 56435
  misc_feature (1)..(3066): Ortholog of  Ceres SEQ ID NO 13654989 as cited in SEQ ID NO 63117
  misc_feature (1)..(3066): Ortholog of  Ceres SEQ ID NO 13584744 as cited in SEQ ID NO 69137

SEQ ID NO: 94528 - protein, 895 aa, Arabidopsis thaliana; identical to SEQ ID NO: 90772
  peptide (1)..(895): Ceres Seq. ID no. 12725212

SEQ ID NO: 94529 - protein, 807 aa, Arabidopsis thaliana; identical to SEQ ID NO: 90773
  peptide (1)..(807): Ceres Seq. ID no. 12725213

SEQ ID NO: 94530 - protein, 724 aa, Arabidopsis thaliana; identical to SEQ ID NO: 90774
  peptide (1)..(724): Ceres Seq. ID no. 12725214

SEQ ID NO: 94531 - DNA, 990 bp, Arabidopsis thaliana; identical to SEQ ID NO: 90775
  misc_feature (1)..(990): Ceres Seq. ID no. 12725215
  misc_feature (1)..(990): Ortholog of  Ceres SEQ ID NO 14308600 as cited in SEQ ID NO 60485
  misc_feature (1)..(990): Ortholog of  Ceres SEQ ID NO 13584797 as cited in SEQ ID NO 69087

SEQ ID NO: 94532 - protein, 237 aa, Arabidopsis thaliana; identical to SEQ ID NO: 90776
  peptide (1)..(237): Ceres Seq. ID no. 12725216

SEQ ID NO: 94533 - protein, 127 aa, Arabidopsis thaliana; identical to SEQ ID NO: 90777
  peptide (1)..(127): Ceres Seq. ID no. 12725217

SEQ ID NO: 94534 - DNA, 3177 bp, Arabidopsis thaliana; identical to SEQ ID NO: 90778
  misc_feature (1)..(3177): Ceres Seq. ID no. 12725257
  misc_feature (1)..(3177): Ortholog of  Ceres SEQ ID NO 13600310 as cited in SEQ ID NO 5086

SEQ ID NO: 94535 - protein, 1058 aa, Arabidopsis thaliana; identical to SEQ ID NO: 90779
  peptide (1)..(1058): Ceres Seq. ID no. 12725258

SEQ ID NO: 94536 - protein, 915 aa, Arabidopsis thaliana; identical to SEQ ID NO: 90780
  peptide (1)..(915): Ceres Seq. ID no. 12725259

SEQ ID NO: 94537 - protein, 877 aa, Arabidopsis thaliana; identical to SEQ ID NO: 90781
  peptide (1)..(877): Ceres Seq. ID no. 12725260

SEQ ID NO: 94538 - DNA, 792 bp, Arabidopsis thaliana; identical to SEQ ID NO: 90782
  misc_feature (1)..(792): Ceres Seq. ID no. 12725263
  misc_feature (1)..(792): Ortholog of  Ceres SEQ ID NO 15226238 as cited in SEQ ID NO 68840
  misc_feature (1)..(792): Ortholog of  Ceres SEQ ID NO 12635175 as cited in SEQ ID NO 0
  misc_feature (1)..(792): Ortholog of  Ceres SEQ ID NO 14306100 as cited in SEQ ID NO 0

SEQ ID NO: 94539 - protein, 263 aa, Arabidopsis thaliana; identical to SEQ ID NO: 90783
  peptide (1)..(263): Ceres Seq. ID no. 12725264

SEQ ID NO: 94540 - protein, 215 aa, Arabidopsis thaliana; identical to SEQ ID NO: 90784
  peptide (1)..(215): Ceres Seq. ID no. 12725265

SEQ ID NO: 94541 - protein, 170 aa, Arabidopsis thaliana; identical to SEQ ID NO: 90785
  peptide (1)..(170): Ceres Seq. ID no. 12725266

SEQ ID NO: 94542 - DNA, 402 bp, Arabidopsis thaliana; identical to SEQ ID NO: 90786
  misc_feature (1)..(402): Ceres Seq. ID no. 12725267
  misc_feature (1)..(402): Ortholog of  Ceres SEQ ID NO 13495070 as cited in SEQ ID NO 53216
  misc_feature (1)..(402): Ortholog of  Ceres SEQ ID NO 13661333 as cited in SEQ ID NO 61620
  misc_feature (1)..(402): Ortholog of  Ceres SEQ ID NO 13596812 as cited in SEQ ID NO 62283
  misc_feature (1)..(402): Ortholog of  Ceres SEQ ID NO 13623021 as cited in SEQ ID NO 0

SEQ ID NO: 94543 - protein, 133 aa, Arabidopsis thaliana; identical to SEQ ID NO: 90787
  peptide (1)..(133): Ceres Seq. ID no. 12725268

SEQ ID NO: 94544 - protein, 103 aa, Arabidopsis thaliana; identical to SEQ ID NO: 90788
  peptide (1)..(103): Ceres Seq. ID no. 12725269

SEQ ID NO: 94545 - protein, 91 aa, Arabidopsis thaliana; identical to SEQ ID NO: 90789
  peptide (1)..(91): Ceres Seq. ID no. 12725270

SEQ ID NO: 94546 - DNA, 867 bp, Arabidopsis thaliana; identical to SEQ ID NO: 90790
  misc_feature (1)..(867): Ceres Seq. ID no. 12725283
  misc_feature (1)..(867): Ortholog of  Ceres SEQ ID NO 14316459 as cited in SEQ ID NO 57754

SEQ ID NO: 94547 - protein, 288 aa, Arabidopsis thaliana; identical to SEQ ID NO: 90791
  peptide (1)..(288): Ceres Seq. ID no. 12725284

SEQ ID NO: 94548 - DNA, 1339 bp, Arabidopsis thaliana; identical to SEQ ID NO: 90792
  misc_feature (1)..(1339): Ceres Seq. ID no. 12725320
  misc_feature (1)..(1339): Ortholog of  Ceres SEQ ID NO 13596433 as cited in SEQ ID NO 68721
  misc_feature (1)..(1339): Ortholog of  Ceres SEQ ID NO 13599169 as cited in SEQ ID NO 0

SEQ ID NO: 94549 - protein, 341 aa, Arabidopsis thaliana; identical to SEQ ID NO: 21850
  peptide (1)..(341): Ceres Seq. ID no. 12725321

SEQ ID NO: 94550 - protein, 313 aa, Arabidopsis thaliana; identical to SEQ ID NO: 21851
  peptide (1)..(313): Ceres Seq. ID no. 12725322

SEQ ID NO: 94551 - protein, 293 aa, Arabidopsis thaliana; identical to SEQ ID NO: 21852
  peptide (1)..(293): Ceres Seq. ID no. 12725323

SEQ ID NO: 94552 - DNA, 894 bp, Arabidopsis thaliana; identical to SEQ ID NO: 90796
  misc_feature (1)..(894): Ceres Seq. ID no. 12725328
  misc_feature (1)..(894): Ortholog of  Ceres SEQ ID NO 13598527 as cited in SEQ ID NO 64914

SEQ ID NO: 94553 - protein, 297 aa, Arabidopsis thaliana; identical to SEQ ID NO: 90797
  peptide (1)..(297): Ceres Seq. ID no. 12725329

SEQ ID NO: 94554 - protein, 223 aa, Arabidopsis thaliana; identical to SEQ ID NO: 90798
  peptide (1)..(223): Ceres Seq. ID no. 12725330

SEQ ID NO: 94555 - protein, 187 aa, Arabidopsis thaliana; identical to SEQ ID NO: 90799
  peptide (1)..(187): Ceres Seq. ID no. 12725331

SEQ ID NO: 94556 - DNA, 1317 bp, Arabidopsis thaliana; identical to SEQ ID NO: 90800
  misc_feature (1)..(1317): Ceres Seq. ID no. 12725349
  misc_feature (1)..(1317): Ortholog of  Ceres SEQ ID NO 13594345 as cited in SEQ ID NO 58043
  misc_feature (1)..(1317): Ortholog of  Ceres SEQ ID NO 12614112 as cited in SEQ ID NO 60891
  misc_feature (1)..(1317): Ortholog of  Ceres SEQ ID NO 13597574 as cited in SEQ ID NO 64677
  misc_feature (1)..(1317): Ortholog of  Ceres SEQ ID NO 13597843 as cited in SEQ ID NO 64850
  misc_feature (1)..(1317): Ortholog of  Ceres SEQ ID NO 13662880 as cited in SEQ ID NO 65422
  misc_feature (1)..(1317): Ortholog of  Ceres SEQ ID NO 12779098 as cited in SEQ ID NO 67698
  misc_feature (1)..(1317): Ortholog of  Ceres SEQ ID NO 13591190 as cited in SEQ ID NO 68044
  misc_feature (1)..(1317): Ortholog of  Ceres SEQ ID NO 13596089 as cited in SEQ ID NO 68373

SEQ ID NO: 94557 - protein, 438 aa, Arabidopsis thaliana; identical to SEQ ID NO: 90801
  peptide (1)..(438): Ceres Seq. ID no. 12725350

SEQ ID NO: 94558 - protein, 434 aa, Arabidopsis thaliana; identical to SEQ ID NO: 90802
  peptide (1)..(434): Ceres Seq. ID no. 12725351

SEQ ID NO: 94559 - protein, 413 aa, Arabidopsis thaliana; identical to SEQ ID NO: 90803
  peptide (1)..(413): Ceres Seq. ID no. 12725352

SEQ ID NO: 94560 - DNA, 1662 bp, Arabidopsis thaliana; identical to SEQ ID NO: 90804
  misc_feature (1)..(1662): Ceres Seq. ID no. 12725353
  misc_feature (1)..(1662): Ortholog of  Ceres SEQ ID NO 14315063 as cited in SEQ ID NO 52256
  misc_feature (1)..(1662): Ortholog of  Ceres SEQ ID NO 13597574 as cited in SEQ ID NO 64677
  misc_feature (1)..(1662): Ortholog of  Ceres SEQ ID NO 13662880 as cited in SEQ ID NO 65422
  misc_feature (1)..(1662): Ortholog of  Ceres SEQ ID NO 12779098 as cited in SEQ ID NO 67698
  misc_feature (1)..(1662): Ortholog of  Ceres SEQ ID NO 13591190 as cited in SEQ ID NO 68044
  misc_feature (1)..(1662): Ortholog of  Ceres SEQ ID NO 13595961 as cited in SEQ ID NO 68223
  misc_feature (1)..(1662): Ortholog of  Ceres SEQ ID NO 13596089 as cited in SEQ ID NO 68373

SEQ ID NO: 94561 - protein, 458 aa, Arabidopsis thaliana; identical to SEQ ID NO: 90805
  peptide (1)..(458): Ceres Seq. ID no. 12725354

SEQ ID NO: 94562 - protein, 453 aa, Arabidopsis thaliana; identical to SEQ ID NO: 90806
  peptide (1)..(453): Ceres Seq. ID no. 12725355

SEQ ID NO: 94563 - protein, 430 aa, Arabidopsis thaliana; identical to SEQ ID NO: 90807
  peptide (1)..(430): Ceres Seq. ID no. 12725356

SEQ ID NO: 94564 - DNA, 1344 bp, Arabidopsis thaliana; identical to SEQ ID NO: 90808
  misc_feature (1)..(1344): Ceres Seq. ID no. 12725365
  misc_feature (1)..(1344): Ortholog of  Ceres SEQ ID NO 12614112 as cited in SEQ ID NO 60891
  misc_feature (1)..(1344): Ortholog of  Ceres SEQ ID NO 13597574 as cited in SEQ ID NO 64677
  misc_feature (1)..(1344): Ortholog of  Ceres SEQ ID NO 13662880 as cited in SEQ ID NO 65422
  misc_feature (1)..(1344): Ortholog of  Ceres SEQ ID NO 12779098 as cited in SEQ ID NO 67698
  misc_feature (1)..(1344): Ortholog of  Ceres SEQ ID NO 13596180 as cited in SEQ ID NO 67941
  misc_feature (1)..(1344): Ortholog of  Ceres SEQ ID NO 13591190 as cited in SEQ ID NO 68044
  misc_feature (1)..(1344): Ortholog of  Ceres SEQ ID NO 13596089 as cited in SEQ ID NO 68373

SEQ ID NO: 94565 - protein, 447 aa, Arabidopsis thaliana; identical to SEQ ID NO: 90809
  peptide (1)..(447): Ceres Seq. ID no. 12725366

SEQ ID NO: 94566 - protein, 424 aa, Arabidopsis thaliana; identical to SEQ ID NO: 90810
  peptide (1)..(424): Ceres Seq. ID no. 12725367

SEQ ID NO: 94567 - protein, 423 aa, Arabidopsis thaliana; identical to SEQ ID NO: 90811
  peptide (1)..(423): Ceres Seq. ID no. 12725368

SEQ ID NO: 94568 - DNA, 1760 bp, Arabidopsis thaliana; identical to SEQ ID NO: 90812
  misc_feature (1)..(1760): Ceres Seq. ID no. 12725373
  misc_feature (1)..(1760): Ortholog of  Ceres SEQ ID NO 13595747 as cited in SEQ ID NO 58679

SEQ ID NO: 94569 - protein, 297 aa, Arabidopsis thaliana; identical to SEQ ID NO: 90813
  peptide (1)..(297): Ceres Seq. ID no. 12725374

SEQ ID NO: 94570 - protein, 231 aa, Arabidopsis thaliana; identical to SEQ ID NO: 90814
  peptide (1)..(231): Ceres Seq. ID no. 12725375

SEQ ID NO: 94571 - DNA, 615 bp, Arabidopsis thaliana; identical to SEQ ID NO: 90815
  misc_feature (1)..(615): Ceres Seq. ID no. 12725395
  misc_feature (1)..(615): Ortholog of  Ceres SEQ ID NO 13594498 as cited in SEQ ID NO 51322
  misc_feature (1)..(615): Ortholog of  Ceres SEQ ID NO 15179033 as cited in SEQ ID NO 0

SEQ ID NO: 94572 - protein, 204 aa, Arabidopsis thaliana; identical to SEQ ID NO: 90816
  peptide (1)..(204): Ceres Seq. ID no. 12725396

SEQ ID NO: 94573 - protein, 107 aa, Arabidopsis thaliana; identical to SEQ ID NO: 90817
  peptide (1)..(107): Ceres Seq. ID no. 12725397

SEQ ID NO: 94574 - DNA, 1593 bp, Arabidopsis thaliana; identical to SEQ ID NO: 90818
  misc_feature (1)..(1593): Ceres Seq. ID no. 12725402
  misc_feature (1)..(1593): Ortholog of  Ceres SEQ ID NO 15171152 as cited in SEQ ID NO 60275

SEQ ID NO: 94575 - protein, 450 aa, Arabidopsis thaliana; identical to SEQ ID NO: 90819
  peptide (1)..(450): Ceres Seq. ID no. 12725403

SEQ ID NO: 94576 - protein, 284 aa, Arabidopsis thaliana; identical to SEQ ID NO: 90820
  peptide (1)..(284): Ceres Seq. ID no. 12725404

SEQ ID NO: 94577 - DNA, 2775 bp, Arabidopsis thaliana; identical to SEQ ID NO: 90821
  misc_feature (1)..(2775): Ceres Seq. ID no. 12725424
  misc_feature (1)..(2775): Ortholog of  Ceres SEQ ID NO 13595870 as cited in SEQ ID NO 62101
  misc_feature (1)..(2775): Ortholog of  Ceres SEQ ID NO 13590241 as cited in SEQ ID NO 63878
  misc_feature (1)..(2775): Ortholog of  Ceres SEQ ID NO 13657939 as cited in SEQ ID NO 66349

SEQ ID NO: 94578 - protein, 806 aa, Arabidopsis thaliana; identical to SEQ ID NO: 90822
  peptide (1)..(806): Ceres Seq. ID no. 12725425

SEQ ID NO: 94579 - protein, 802 aa, Arabidopsis thaliana; identical to SEQ ID NO: 90823
  peptide (1)..(802): Ceres Seq. ID no. 12725426

SEQ ID NO: 94580 - protein, 652 aa, Arabidopsis thaliana; identical to SEQ ID NO: 90824
  peptide (1)..(652): Ceres Seq. ID no. 12725427

SEQ ID NO: 94581 - DNA, 3030 bp, Arabidopsis thaliana; identical to SEQ ID NO: 90825
  misc_feature (1)..(3030): Ceres Seq. ID no. 12725428
  misc_feature (1)..(3030): Ortholog of  Ceres SEQ ID NO 13656662 as cited in SEQ ID NO 65594

SEQ ID NO: 94582 - protein, 1009 aa, Arabidopsis thaliana; identical to SEQ ID NO: 90826
  peptide (1)..(1009): Ceres Seq. ID no. 12725429

SEQ ID NO: 94583 - protein, 997 aa, Arabidopsis thaliana; identical to SEQ ID NO: 90827
  peptide (1)..(997): Ceres Seq. ID no. 12725430

SEQ ID NO: 94584 - protein, 900 aa, Arabidopsis thaliana; identical to SEQ ID NO: 90828
  peptide (1)..(900): Ceres Seq. ID no. 12725431

SEQ ID NO: 94585 - DNA, 3078 bp, Arabidopsis thaliana; identical to SEQ ID NO: 90829
  misc_feature (1)..(3078): Ceres Seq. ID no. 12725432
  misc_feature (1)..(3078): Ortholog of  Ceres SEQ ID NO 13656662 as cited in SEQ ID NO 65594

SEQ ID NO: 94586 - protein, 1025 aa, Arabidopsis thaliana; identical to SEQ ID NO: 90830
  peptide (1)..(1025): Ceres Seq. ID no. 12725433

SEQ ID NO: 94587 - protein, 1018 aa, Arabidopsis thaliana; identical to SEQ ID NO: 90831
  peptide (1)..(1018): Ceres Seq. ID no. 12725434

SEQ ID NO: 94588 - protein, 999 aa, Arabidopsis thaliana; identical to SEQ ID NO: 90832
  peptide (1)..(999): Ceres Seq. ID no. 12725435

SEQ ID NO: 94589 - DNA, 1747 bp, Arabidopsis thaliana; identical to SEQ ID NO: 90833
  misc_feature (1)..(1747): Ceres Seq. ID no. 12725463
  misc_feature (1)..(1747): Ortholog of  Ceres SEQ ID NO 13656091 as cited in SEQ ID NO 69094

SEQ ID NO: 94590 - protein, 480 aa, Arabidopsis thaliana; identical to SEQ ID NO: 77000
  peptide (1)..(480): Ceres Seq. ID no. 12725464

SEQ ID NO: 94591 - protein, 384 aa, Arabidopsis thaliana; identical to SEQ ID NO: 77001
  peptide (1)..(384): Ceres Seq. ID no. 12725465

SEQ ID NO: 94592 - protein, 363 aa, Arabidopsis thaliana; identical to SEQ ID NO: 77002
  peptide (1)..(363): Ceres Seq. ID no. 12725466

SEQ ID NO: 94593 - DNA, 930 bp, Arabidopsis thaliana; identical to SEQ ID NO: 90837
  misc_feature (1)..(930): Ceres Seq. ID no. 12725478
  misc_feature (1)..(930): Ortholog of  Ceres SEQ ID NO 14311477 as cited in SEQ ID NO 51390
  misc_feature (1)..(930): Ortholog of  Ceres SEQ ID NO 14302840 as cited in SEQ ID NO 62295
  misc_feature (1)..(930): Ortholog of  Ceres SEQ ID NO 13596892 as cited in SEQ ID NO 62900

SEQ ID NO: 94594 - protein, 309 aa, Arabidopsis thaliana; identical to SEQ ID NO: 90838
  peptide (1)..(309): Ceres Seq. ID no. 12725479

SEQ ID NO: 94595 - protein, 156 aa, Arabidopsis thaliana; identical to SEQ ID NO: 84779
  peptide (1)..(156): Ceres Seq. ID no. 12725480

SEQ ID NO: 94596 - DNA, 776 bp, Arabidopsis thaliana; identical to SEQ ID NO: 90840
  misc_feature (1)..(776): Ceres Seq. ID no. 12725481
  misc_feature (1)..(776): Ortholog of  Ceres SEQ ID NO 12474478 as cited in SEQ ID NO 96
  misc_feature (1)..(776): Ortholog of  Ceres SEQ ID NO 14309053 as cited in SEQ ID NO 0

SEQ ID NO: 94597 - protein, 202 aa, Arabidopsis thaliana; identical to SEQ ID NO: 90841
  peptide (1)..(202): Ceres Seq. ID no. 12725482

SEQ ID NO: 94598 - DNA, 1785 bp, Arabidopsis thaliana; identical to SEQ ID NO: 90842
  misc_feature (1)..(1785): Ceres Seq. ID no. 12725483
  misc_feature (1)..(1785): Ortholog of  Ceres SEQ ID NO 13594037 as cited in SEQ ID NO 55666
  misc_feature (1)..(1785): Ortholog of  Ceres SEQ ID NO 13657707 as cited in SEQ ID NO 66407

SEQ ID NO: 94599 - protein, 594 aa, Arabidopsis thaliana; identical to SEQ ID NO: 90843
  peptide (1)..(594): Ceres Seq. ID no. 12725484

SEQ ID NO: 94600 - protein, 511 aa, Arabidopsis thaliana; identical to SEQ ID NO: 90844
  peptide (1)..(511): Ceres Seq. ID no. 12725485

SEQ ID NO: 94601 - protein, 472 aa, Arabidopsis thaliana; identical to SEQ ID NO: 90845
  peptide (1)..(472): Ceres Seq. ID no. 12725486

SEQ ID NO: 94602 - DNA, 1604 bp, Arabidopsis thaliana; identical to SEQ ID NO: 90846
  misc_feature (1)..(1604): Ceres Seq. ID no. 12725502
  misc_feature (1)..(1604): Ortholog of  Ceres SEQ ID NO 14314464 as cited in SEQ ID NO 52405
  misc_feature (1)..(1604): Ortholog of  Ceres SEQ ID NO 15177592 as cited in SEQ ID NO 58436
  misc_feature (1)..(1604): Ortholog of  Ceres SEQ ID NO 13655251 as cited in SEQ ID NO 62888
  misc_feature (1)..(1604): Ortholog of  Ceres SEQ ID NO 13597194 as cited in SEQ ID NO 63661
  misc_feature (1)..(1604): Ortholog of  Ceres SEQ ID NO 14302883 as cited in SEQ ID NO 66384
  misc_feature (1)..(1604): Ortholog of  Ceres SEQ ID NO 13662855 as cited in SEQ ID NO 69059

SEQ ID NO: 94603 - protein, 403 aa, Arabidopsis thaliana; identical to SEQ ID NO: 90847
  peptide (1)..(403): Ceres Seq. ID no. 12725503

SEQ ID NO: 94604 - protein, 300 aa, Arabidopsis thaliana; identical to SEQ ID NO: 22021
  peptide (1)..(300): Ceres Seq. ID no. 12725504

SEQ ID NO: 94605 - protein, 238 aa, Arabidopsis thaliana; identical to SEQ ID NO: 22022
  peptide (1)..(238): Ceres Seq. ID no. 12725505

SEQ ID NO: 94606 - DNA, 1158 bp, Arabidopsis thaliana; identical to SEQ ID NO: 90850
  misc_feature (1)..(1158): Ceres Seq. ID no. 12725540
  misc_feature (1)..(1158): Ortholog of  Ceres SEQ ID NO 13599990 as cited in SEQ ID NO 0

SEQ ID NO: 94607 - protein, 385 aa, Arabidopsis thaliana; identical to SEQ ID NO: 90851
  peptide (1)..(385): Ceres Seq. ID no. 12725541

SEQ ID NO: 94608 - protein, 369 aa, Arabidopsis thaliana; identical to SEQ ID NO: 90852
  peptide (1)..(369): Ceres Seq. ID no. 12725542

SEQ ID NO: 94609 - protein, 340 aa, Arabidopsis thaliana; identical to SEQ ID NO: 90853
  peptide (1)..(340): Ceres Seq. ID no. 12725543

SEQ ID NO: 94610 - DNA, 735 bp, Arabidopsis thaliana; identical to SEQ ID NO: 90854
  misc_feature (1)..(735): Ceres Seq. ID no. 12725578
  misc_feature (1)..(735): Ortholog of  Ceres SEQ ID NO 14314759 as cited in SEQ ID NO 59915
  misc_feature (1)..(735): Ortholog of  Ceres SEQ ID NO 13661769 as cited in SEQ ID NO 61435
  misc_feature (1)..(735): Ortholog of  Ceres SEQ ID NO 13600585 as cited in SEQ ID NO 0

SEQ ID NO: 94611 - protein, 244 aa, Arabidopsis thaliana; identical to SEQ ID NO: 90855
  peptide (1)..(244): Ceres Seq. ID no. 12725579

SEQ ID NO: 94612 - protein, 197 aa, Arabidopsis thaliana; identical to SEQ ID NO: 90856
  peptide (1)..(197): Ceres Seq. ID no. 12725580

SEQ ID NO: 94613 - protein, 168 aa, Arabidopsis thaliana; identical to SEQ ID NO: 90857
  peptide (1)..(168): Ceres Seq. ID no. 12725581

SEQ ID NO: 94614 - DNA, 1968 bp, Arabidopsis thaliana; identical to SEQ ID NO: 90858
  misc_feature (1)..(1968): Ceres Seq. ID no. 12725586
  misc_feature (1)..(1968): Ortholog of  Ceres SEQ ID NO 14302990 as cited in SEQ ID NO 67543

SEQ ID NO: 94615 - protein, 484 aa, Arabidopsis thaliana; identical to SEQ ID NO: 90859
  peptide (1)..(484): Ceres Seq. ID no. 12725587

SEQ ID NO: 94616 - protein, 459 aa, Arabidopsis thaliana; identical to SEQ ID NO: 90860
  peptide (1)..(459): Ceres Seq. ID no. 12725588

SEQ ID NO: 94617 - protein, 427 aa, Arabidopsis thaliana; identical to SEQ ID NO: 90861
  peptide (1)..(427): Ceres Seq. ID no. 12725589

SEQ ID NO: 94618 - DNA, 2415 bp, Arabidopsis thaliana; identical to SEQ ID NO: 90862
  misc_feature (1)..(2415): Ceres Seq. ID no. 12725594
  misc_feature (1)..(2415): Ortholog of  Ceres SEQ ID NO 14310784 as cited in SEQ ID NO 58503

SEQ ID NO: 94619 - protein, 655 aa, Arabidopsis thaliana; identical to SEQ ID NO: 90863
  peptide (1)..(655): Ceres Seq. ID no. 12725595

SEQ ID NO: 94620 - protein, 554 aa, Arabidopsis thaliana; identical to SEQ ID NO: 90864
  peptide (1)..(554): Ceres Seq. ID no. 12725596

SEQ ID NO: 94621 - protein, 399 aa, Arabidopsis thaliana; identical to SEQ ID NO: 90865
  peptide (1)..(399): Ceres Seq. ID no. 12725597

SEQ ID NO: 94622 - DNA, 1446 bp, Arabidopsis thaliana; identical to SEQ ID NO: 90866
  misc_feature (1)..(1446): Ceres Seq. ID no. 12725610
  misc_feature (1)..(1446): Ortholog of  Ceres SEQ ID NO 13594216 as cited in SEQ ID NO 57054
  misc_feature (1)..(1446): Ortholog of  Ceres SEQ ID NO 13598512 as cited in SEQ ID NO 64094
  misc_feature (1)..(1446): Ortholog of  Ceres SEQ ID NO 13657677 as cited in SEQ ID NO 66119
  misc_feature (1)..(1446): Ortholog of  Ceres SEQ ID NO 14301550 as cited in SEQ ID NO 66519
  misc_feature (1)..(1446): Ortholog of  Ceres SEQ ID NO 15180570 as cited in SEQ ID NO 0

SEQ ID NO: 94623 - protein, 481 aa, Arabidopsis thaliana; identical to SEQ ID NO: 90867
  peptide (1)..(481): Ceres Seq. ID no. 12725611

SEQ ID NO: 94624 - protein, 438 aa, Arabidopsis thaliana; identical to SEQ ID NO: 90868
  peptide (1)..(438): Ceres Seq. ID no. 12725612

SEQ ID NO: 94625 - protein, 379 aa, Arabidopsis thaliana; identical to SEQ ID NO: 90869
  peptide (1)..(379): Ceres Seq. ID no. 12725613

SEQ ID NO: 94626 - DNA, 2343 bp, Arabidopsis thaliana; identical to SEQ ID NO: 90870
  misc_feature (1)..(2343): Ceres Seq. ID no. 12725618
  misc_feature (1)..(2343): Ortholog of  Ceres SEQ ID NO 13600595 as cited in SEQ ID NO 629
  misc_feature (1)..(2343): Ortholog of  Ceres SEQ ID NO 13593379 as cited in SEQ ID NO 20573

SEQ ID NO: 94627 - protein, 780 aa, Arabidopsis thaliana; identical to SEQ ID NO: 90871
  peptide (1)..(780): Ceres Seq. ID no. 12725619

SEQ ID NO: 94628 - protein, 739 aa, Arabidopsis thaliana; identical to SEQ ID NO: 90872
  peptide (1)..(739): Ceres Seq. ID no. 12725620

SEQ ID NO: 94629 - protein, 645 aa, Arabidopsis thaliana; identical to SEQ ID NO: 90873
  peptide (1)..(645): Ceres Seq. ID no. 12725621

SEQ ID NO: 94630 - DNA, 2893 bp, Arabidopsis thaliana; identical to SEQ ID NO: 90874
  misc_feature (1)..(2893): Ceres Seq. ID no. 12725622
  misc_feature (1)..(2893): Ortholog of  Ceres SEQ ID NO 13600301 as cited in SEQ ID NO 1010

SEQ ID NO: 94631 - protein, 879 aa, Arabidopsis thaliana; identical to SEQ ID NO: 90875
  peptide (1)..(879): Ceres Seq. ID no. 12725623

SEQ ID NO: 94632 - protein, 680 aa, Arabidopsis thaliana; identical to SEQ ID NO: 90876
  peptide (1)..(680): Ceres Seq. ID no. 12725624

SEQ ID NO: 94633 - protein, 677 aa, Arabidopsis thaliana; identical to SEQ ID NO: 90877
  peptide (1)..(677): Ceres Seq. ID no. 12725625

SEQ ID NO: 94634 - DNA, 1146 bp, Arabidopsis thaliana; identical to SEQ ID NO: 90878
  misc_feature (1)..(1146): Ceres Seq. ID no. 12725626
  misc_feature (1)..(1146): Ortholog of  Ceres SEQ ID NO 14304148 as cited in SEQ ID NO 57313
  misc_feature (1)..(1146): Ortholog of  Ceres SEQ ID NO 13598513 as cited in SEQ ID NO 64102

SEQ ID NO: 94635 - protein, 381 aa, Arabidopsis thaliana; identical to SEQ ID NO: 90879
  peptide (1)..(381): Ceres Seq. ID no. 12725627

SEQ ID NO: 94636 - protein, 354 aa, Arabidopsis thaliana; identical to SEQ ID NO: 90880
  peptide (1)..(354): Ceres Seq. ID no. 12725628

SEQ ID NO: 94637 - protein, 338 aa, Arabidopsis thaliana; identical to SEQ ID NO: 90881
  peptide (1)..(338): Ceres Seq. ID no. 12725629

SEQ ID NO: 94638 - DNA, 735 bp, Arabidopsis thaliana; identical to SEQ ID NO: 90882
  misc_feature (1)..(735): Ceres Seq. ID no. 12725634
  misc_feature (1)..(735): Ortholog of  Ceres SEQ ID NO 13594435 as cited in SEQ ID NO 57977

SEQ ID NO: 94639 - protein, 244 aa, Arabidopsis thaliana; identical to SEQ ID NO: 90883
  peptide (1)..(244): Ceres Seq. ID no. 12725635

SEQ ID NO: 94640 - protein, 197 aa, Arabidopsis thaliana; identical to SEQ ID NO: 90884
  peptide (1)..(197): Ceres Seq. ID no. 12725636

SEQ ID NO: 94641 - protein, 136 aa, Arabidopsis thaliana; identical to SEQ ID NO: 90885
  peptide (1)..(136): Ceres Seq. ID no. 12725637

SEQ ID NO: 94642 - DNA, 1636 bp, Arabidopsis thaliana; identical to SEQ ID NO: 90886
  misc_feature (1)..(1636): Ceres Seq. ID no. 12725642
  misc_feature (1)..(1636): Ortholog of  Ceres SEQ ID NO 13597269 as cited in SEQ ID NO 63932

SEQ ID NO: 94643 - protein, 470 aa, Arabidopsis thaliana; identical to SEQ ID NO: 90887
  peptide (1)..(470): Ceres Seq. ID no. 12725643

SEQ ID NO: 94644 - protein, 454 aa, Arabidopsis thaliana; identical to SEQ ID NO: 90888
  peptide (1)..(454): Ceres Seq. ID no. 12725644

SEQ ID NO: 94645 - protein, 397 aa, Arabidopsis thaliana; identical to SEQ ID NO: 90889
  peptide (1)..(397): Ceres Seq. ID no. 12725645

SEQ ID NO: 94646 - DNA, 3033 bp, Arabidopsis thaliana; identical to SEQ ID NO: 90890
  misc_feature (1)..(3033): Ceres Seq. ID no. 12725655
  misc_feature (1)..(3033): Ortholog of  Ceres SEQ ID NO 14308209 as cited in SEQ ID NO 58800

SEQ ID NO: 94647 - protein, 917 aa, Arabidopsis thaliana; identical to SEQ ID NO: 90891
  peptide (1)..(917): Ceres Seq. ID no. 12725656

SEQ ID NO: 94648 - protein, 905 aa, Arabidopsis thaliana; identical to SEQ ID NO: 90892
  peptide (1)..(905): Ceres Seq. ID no. 12725657

SEQ ID NO: 94649 - protein, 801 aa, Arabidopsis thaliana; identical to SEQ ID NO: 90893
  peptide (1)..(801): Ceres Seq. ID no. 12725658

SEQ ID NO: 94650 - DNA, 1092 bp, Arabidopsis thaliana; identical to SEQ ID NO: 90894
  misc_feature (1)..(1092): Ceres Seq. ID no. 12725663
  misc_feature (1)..(1092): Ortholog of  Ceres SEQ ID NO 13596816 as cited in SEQ ID NO 62287

SEQ ID NO: 94651 - protein, 363 aa, Arabidopsis thaliana; identical to SEQ ID NO: 90895
  peptide (1)..(363): Ceres Seq. ID no. 12725664

SEQ ID NO: 94652 - protein, 344 aa, Arabidopsis thaliana; identical to SEQ ID NO: 90896
  peptide (1)..(344): Ceres Seq. ID no. 12725665

SEQ ID NO: 94653 - protein, 234 aa, Arabidopsis thaliana; identical to SEQ ID NO: 90897
  peptide (1)..(234): Ceres Seq. ID no. 12725666

SEQ ID NO: 94654 - DNA, 954 bp, Arabidopsis thaliana; identical to SEQ ID NO: 90898
  misc_feature (1)..(954): Ceres Seq. ID no. 12725679
  misc_feature (1)..(954): Ortholog of  Ceres SEQ ID NO 14311493 as cited in SEQ ID NO 51440
  misc_feature (1)..(954): Ortholog of  Ceres SEQ ID NO 15177312 as cited in SEQ ID NO 52762

SEQ ID NO: 94655 - protein, 317 aa, Arabidopsis thaliana; identical to SEQ ID NO: 90899
  peptide (1)..(317): Ceres Seq. ID no. 12725680

SEQ ID NO: 94656 - protein, 298 aa, Arabidopsis thaliana; identical to SEQ ID NO: 90900
  peptide (1)..(298): Ceres Seq. ID no. 12725681

SEQ ID NO: 94657 - protein, 285 aa, Arabidopsis thaliana; identical to SEQ ID NO: 90901
  peptide (1)..(285): Ceres Seq. ID no. 12725682

SEQ ID NO: 94658 - DNA, 2091 bp, Arabidopsis thaliana; identical to SEQ ID NO: 90902
  misc_feature (1)..(2091): Ceres Seq. ID no. 12725687
  misc_feature (1)..(2091): Ortholog of  Ceres SEQ ID NO 13586013 as cited in SEQ ID NO 1182

SEQ ID NO: 94659 - protein, 674 aa, Arabidopsis thaliana; identical to SEQ ID NO: 90903
  peptide (1)..(674): Ceres Seq. ID no. 12725688

SEQ ID NO: 94660 - protein, 658 aa, Arabidopsis thaliana; identical to SEQ ID NO: 90904
  peptide (1)..(658): Ceres Seq. ID no. 12725689

SEQ ID NO: 94661 - protein, 637 aa, Arabidopsis thaliana; identical to SEQ ID NO: 90905
  peptide (1)..(637): Ceres Seq. ID no. 12725690

SEQ ID NO: 94662 - DNA, 2158 bp, Arabidopsis thaliana; identical to SEQ ID NO: 90906
  misc_feature (1)..(2158): Ceres Seq. ID no. 12725691
  misc_feature (1)..(2158): Ortholog of  Ceres SEQ ID NO 13586013 as cited in SEQ ID NO 1182

SEQ ID NO: 94663 - protein, 673 aa, Arabidopsis thaliana; identical to SEQ ID NO: 90907
  peptide (1)..(673): Ceres Seq. ID no. 12725692

SEQ ID NO: 94664 - protein, 653 aa, Arabidopsis thaliana; identical to SEQ ID NO: 90908
  peptide (1)..(653): Ceres Seq. ID no. 12725693

SEQ ID NO: 94665 - protein, 633 aa, Arabidopsis thaliana; identical to SEQ ID NO: 90909
  peptide (1)..(633): Ceres Seq. ID no. 12725694

SEQ ID NO: 94666 - DNA, 1588 bp, Arabidopsis thaliana; identical to SEQ ID NO: 90910
  misc_feature (1)..(1588): Ceres Seq. ID no. 12725707
  misc_feature (1)..(1588): Ortholog of  Ceres SEQ ID NO 13587235 as cited in SEQ ID NO 0

SEQ ID NO: 94667 - protein, 259 aa, Arabidopsis thaliana; identical to SEQ ID NO: 90911
  peptide (1)..(259): Ceres Seq. ID no. 12725708

SEQ ID NO: 94668 - protein, 229 aa, Arabidopsis thaliana; identical to SEQ ID NO: 90912
  peptide (1)..(229): Ceres Seq. ID no. 12725709

SEQ ID NO: 94669 - protein, 196 aa, Arabidopsis thaliana; identical to SEQ ID NO: 90913
  peptide (1)..(196): Ceres Seq. ID no. 12725710

SEQ ID NO: 94670 - DNA, 588 bp, Arabidopsis thaliana; identical to SEQ ID NO: 90914
  misc_feature (1)..(588): Ceres Seq. ID no. 12725711
  misc_feature (1)..(588): Ortholog of  Ceres SEQ ID NO 14310639 as cited in SEQ ID NO 53858
  misc_feature (1)..(588): Ortholog of  Ceres SEQ ID NO 14312851 as cited in SEQ ID NO 58364

SEQ ID NO: 94671 - protein, 195 aa, Arabidopsis thaliana; identical to SEQ ID NO: 90915
  peptide (1)..(195): Ceres Seq. ID no. 12725712

SEQ ID NO: 94672 - protein, 192 aa, Arabidopsis thaliana; identical to SEQ ID NO: 90916
  peptide (1)..(192): Ceres Seq. ID no. 12725713

SEQ ID NO: 94673 - protein, 189 aa, Arabidopsis thaliana; identical to SEQ ID NO: 90917
  peptide (1)..(189): Ceres Seq. ID no. 12725714

SEQ ID NO: 94674 - DNA, 1823 bp, Arabidopsis thaliana; identical to SEQ ID NO: 90918
  misc_feature (1)..(1823): Ceres Seq. ID no. 12725715
  misc_feature (1)..(1823): Ortholog of  Ceres SEQ ID NO 15227289 as cited in SEQ ID NO 58851
  misc_feature (1)..(1823): Ortholog of  Ceres SEQ ID NO 13584416 as cited in SEQ ID NO 63441

SEQ ID NO: 94675 - protein, 334 aa, Arabidopsis thaliana; identical to SEQ ID NO: 90919
  peptide (1)..(334): Ceres Seq. ID no. 12725716

SEQ ID NO: 94676 - protein, 330 aa, Arabidopsis thaliana; identical to SEQ ID NO: 90920
  peptide (1)..(330): Ceres Seq. ID no. 12725717

SEQ ID NO: 94677 - protein, 313 aa, Arabidopsis thaliana; identical to SEQ ID NO: 90921
  peptide (1)..(313): Ceres Seq. ID no. 12725718

SEQ ID NO: 94678 - DNA, 2816 bp, Arabidopsis thaliana; identical to SEQ ID NO: 90922
  misc_feature (1)..(2816): Ceres Seq. ID no. 12725735
  misc_feature (1)..(2816): Ortholog of  Ceres SEQ ID NO 15174591 as cited in SEQ ID NO 53383

SEQ ID NO: 94679 - protein, 382 aa, Arabidopsis thaliana; identical to SEQ ID NO: 90923
  peptide (1)..(382): Ceres Seq. ID no. 12725736

SEQ ID NO: 94680 - protein, 380 aa, Arabidopsis thaliana; identical to SEQ ID NO: 90924
  peptide (1)..(380): Ceres Seq. ID no. 12725737

SEQ ID NO: 94681 - protein, 357 aa, Arabidopsis thaliana; identical to SEQ ID NO: 90925
  peptide (1)..(357): Ceres Seq. ID no. 12725738

SEQ ID NO: 94682 - DNA, 669 bp, Arabidopsis thaliana; identical to SEQ ID NO: 90926
  misc_feature (1)..(669): Ceres Seq. ID no. 12725743
  misc_feature (1)..(669): Ortholog of  Ceres SEQ ID NO 14304209 as cited in SEQ ID NO 56460
  misc_feature (1)..(669): Ortholog of  Ceres SEQ ID NO 15177482 as cited in SEQ ID NO 0

SEQ ID NO: 94683 - protein, 222 aa, Arabidopsis thaliana; identical to SEQ ID NO: 90927
  peptide (1)..(222): Ceres Seq. ID no. 12725744

SEQ ID NO: 94684 - protein, 209 aa, Arabidopsis thaliana; identical to SEQ ID NO: 90928
  peptide (1)..(209): Ceres Seq. ID no. 12725745

SEQ ID NO: 94685 - protein, 206 aa, Arabidopsis thaliana; identical to SEQ ID NO: 90929
  peptide (1)..(206): Ceres Seq. ID no. 12725746

SEQ ID NO: 94686 - DNA, 1200 bp, Arabidopsis thaliana; identical to SEQ ID NO: 90930
  misc_feature (1)..(1200): Ceres Seq. ID no. 12725773
  misc_feature (1)..(1200): Ortholog of  Ceres SEQ ID NO 12636774 as cited in SEQ ID NO 372
  misc_feature (1)..(1200): Ortholog of  Ceres SEQ ID NO 14311866 as cited in SEQ ID NO 51178
  misc_feature (1)..(1200): Ortholog of  Ceres SEQ ID NO 12582113 as cited in SEQ ID NO 58349
  misc_feature (1)..(1200): Ortholog of  Ceres SEQ ID NO 15175861 as cited in SEQ ID NO 59381
  misc_feature (1)..(1200): Ortholog of  Ceres SEQ ID NO 12615466 as cited in SEQ ID NO 62761
  misc_feature (1)..(1200): Ortholog of  Ceres SEQ ID NO 13597295 as cited in SEQ ID NO 63743
  misc_feature (1)..(1200): Ortholog of  Ceres SEQ ID NO 12617090 as cited in SEQ ID NO 64005
  misc_feature (1)..(1200): Ortholog of  Ceres SEQ ID NO 13597439 as cited in SEQ ID NO 64081
  misc_feature (1)..(1200): Ortholog of  Ceres SEQ ID NO 13597233 as cited in SEQ ID NO 64370
  misc_feature (1)..(1200): Ortholog of  Ceres SEQ ID NO 13598327 as cited in SEQ ID NO 68040
  misc_feature (1)..(1200): Ortholog of  Ceres SEQ ID NO 13599438 as cited in SEQ ID NO 0

SEQ ID NO: 94687 - protein, 356 aa, Arabidopsis thaliana; identical to SEQ ID NO: 90931
  peptide (1)..(356): Ceres Seq. ID no. 12725774

SEQ ID NO: 94688 - protein, 299 aa, Arabidopsis thaliana; identical to SEQ ID NO: 90932
  peptide (1)..(299): Ceres Seq. ID no. 12725775

SEQ ID NO: 94689 - protein, 290 aa, Arabidopsis thaliana; identical to SEQ ID NO: 90933
  peptide (1)..(290): Ceres Seq. ID no. 12725776

SEQ ID NO: 94690 - DNA, 2571 bp, Arabidopsis thaliana; identical to SEQ ID NO: 90934
  misc_feature (1)..(2571): Ceres Seq. ID no. 12725777
  misc_feature (1)..(2571): Ortholog of  Ceres SEQ ID NO 13593911 as cited in SEQ ID NO 52935

SEQ ID NO: 94691 - protein, 856 aa, Arabidopsis thaliana; identical to SEQ ID NO: 90935
  peptide (1)..(856): Ceres Seq. ID no. 12725778

SEQ ID NO: 94692 - protein, 751 aa, Arabidopsis thaliana; identical to SEQ ID NO: 90936
  peptide (1)..(751): Ceres Seq. ID no. 12725779

SEQ ID NO: 94693 - protein, 747 aa, Arabidopsis thaliana; identical to SEQ ID NO: 90937
  peptide (1)..(747): Ceres Seq. ID no. 12725780

SEQ ID NO: 94694 - DNA, 1080 bp, Arabidopsis thaliana; identical to SEQ ID NO: 90938
  misc_feature (1)..(1080): Ceres Seq. ID no. 12725789
  misc_feature (1)..(1080): Ortholog of  Ceres SEQ ID NO 15171556 as cited in SEQ ID NO 59687
  misc_feature (1)..(1080): Ortholog of  Ceres SEQ ID NO 13659033 as cited in SEQ ID NO 66372
  misc_feature (1)..(1080): Ortholog of  Ceres SEQ ID NO 12625899 as cited in SEQ ID NO 69079

SEQ ID NO: 94695 - protein, 359 aa, Arabidopsis thaliana; identical to SEQ ID NO: 90939
  peptide (1)..(359): Ceres Seq. ID no. 12725790

SEQ ID NO: 94696 - protein, 243 aa, Arabidopsis thaliana; identical to SEQ ID NO: 90940
  peptide (1)..(243): Ceres Seq. ID no. 12725791

SEQ ID NO: 94697 - protein, 236 aa, Arabidopsis thaliana; identical to SEQ ID NO: 90941
  peptide (1)..(236): Ceres Seq. ID no. 12725792

SEQ ID NO: 94698 - DNA, 1368 bp, Arabidopsis thaliana; identical to SEQ ID NO: 90942
  misc_feature (1)..(1368): Ceres Seq. ID no. 12725820
  misc_feature (1)..(1368): Ortholog of  Ceres SEQ ID NO 15227139 as cited in SEQ ID NO 0

SEQ ID NO: 94699 - protein, 455 aa, Arabidopsis thaliana; identical to SEQ ID NO: 90943
  peptide (1)..(455): Ceres Seq. ID no. 12725821

SEQ ID NO: 94700 - protein, 291 aa, Arabidopsis thaliana; identical to SEQ ID NO: 90944
  peptide (1)..(291): Ceres Seq. ID no. 12725822

SEQ ID NO: 94701 - protein, 289 aa, Arabidopsis thaliana; identical to SEQ ID NO: 90945
  peptide (1)..(289): Ceres Seq. ID no. 12725823

SEQ ID NO: 94702 - DNA, 1701 bp, Arabidopsis thaliana; identical to SEQ ID NO: 90946
  misc_feature (1)..(1701): Ceres Seq. ID no. 12725828
  misc_feature (1)..(1701): Ortholog of  Ceres SEQ ID NO 13657677 as cited in SEQ ID NO 66119

SEQ ID NO: 94703 - protein, 566 aa, Arabidopsis thaliana; identical to SEQ ID NO: 90947
  peptide (1)..(566): Ceres Seq. ID no. 12725829

SEQ ID NO: 94704 - protein, 445 aa, Arabidopsis thaliana; identical to SEQ ID NO: 90948
  peptide (1)..(445): Ceres Seq. ID no. 12725830

SEQ ID NO: 94705 - protein, 416 aa, Arabidopsis thaliana; identical to SEQ ID NO: 90949
  peptide (1)..(416): Ceres Seq. ID no. 12725831

SEQ ID NO: 94706 - DNA, 936 bp, Arabidopsis thaliana; identical to SEQ ID NO: 90950
  misc_feature (1)..(936): Ceres Seq. ID no. 12725836
  misc_feature (1)..(936): Ortholog of  Ceres SEQ ID NO 12607540 as cited in SEQ ID NO 55336

SEQ ID NO: 94707 - protein, 311 aa, Arabidopsis thaliana; identical to SEQ ID NO: 90951
  peptide (1)..(311): Ceres Seq. ID no. 12725837

SEQ ID NO: 94708 - protein, 307 aa, Arabidopsis thaliana; identical to SEQ ID NO: 90952
  peptide (1)..(307): Ceres Seq. ID no. 12725838

SEQ ID NO: 94709 - protein, 266 aa, Arabidopsis thaliana; identical to SEQ ID NO: 90953
  peptide (1)..(266): Ceres Seq. ID no. 12725839

SEQ ID NO: 94710 - DNA, 1143 bp, Arabidopsis thaliana; identical to SEQ ID NO: 90954
  misc_feature (1)..(1143): Ceres Seq. ID no. 12725850
  misc_feature (1)..(1143): Ortholog of  Ceres SEQ ID NO 13594037 as cited in SEQ ID NO 55666
  misc_feature (1)..(1143): Ortholog of  Ceres SEQ ID NO 15171501 as cited in SEQ ID NO 58322

SEQ ID NO: 94711 - protein, 380 aa, Arabidopsis thaliana; identical to SEQ ID NO: 90955
  peptide (1)..(380): Ceres Seq. ID no. 12725851

SEQ ID NO: 94712 - protein, 363 aa, Arabidopsis thaliana; identical to SEQ ID NO: 90956
  peptide (1)..(363): Ceres Seq. ID no. 12725852

SEQ ID NO: 94713 - protein, 280 aa, Arabidopsis thaliana; identical to SEQ ID NO: 90957
  peptide (1)..(280): Ceres Seq. ID no. 12725853

SEQ ID NO: 94714 - DNA, 944 bp, Arabidopsis thaliana; identical to SEQ ID NO: 90958
  misc_feature (1)..(944): Ceres Seq. ID no. 12725866
  misc_feature (1)..(944): Ortholog of  Ceres SEQ ID NO 13585433 as cited in SEQ ID NO 65192

SEQ ID NO: 94715 - protein, 158 aa, Arabidopsis thaliana; identical to SEQ ID NO: 90959
  peptide (1)..(158): Ceres Seq. ID no. 12725867

SEQ ID NO: 94716 - protein, 146 aa, Arabidopsis thaliana; identical to SEQ ID NO: 90960
  peptide (1)..(146): Ceres Seq. ID no. 12725868

SEQ ID NO: 94717 - protein, 107 aa, Arabidopsis thaliana; identical to SEQ ID NO: 90961
  peptide (1)..(107): Ceres Seq. ID no. 12725869

SEQ ID NO: 94718 - DNA, 2046 bp, Arabidopsis thaliana; identical to SEQ ID NO: 90962
  misc_feature (1)..(2046): Ceres Seq. ID no. 12725870
  misc_feature (1)..(2046): Ortholog of  Ceres SEQ ID NO 13654989 as cited in SEQ ID NO 63117
  misc_feature (1)..(2046): Ortholog of  Ceres SEQ ID NO 13655640 as cited in SEQ ID NO 63844

SEQ ID NO: 94719 - protein, 681 aa, Arabidopsis thaliana; identical to SEQ ID NO: 90963
  peptide (1)..(681): Ceres Seq. ID no. 12725871

SEQ ID NO: 94720 - protein, 662 aa, Arabidopsis thaliana; identical to SEQ ID NO: 90964
  peptide (1)..(662): Ceres Seq. ID no. 12725872

SEQ ID NO: 94721 - protein, 651 aa, Arabidopsis thaliana; identical to SEQ ID NO: 90965
  peptide (1)..(651): Ceres Seq. ID no. 12725873

SEQ ID NO: 94722 - DNA, 963 bp, Arabidopsis thaliana; identical to SEQ ID NO: 90966
  misc_feature (1)..(963): Ceres Seq. ID no. 12725903
  misc_feature (1)..(963): Ortholog of  Ceres SEQ ID NO 14302306 as cited in SEQ ID NO 62834
  misc_feature (1)..(963): Ortholog of  Ceres SEQ ID NO 14303305 as cited in SEQ ID NO 0

SEQ ID NO: 94723 - protein, 320 aa, Arabidopsis thaliana; identical to SEQ ID NO: 90967
  peptide (1)..(320): Ceres Seq. ID no. 12725904

SEQ ID NO: 94724 - protein, 308 aa, Arabidopsis thaliana; identical to SEQ ID NO: 90968
  peptide (1)..(308): Ceres Seq. ID no. 12725905

SEQ ID NO: 94725 - protein, 259 aa, Arabidopsis thaliana; identical to SEQ ID NO: 90969
  peptide (1)..(259): Ceres Seq. ID no. 12725906

SEQ ID NO: 94726 - DNA, 2723 bp, Arabidopsis thaliana; identical to SEQ ID NO: 90970
  misc_feature (1)..(2723): Ceres Seq. ID no. 12725923
  misc_feature (1)..(2723): Ortholog of  Ceres SEQ ID NO 14304855 as cited in SEQ ID NO 53974

SEQ ID NO: 94727 - protein, 687 aa, Arabidopsis thaliana; identical to SEQ ID NO: 90971
  peptide (1)..(687): Ceres Seq. ID no. 12725924

SEQ ID NO: 94728 - protein, 677 aa, Arabidopsis thaliana; identical to SEQ ID NO: 90972
  peptide (1)..(677): Ceres Seq. ID no. 12725925

SEQ ID NO: 94729 - protein, 496 aa, Arabidopsis thaliana; identical to SEQ ID NO: 90973
  peptide (1)..(496): Ceres Seq. ID no. 12725926

SEQ ID NO: 94730 - DNA, 1593 bp, Arabidopsis thaliana; identical to SEQ ID NO: 90974
  misc_feature (1)..(1593): Ceres Seq. ID no. 12725931
  misc_feature (1)..(1593): Ortholog of  Ceres SEQ ID NO 12586556 as cited in SEQ ID NO 64667

SEQ ID NO: 94731 - protein, 530 aa, Arabidopsis thaliana; identical to SEQ ID NO: 90975
  peptide (1)..(530): Ceres Seq. ID no. 12725932

SEQ ID NO: 94732 - protein, 493 aa, Arabidopsis thaliana; identical to SEQ ID NO: 90976
  peptide (1)..(493): Ceres Seq. ID no. 12725933

SEQ ID NO: 94733 - protein, 447 aa, Arabidopsis thaliana; identical to SEQ ID NO: 90977
  peptide (1)..(447): Ceres Seq. ID no. 12725934

SEQ ID NO: 94734 - DNA, 1455 bp, Arabidopsis thaliana; identical to SEQ ID NO: 90978
  misc_feature (1)..(1455): Ceres Seq. ID no. 12725939
  misc_feature (1)..(1455): Ortholog of  Ceres SEQ ID NO 14312208 as cited in SEQ ID NO 54845
  misc_feature (1)..(1455): Ortholog of  Ceres SEQ ID NO 15171755 as cited in SEQ ID NO 57047
  misc_feature (1)..(1455): Ortholog of  Ceres SEQ ID NO 13597613 as cited in SEQ ID NO 65334
  misc_feature (1)..(1455): Ortholog of  Ceres SEQ ID NO 14303664 as cited in SEQ ID NO 65892
  misc_feature (1)..(1455): Ortholog of  Ceres SEQ ID NO 15178832 as cited in SEQ ID NO 0

SEQ ID NO: 94735 - protein, 396 aa, Arabidopsis thaliana; identical to SEQ ID NO: 90979
  peptide (1)..(396): Ceres Seq. ID no. 12725940

SEQ ID NO: 94736 - protein, 392 aa, Arabidopsis thaliana; identical to SEQ ID NO: 90980
  peptide (1)..(392): Ceres Seq. ID no. 12725941

SEQ ID NO: 94737 - protein, 384 aa, Arabidopsis thaliana; identical to SEQ ID NO: 90981
  peptide (1)..(384): Ceres Seq. ID no. 12725942

SEQ ID NO: 94738 - DNA, 1791 bp, Arabidopsis thaliana; identical to SEQ ID NO: 90982
  misc_feature (1)..(1791): Ceres Seq. ID no. 12725975
  misc_feature (1)..(1791): Ortholog of  Ceres SEQ ID NO 12626078 as cited in SEQ ID NO 69113

SEQ ID NO: 94739 - protein, 596 aa, Arabidopsis thaliana; identical to SEQ ID NO: 90983
  peptide (1)..(596): Ceres Seq. ID no. 12725976

SEQ ID NO: 94740 - protein, 586 aa, Arabidopsis thaliana; identical to SEQ ID NO: 90984
  peptide (1)..(586): Ceres Seq. ID no. 12725977

SEQ ID NO: 94741 - protein, 412 aa, Arabidopsis thaliana; identical to SEQ ID NO: 90985
  peptide (1)..(412): Ceres Seq. ID no. 12725978

SEQ ID NO: 94742 - DNA, 1632 bp, Arabidopsis thaliana; identical to SEQ ID NO: 90986
  misc_feature (1)..(1632): Ceres Seq. ID no. 12725998
  misc_feature (1)..(1632): Ortholog of  Ceres SEQ ID NO 12593464 as cited in SEQ ID NO 69039

SEQ ID NO: 94743 - protein, 442 aa, Arabidopsis thaliana; identical to SEQ ID NO: 90987
  peptide (1)..(442): Ceres Seq. ID no. 12725999

SEQ ID NO: 94744 - protein, 439 aa, Arabidopsis thaliana; identical to SEQ ID NO: 90988
  peptide (1)..(439): Ceres Seq. ID no. 12726000

SEQ ID NO: 94745 - protein, 389 aa, Arabidopsis thaliana; identical to SEQ ID NO: 90989
  peptide (1)..(389): Ceres Seq. ID no. 12726001

SEQ ID NO: 94746 - DNA, 1949 bp, Arabidopsis thaliana; identical to SEQ ID NO: 90990
  misc_feature (1)..(1949): Ceres Seq. ID no. 12726002
  misc_feature (1)..(1949): Ortholog of  Ceres SEQ ID NO 13597375 as cited in SEQ ID NO 63986

SEQ ID NO: 94747 - protein, 572 aa, Arabidopsis thaliana; identical to SEQ ID NO: 90991
  peptide (1)..(572): Ceres Seq. ID no. 12726003

SEQ ID NO: 94748 - protein, 486 aa, Arabidopsis thaliana; identical to SEQ ID NO: 90992
  peptide (1)..(486): Ceres Seq. ID no. 12726004

SEQ ID NO: 94749 - protein, 364 aa, Arabidopsis thaliana; identical to SEQ ID NO: 90993
  peptide (1)..(364): Ceres Seq. ID no. 12726005

SEQ ID NO: 94750 - DNA, 1020 bp, Arabidopsis thaliana; identical to SEQ ID NO: 90994
  misc_feature (1)..(1020): Ceres Seq. ID no. 12726013
  misc_feature (1)..(1020): Ortholog of  Ceres SEQ ID NO 13590307 as cited in SEQ ID NO 67154

SEQ ID NO: 94751 - protein, 339 aa, Arabidopsis thaliana; identical to SEQ ID NO: 90995
  peptide (1)..(339): Ceres Seq. ID no. 12726014

SEQ ID NO: 94752 - protein, 310 aa, Arabidopsis thaliana; identical to SEQ ID NO: 90996
  peptide (1)..(310): Ceres Seq. ID no. 12726015

SEQ ID NO: 94753 - protein, 304 aa, Arabidopsis thaliana; identical to SEQ ID NO: 90997
  peptide (1)..(304): Ceres Seq. ID no. 12726016

SEQ ID NO: 94754 - DNA, 2818 bp, Arabidopsis thaliana; identical to SEQ ID NO: 90998
  misc_feature (1)..(2818): Ceres Seq. ID no. 12726025
  misc_feature (1)..(2818): Ortholog of  Ceres SEQ ID NO 13654989 as cited in SEQ ID NO 63117
  misc_feature (1)..(2818): Ortholog of  Ceres SEQ ID NO 13657138 as cited in SEQ ID NO 65923
  misc_feature (1)..(2818): Ortholog of  Ceres SEQ ID NO 13584744 as cited in SEQ ID NO 69137

SEQ ID NO: 94755 - protein, 669 aa, Arabidopsis thaliana; identical to SEQ ID NO: 90999
  peptide (1)..(669): Ceres Seq. ID no. 12726026

SEQ ID NO: 94756 - protein, 652 aa, Arabidopsis thaliana; identical to SEQ ID NO: 91000
  peptide (1)..(652): Ceres Seq. ID no. 12726027

SEQ ID NO: 94757 - protein, 573 aa, Arabidopsis thaliana; identical to SEQ ID NO: 91001
  peptide (1)..(573): Ceres Seq. ID no. 12726028

SEQ ID NO: 94758 - DNA, 894 bp, Arabidopsis thaliana; identical to SEQ ID NO: 91002
  misc_feature (1)..(894): Ceres Seq. ID no. 12726064
  misc_feature (1)..(894): Ortholog of  Ceres SEQ ID NO 14303493 as cited in SEQ ID NO 54484
  misc_feature (1)..(894): Ortholog of  Ceres SEQ ID NO 14312258 as cited in SEQ ID NO 57251

SEQ ID NO: 94759 - protein, 297 aa, Arabidopsis thaliana; identical to SEQ ID NO: 91003
  peptide (1)..(297): Ceres Seq. ID no. 12726065

SEQ ID NO: 94760 - protein, 295 aa, Arabidopsis thaliana; identical to SEQ ID NO: 91004
  peptide (1)..(295): Ceres Seq. ID no. 12726066

SEQ ID NO: 94761 - protein, 205 aa, Arabidopsis thaliana; identical to SEQ ID NO: 91005
  peptide (1)..(205): Ceres Seq. ID no. 12726067

SEQ ID NO: 94762 - DNA, 942 bp, Arabidopsis thaliana; identical to SEQ ID NO: 91006
  misc_feature (1)..(942): Ceres Seq. ID no. 12726068
  misc_feature (1)..(942): Ortholog of  Ceres SEQ ID NO 15178083 as cited in SEQ ID NO 56185

SEQ ID NO: 94763 - protein, 186 aa, Arabidopsis thaliana; identical to SEQ ID NO: 91007
  peptide (1)..(186): Ceres Seq. ID no. 12726069

SEQ ID NO: 94764 - protein, 182 aa, Arabidopsis thaliana; identical to SEQ ID NO: 91008
  peptide (1)..(182): Ceres Seq. ID no. 12726070

SEQ ID NO: 94765 - protein, 177 aa, Arabidopsis thaliana; identical to SEQ ID NO: 91009
  peptide (1)..(177): Ceres Seq. ID no. 12726071

SEQ ID NO: 94766 - DNA, 985 bp, Arabidopsis thaliana; identical to SEQ ID NO: 91010
  misc_feature (1)..(985): Ceres Seq. ID no. 12726116
  misc_feature (1)..(985): Ortholog of  Ceres SEQ ID NO 13663517 as cited in SEQ ID NO 66850

SEQ ID NO: 94767 - protein, 253 aa, Arabidopsis thaliana; identical to SEQ ID NO: 91011
  peptide (1)..(253): Ceres Seq. ID no. 12726117

SEQ ID NO: 94768 - protein, 250 aa, Arabidopsis thaliana; identical to SEQ ID NO: 91012
  peptide (1)..(250): Ceres Seq. ID no. 12726118

SEQ ID NO: 94769 - protein, 192 aa, Arabidopsis thaliana; identical to SEQ ID NO: 78253
  peptide (1)..(192): Ceres Seq. ID no. 12726119

SEQ ID NO: 94770 - DNA, 1533 bp, Arabidopsis thaliana; identical to SEQ ID NO: 91014
  misc_feature (1)..(1533): Ceres Seq. ID no. 12726138
  misc_feature (1)..(1533): Ortholog of  Ceres SEQ ID NO 14315146 as cited in SEQ ID NO 52929
  misc_feature (1)..(1533): Ortholog of  Ceres SEQ ID NO 14302263 as cited in SEQ ID NO 64701
  misc_feature (1)..(1533): Ortholog of  Ceres SEQ ID NO 13584538 as cited in SEQ ID NO 64739
  misc_feature (1)..(1533): Ortholog of  Ceres SEQ ID NO 15169643 as cited in SEQ ID NO 64826
  misc_feature (1)..(1533): Ortholog of  Ceres SEQ ID NO 15169647 as cited in SEQ ID NO 64930

SEQ ID NO: 94771 - protein, 510 aa, Arabidopsis thaliana; identical to SEQ ID NO: 91015
  peptide (1)..(510): Ceres Seq. ID no. 12726139

SEQ ID NO: 94772 - protein, 474 aa, Arabidopsis thaliana; identical to SEQ ID NO: 91016
  peptide (1)..(474): Ceres Seq. ID no. 12726140

SEQ ID NO: 94773 - protein, 465 aa, Arabidopsis thaliana; identical to SEQ ID NO: 91017
  peptide (1)..(465): Ceres Seq. ID no. 12726141

SEQ ID NO: 94774 - DNA, 420 bp, Arabidopsis thaliana; identical to SEQ ID NO: 91018
  misc_feature (1)..(420): Ceres Seq. ID no. 12726142
  misc_feature (1)..(420): Ortholog of  Ceres SEQ ID NO 12584421 as cited in SEQ ID NO 68035

SEQ ID NO: 94775 - protein, 139 aa, Arabidopsis thaliana; identical to SEQ ID NO: 91019
  peptide (1)..(139): Ceres Seq. ID no. 12726143

SEQ ID NO: 94776 - protein, 70 aa, Arabidopsis thaliana; identical to SEQ ID NO: 91020
  peptide (1)..(70): Ceres Seq. ID no. 12726144

SEQ ID NO: 94777 - DNA, 2063 bp, Arabidopsis thaliana; identical to SEQ ID NO: 91021
  misc_feature (1)..(2063): Ceres Seq. ID no. 12726145
  misc_feature (1)..(2063): Ortholog of  Ceres SEQ ID NO 15179672 as cited in SEQ ID NO 0

SEQ ID NO: 94778 - protein, 614 aa, Arabidopsis thaliana; identical to SEQ ID NO: 91022
  peptide (1)..(614): Ceres Seq. ID no. 12726146

SEQ ID NO: 94779 - protein, 579 aa, Arabidopsis thaliana; identical to SEQ ID NO: 91023
  peptide (1)..(579): Ceres Seq. ID no. 12726147

SEQ ID NO: 94780 - protein, 476 aa, Arabidopsis thaliana; identical to SEQ ID NO: 91024
  peptide (1)..(476): Ceres Seq. ID no. 12726148

SEQ ID NO: 94781 - DNA, 2665 bp, Arabidopsis thaliana; identical to SEQ ID NO: 91025
  misc_feature (1)..(2665): Ceres Seq. ID no. 12726173
  misc_feature (1)..(2665): Ortholog of  Ceres SEQ ID NO 13582534 as cited in SEQ ID NO 57409

SEQ ID NO: 94782 - protein, 847 aa, Arabidopsis thaliana; identical to SEQ ID NO: 91026
  peptide (1)..(847): Ceres Seq. ID no. 12726174

SEQ ID NO: 94783 - protein, 820 aa, Arabidopsis thaliana; identical to SEQ ID NO: 77556
  peptide (1)..(820): Ceres Seq. ID no. 12726175

SEQ ID NO: 94784 - protein, 666 aa, Arabidopsis thaliana; identical to SEQ ID NO: 85276
  peptide (1)..(666): Ceres Seq. ID no. 12726176

SEQ ID NO: 94785 - DNA, 2827 bp, Arabidopsis thaliana; identical to SEQ ID NO: 91029
  misc_feature (1)..(2827): Ceres Seq. ID no. 12726177
  misc_feature (1)..(2827): Ortholog of  Ceres SEQ ID NO 13584744 as cited in SEQ ID NO 69137

SEQ ID NO: 94786 - protein, 860 aa, Arabidopsis thaliana; identical to SEQ ID NO: 46832
  peptide (1)..(860): Ceres Seq. ID no. 12726178

SEQ ID NO: 94787 - protein, 768 aa, Arabidopsis thaliana; identical to SEQ ID NO: 46833
  peptide (1)..(768): Ceres Seq. ID no. 12726179

SEQ ID NO: 94788 - protein, 750 aa, Arabidopsis thaliana; identical to SEQ ID NO: 46834
  peptide (1)..(750): Ceres Seq. ID no. 12726180

SEQ ID NO: 94789 - DNA, 562 bp, Arabidopsis thaliana; identical to SEQ ID NO: 91033
  misc_feature (1)..(562): Ceres Seq. ID no. 12726188
  misc_feature (1)..(562): Ortholog of  Ceres SEQ ID NO 13638769 as cited in SEQ ID NO 51773
  misc_feature (1)..(562): Ortholog of  Ceres SEQ ID NO 12583723 as cited in SEQ ID NO 58297
  misc_feature (1)..(562): Ortholog of  Ceres SEQ ID NO 12623263 as cited in SEQ ID NO 60988
  misc_feature (1)..(562): Ortholog of  Ceres SEQ ID NO 15225568 as cited in SEQ ID NO 61512
  misc_feature (1)..(562): Ortholog of  Ceres SEQ ID NO 13664236 as cited in SEQ ID NO 66530
  misc_feature (1)..(562): Ortholog of  Ceres SEQ ID NO 13590249 as cited in SEQ ID NO 68385
  misc_feature (1)..(562): Ortholog of  Ceres SEQ ID NO 12635807 as cited in SEQ ID NO 0
  misc_feature (1)..(562): Ortholog of  Ceres SEQ ID NO 15179245 as cited in SEQ ID NO 0

SEQ ID NO: 94790 - protein, 148 aa, Arabidopsis thaliana; identical to SEQ ID NO: 34708
  peptide (1)..(148): Ceres Seq. ID no. 12726189

SEQ ID NO: 94791 - protein, 97 aa, Arabidopsis thaliana; identical to SEQ ID NO: 34709
  peptide (1)..(97): Ceres Seq. ID no. 12726190

SEQ ID NO: 94792 - protein, 81 aa, Arabidopsis thaliana; identical to SEQ ID NO: 91036
  peptide (1)..(81): Ceres Seq. ID no. 12726191

SEQ ID NO: 94793 - DNA, 871 bp, Arabidopsis thaliana; identical to SEQ ID NO: 91037
  misc_feature (1)..(871): Ceres Seq. ID no. 12726254
  misc_feature (1)..(871): Ortholog of  Ceres SEQ ID NO 13597333 as cited in SEQ ID NO 63974
  misc_feature (1)..(871): Ortholog of  Ceres SEQ ID NO 13599307 as cited in SEQ ID NO 0

SEQ ID NO: 94794 - protein, 279 aa, Arabidopsis thaliana; identical to SEQ ID NO: 26212
  peptide (1)..(279): Ceres Seq. ID no. 12726255

SEQ ID NO: 94795 - protein, 213 aa, Arabidopsis thaliana; identical to SEQ ID NO: 26213
  peptide (1)..(213): Ceres Seq. ID no. 12726256

SEQ ID NO: 94796 - protein, 212 aa, Arabidopsis thaliana; identical to SEQ ID NO: 27066
  peptide (1)..(212): Ceres Seq. ID no. 12726257

SEQ ID NO: 94797 - DNA, 654 bp, Arabidopsis thaliana; identical to SEQ ID NO: 91041
  misc_feature (1)..(654): Ceres Seq. ID no. 12726274
  misc_feature (1)..(654): Ortholog of  Ceres SEQ ID NO 12625452 as cited in SEQ ID NO 63642

SEQ ID NO: 94798 - protein, 217 aa, Arabidopsis thaliana; identical to SEQ ID NO: 91042
  peptide (1)..(217): Ceres Seq. ID no. 12726275

SEQ ID NO: 94799 - protein, 216 aa, Arabidopsis thaliana; identical to SEQ ID NO: 91043
  peptide (1)..(216): Ceres Seq. ID no. 12726276

SEQ ID NO: 94800 - protein, 170 aa, Arabidopsis thaliana; identical to SEQ ID NO: 91044
  peptide (1)..(170): Ceres Seq. ID no. 12726277

SEQ ID NO: 94801 - DNA, 1236 bp, Arabidopsis thaliana; identical to SEQ ID NO: 91045
  misc_feature (1)..(1236): Ceres Seq. ID no. 12726282
  misc_feature (1)..(1236): Ortholog of  Ceres SEQ ID NO 14315223 as cited in SEQ ID NO 52527
  misc_feature (1)..(1236): Ortholog of  Ceres SEQ ID NO 14307085 as cited in SEQ ID NO 54749

SEQ ID NO: 94802 - protein, 374 aa, Arabidopsis thaliana; identical to SEQ ID NO: 91046
  peptide (1)..(374): Ceres Seq. ID no. 12726283

SEQ ID NO: 94803 - protein, 245 aa, Arabidopsis thaliana; identical to SEQ ID NO: 91047
  peptide (1)..(245): Ceres Seq. ID no. 12726284

SEQ ID NO: 94804 - protein, 241 aa, Arabidopsis thaliana; identical to SEQ ID NO: 91048
  peptide (1)..(241): Ceres Seq. ID no. 12726285

SEQ ID NO: 94805 - DNA, 1836 bp, Arabidopsis thaliana; identical to SEQ ID NO: 91049
  misc_feature (1)..(1836): Ceres Seq. ID no. 12726302
  misc_feature (1)..(1836): Ortholog of  Ceres SEQ ID NO 14307682 as cited in SEQ ID NO 54529

SEQ ID NO: 94806 - protein, 584 aa, Arabidopsis thaliana; identical to SEQ ID NO: 91050
  peptide (1)..(584): Ceres Seq. ID no. 12726303

SEQ ID NO: 94807 - protein, 569 aa, Arabidopsis thaliana; identical to SEQ ID NO: 91051
  peptide (1)..(569): Ceres Seq. ID no. 12726304

SEQ ID NO: 94808 - protein, 481 aa, Arabidopsis thaliana; identical to SEQ ID NO: 91052
  peptide (1)..(481): Ceres Seq. ID no. 12726305

SEQ ID NO: 94809 - DNA, 1188 bp, Arabidopsis thaliana; identical to SEQ ID NO: 91053
  misc_feature (1)..(1188): Ceres Seq. ID no. 12726306
  misc_feature (1)..(1188): Ortholog of  Ceres SEQ ID NO 13596189 as cited in SEQ ID NO 68452

SEQ ID NO: 94810 - protein, 395 aa, Arabidopsis thaliana; identical to SEQ ID NO: 91054
  peptide (1)..(395): Ceres Seq. ID no. 12726307

SEQ ID NO: 94811 - protein, 384 aa, Arabidopsis thaliana; identical to SEQ ID NO: 91055
  peptide (1)..(384): Ceres Seq. ID no. 12726308

SEQ ID NO: 94812 - protein, 340 aa, Arabidopsis thaliana; identical to SEQ ID NO: 91056
  peptide (1)..(340): Ceres Seq. ID no. 12726309

SEQ ID NO: 94813 - DNA, 366 bp, Arabidopsis thaliana; identical to SEQ ID NO: 91057
  misc_feature (1)..(366): Ceres Seq. ID no. 12726322
  misc_feature (1)..(366): Ortholog of  Ceres SEQ ID NO 15177004 as cited in SEQ ID NO 57554

SEQ ID NO: 94814 - protein, 121 aa, Arabidopsis thaliana; identical to SEQ ID NO: 91058
  peptide (1)..(121): Ceres Seq. ID no. 12726323

SEQ ID NO: 94815 - protein, 105 aa, Arabidopsis thaliana; identical to SEQ ID NO: 91059
  peptide (1)..(105): Ceres Seq. ID no. 12726324

SEQ ID NO: 94816 - protein, 74 aa, Arabidopsis thaliana; identical to SEQ ID NO: 91060
  peptide (1)..(74): Ceres Seq. ID no. 12726325

SEQ ID NO: 94817 - DNA, 978 bp, Arabidopsis thaliana; identical to SEQ ID NO: 91061
  misc_feature (1)..(978): Ceres Seq. ID no. 12726330
  misc_feature (1)..(978): Ortholog of  Ceres SEQ ID NO 15226269 as cited in SEQ ID NO 64009

SEQ ID NO: 94818 - protein, 325 aa, Arabidopsis thaliana; identical to SEQ ID NO: 91062
  peptide (1)..(325): Ceres Seq. ID no. 12726331

SEQ ID NO: 94819 - protein, 240 aa, Arabidopsis thaliana; identical to SEQ ID NO: 91063
  peptide (1)..(240): Ceres Seq. ID no. 12726332

SEQ ID NO: 94820 - protein, 239 aa, Arabidopsis thaliana; identical to SEQ ID NO: 91064
  peptide (1)..(239): Ceres Seq. ID no. 12726333

SEQ ID NO: 94821 - DNA, 1776 bp, Arabidopsis thaliana; identical to SEQ ID NO: 91065
  misc_feature (1)..(1776): Ceres Seq. ID no. 12726334
  misc_feature (1)..(1776): Ortholog of  Ceres SEQ ID NO 14312989 as cited in SEQ ID NO 59121
  misc_feature (1)..(1776): Ortholog of  Ceres SEQ ID NO 12586556 as cited in SEQ ID NO 64667
  misc_feature (1)..(1776): Ortholog of  Ceres SEQ ID NO 13660894 as cited in SEQ ID NO 67475

SEQ ID NO: 94822 - protein, 591 aa, Arabidopsis thaliana; identical to SEQ ID NO: 91066
  peptide (1)..(591): Ceres Seq. ID no. 12726335

SEQ ID NO: 94823 - protein, 509 aa, Arabidopsis thaliana; identical to SEQ ID NO: 91067
  peptide (1)..(509): Ceres Seq. ID no. 12726336

SEQ ID NO: 94824 - protein, 441 aa, Arabidopsis thaliana; identical to SEQ ID NO: 91068
  peptide (1)..(441): Ceres Seq. ID no. 12726337

SEQ ID NO: 94825 - DNA, 3316 bp, Arabidopsis thaliana; identical to SEQ ID NO: 91069
  misc_feature (1)..(3316): Ceres Seq. ID no. 12726341
  misc_feature (1)..(3316): Ortholog of  Ceres SEQ ID NO 13656662 as cited in SEQ ID NO 65594

SEQ ID NO: 94826 - protein, 1010 aa, Arabidopsis thaliana; identical to SEQ ID NO: 91070
  peptide (1)..(1010): Ceres Seq. ID no. 12726342

SEQ ID NO: 94827 - protein, 998 aa, Arabidopsis thaliana; identical to SEQ ID NO: 91071
  peptide (1)..(998): Ceres Seq. ID no. 12726343

SEQ ID NO: 94828 - protein, 890 aa, Arabidopsis thaliana; identical to SEQ ID NO: 91072
  peptide (1)..(890): Ceres Seq. ID no. 12726344

SEQ ID NO: 94829 - DNA, 3312 bp, Arabidopsis thaliana; identical to SEQ ID NO: 91073
  misc_feature (1)..(3312): Ceres Seq. ID no. 12726345
  misc_feature (1)..(3312): Ortholog of  Ceres SEQ ID NO 13656662 as cited in SEQ ID NO 65594

SEQ ID NO: 94830 - protein, 1011 aa, Arabidopsis thaliana; identical to SEQ ID NO: 91074
  peptide (1)..(1011): Ceres Seq. ID no. 12726346

SEQ ID NO: 94831 - protein, 891 aa, Arabidopsis thaliana; identical to SEQ ID NO: 91075
  peptide (1)..(891): Ceres Seq. ID no. 12726347

SEQ ID NO: 94832 - protein, 800 aa, Arabidopsis thaliana; identical to SEQ ID NO: 91076
  peptide (1)..(800): Ceres Seq. ID no. 12726348

SEQ ID NO: 94833 - DNA, 1754 bp, Arabidopsis thaliana; identical to SEQ ID NO: 91077
  misc_feature (1)..(1754): Ceres Seq. ID no. 12726349
  misc_feature (1)..(1754): Ortholog of  Ceres SEQ ID NO 13654285 as cited in SEQ ID NO 68661

SEQ ID NO: 94834 - protein, 501 aa, Arabidopsis thaliana; identical to SEQ ID NO: 91078
  peptide (1)..(501): Ceres Seq. ID no. 12726350

SEQ ID NO: 94835 - protein, 489 aa, Arabidopsis thaliana; identical to SEQ ID NO: 91079
  peptide (1)..(489): Ceres Seq. ID no. 12726351

SEQ ID NO: 94836 - protein, 477 aa, Arabidopsis thaliana; identical to SEQ ID NO: 91080
  peptide (1)..(477): Ceres Seq. ID no. 12726352

SEQ ID NO: 94837 - DNA, 2121 bp, Arabidopsis thaliana; identical to SEQ ID NO: 91081
  misc_feature (1)..(2121): Ceres Seq. ID no. 12726393
  misc_feature (1)..(2121): Ortholog of  Ceres SEQ ID NO 12586556 as cited in SEQ ID NO 64667
  misc_feature (1)..(2121): Ortholog of  Ceres SEQ ID NO 13660894 as cited in SEQ ID NO 67475

SEQ ID NO: 94838 - protein, 706 aa, Arabidopsis thaliana; identical to SEQ ID NO: 91082
  peptide (1)..(706): Ceres Seq. ID no. 12726394

SEQ ID NO: 94839 - protein, 669 aa, Arabidopsis thaliana; identical to SEQ ID NO: 91083
  peptide (1)..(669): Ceres Seq. ID no. 12726395

SEQ ID NO: 94840 - protein, 641 aa, Arabidopsis thaliana; identical to SEQ ID NO: 91084
  peptide (1)..(641): Ceres Seq. ID no. 12726396

SEQ ID NO: 94841 - DNA, 1470 bp, Arabidopsis thaliana; identical to SEQ ID NO: 91085
  misc_feature (1)..(1470): Ceres Seq. ID no. 12726436
  misc_feature (1)..(1470): Ortholog of  Ceres SEQ ID NO 13594209 as cited in SEQ ID NO 59089
  misc_feature (1)..(1470): Ortholog of  Ceres SEQ ID NO 14307995 as cited in SEQ ID NO 63970
  misc_feature (1)..(1470): Ortholog of  Ceres SEQ ID NO 14302228 as cited in SEQ ID NO 65061
  misc_feature (1)..(1470): Ortholog of  Ceres SEQ ID NO 15176091 as cited in SEQ ID NO 65733
  misc_feature (1)..(1470): Ortholog of  Ceres SEQ ID NO 15169585 as cited in SEQ ID NO 66076
  misc_feature (1)..(1470): Ortholog of  Ceres SEQ ID NO 13502874 as cited in SEQ ID NO 66298
  misc_feature (1)..(1470): Ortholog of  Ceres SEQ ID NO 12614124 as cited in SEQ ID NO 68392
  misc_feature (1)..(1470): Ortholog of  Ceres SEQ ID NO 15176087 as cited in SEQ ID NO 68692

SEQ ID NO: 94842 - protein, 489 aa, Arabidopsis thaliana; identical to SEQ ID NO: 91086
  peptide (1)..(489): Ceres Seq. ID no. 12726437

SEQ ID NO: 94843 - protein, 488 aa, Arabidopsis thaliana; identical to SEQ ID NO: 91087
  peptide (1)..(488): Ceres Seq. ID no. 12726438

SEQ ID NO: 94844 - protein, 486 aa, Arabidopsis thaliana; identical to SEQ ID NO: 91088
  peptide (1)..(486): Ceres Seq. ID no. 12726439

SEQ ID NO: 94845 - DNA, 1461 bp, Arabidopsis thaliana; identical to SEQ ID NO: 91089
  misc_feature (1)..(1461): Ceres Seq. ID no. 12726440
  misc_feature (1)..(1461): Ortholog of  Ceres SEQ ID NO 13594209 as cited in SEQ ID NO 59089
  misc_feature (1)..(1461): Ortholog of  Ceres SEQ ID NO 14307995 as cited in SEQ ID NO 63970
  misc_feature (1)..(1461): Ortholog of  Ceres SEQ ID NO 14302228 as cited in SEQ ID NO 65061
  misc_feature (1)..(1461): Ortholog of  Ceres SEQ ID NO 15169585 as cited in SEQ ID NO 66076
  misc_feature (1)..(1461): Ortholog of  Ceres SEQ ID NO 13502874 as cited in SEQ ID NO 66298
  misc_feature (1)..(1461): Ortholog of  Ceres SEQ ID NO 12614124 as cited in SEQ ID NO 68392
  misc_feature (1)..(1461): Ortholog of  Ceres SEQ ID NO 15176087 as cited in SEQ ID NO 68692

SEQ ID NO: 94846 - protein, 486 aa, Arabidopsis thaliana; identical to SEQ ID NO: 91090
  peptide (1)..(486): Ceres Seq. ID no. 12726441

SEQ ID NO: 94847 - protein, 485 aa, Arabidopsis thaliana; identical to SEQ ID NO: 91091
  peptide (1)..(485): Ceres Seq. ID no. 12726442

SEQ ID NO: 94848 - protein, 484 aa, Arabidopsis thaliana; identical to SEQ ID NO: 91092
  peptide (1)..(484): Ceres Seq. ID no. 12726443

SEQ ID NO: 94849 - DNA, 1263 bp, Arabidopsis thaliana; identical to SEQ ID NO: 91093
  misc_feature (1)..(1263): Ceres Seq. ID no. 12726444
  misc_feature (1)..(1263): Ortholog of  Ceres SEQ ID NO 13594209 as cited in SEQ ID NO 59089
  misc_feature (1)..(1263): Ortholog of  Ceres SEQ ID NO 13502874 as cited in SEQ ID NO 66298
  misc_feature (1)..(1263): Ortholog of  Ceres SEQ ID NO 12614124 as cited in SEQ ID NO 68392

SEQ ID NO: 94850 - protein, 420 aa, Arabidopsis thaliana; identical to SEQ ID NO: 86699
  peptide (1)..(420): Ceres Seq. ID no. 12726445

SEQ ID NO: 94851 - protein, 372 aa, Arabidopsis thaliana; identical to SEQ ID NO: 86700
  peptide (1)..(372): Ceres Seq. ID no. 12726446

SEQ ID NO: 94852 - protein, 360 aa, Arabidopsis thaliana; identical to SEQ ID NO: 91096
  peptide (1)..(360): Ceres Seq. ID no. 12726447

SEQ ID NO: 94853 - DNA, 1605 bp, Arabidopsis thaliana; identical to SEQ ID NO: 91097
  misc_feature (1)..(1605): Ceres Seq. ID no. 12726448
  misc_feature (1)..(1605): Ortholog of  Ceres SEQ ID NO 13594209 as cited in SEQ ID NO 59089
  misc_feature (1)..(1605): Ortholog of  Ceres SEQ ID NO 14307995 as cited in SEQ ID NO 63970
  misc_feature (1)..(1605): Ortholog of  Ceres SEQ ID NO 14302228 as cited in SEQ ID NO 65061
  misc_feature (1)..(1605): Ortholog of  Ceres SEQ ID NO 15176091 as cited in SEQ ID NO 65733
  misc_feature (1)..(1605): Ortholog of  Ceres SEQ ID NO 15169585 as cited in SEQ ID NO 66076
  misc_feature (1)..(1605): Ortholog of  Ceres SEQ ID NO 13502874 as cited in SEQ ID NO 66298
  misc_feature (1)..(1605): Ortholog of  Ceres SEQ ID NO 12614124 as cited in SEQ ID NO 68392
  misc_feature (1)..(1605): Ortholog of  Ceres SEQ ID NO 15176087 as cited in SEQ ID NO 68692

SEQ ID NO: 94854 - protein, 490 aa, Arabidopsis thaliana; identical to SEQ ID NO: 91098
  peptide (1)..(490): Ceres Seq. ID no. 12726449

SEQ ID NO: 94855 - protein, 487 aa, Arabidopsis thaliana; identical to SEQ ID NO: 91099
  peptide (1)..(487): Ceres Seq. ID no. 12726450

SEQ ID NO: 94856 - protein, 424 aa, Arabidopsis thaliana; identical to SEQ ID NO: 91100
  peptide (1)..(424): Ceres Seq. ID no. 12726451

SEQ ID NO: 94857 - DNA, 693 bp, Arabidopsis thaliana; identical to SEQ ID NO: 91101
  misc_feature (1)..(693): Ceres Seq. ID no. 12726452
  misc_feature (1)..(693): Ortholog of  Ceres SEQ ID NO 12623816 as cited in SEQ ID NO 61298

SEQ ID NO: 94858 - protein, 230 aa, Arabidopsis thaliana; identical to SEQ ID NO: 91102
  peptide (1)..(230): Ceres Seq. ID no. 12726453

SEQ ID NO: 94859 - protein, 215 aa, Arabidopsis thaliana; identical to SEQ ID NO: 91103
  peptide (1)..(215): Ceres Seq. ID no. 12726454

SEQ ID NO: 94860 - protein, 196 aa, Arabidopsis thaliana; identical to SEQ ID NO: 91104
  peptide (1)..(196): Ceres Seq. ID no. 12726455

SEQ ID NO: 94861 - DNA, 1056 bp, Arabidopsis thaliana; identical to SEQ ID NO: 91105
  misc_feature (1)..(1056): Ceres Seq. ID no. 12726456
  misc_feature (1)..(1056): Ortholog of  Ceres SEQ ID NO 13648081 as cited in SEQ ID NO 165
  misc_feature (1)..(1056): Ortholog of  Ceres SEQ ID NO 15224803 as cited in SEQ ID NO 56572
  misc_feature (1)..(1056): Ortholog of  Ceres SEQ ID NO 13502952 as cited in SEQ ID NO 62271
  misc_feature (1)..(1056): Ortholog of  Ceres SEQ ID NO 13596000 as cited in SEQ ID NO 68188

SEQ ID NO: 94862 - protein, 351 aa, Arabidopsis thaliana; identical to SEQ ID NO: 91106
  peptide (1)..(351): Ceres Seq. ID no. 12726457

SEQ ID NO: 94863 - protein, 286 aa, Arabidopsis thaliana; identical to SEQ ID NO: 91107
  peptide (1)..(286): Ceres Seq. ID no. 12726458

SEQ ID NO: 94864 - protein, 245 aa, Arabidopsis thaliana; identical to SEQ ID NO: 91108
  peptide (1)..(245): Ceres Seq. ID no. 12726459

SEQ ID NO: 94865 - DNA, 4065 bp, Arabidopsis thaliana; identical to SEQ ID NO: 91109
  misc_feature (1)..(4065): Ceres Seq. ID no. 12726468
  misc_feature (1)..(4065): Ortholog of  Ceres SEQ ID NO 13597129 as cited in SEQ ID NO 64175

SEQ ID NO: 94866 - protein, 1354 aa, Arabidopsis thaliana; identical to SEQ ID NO: 91110
  peptide (1)..(1354): Ceres Seq. ID no. 12726469

SEQ ID NO: 94867 - protein, 1179 aa, Arabidopsis thaliana; identical to SEQ ID NO: 91111
  peptide (1)..(1179): Ceres Seq. ID no. 12726470

SEQ ID NO: 94868 - protein, 1147 aa, Arabidopsis thaliana; identical to SEQ ID NO: 91112
  peptide (1)..(1147): Ceres Seq. ID no. 12726471

SEQ ID NO: 94869 - DNA, 1521 bp, Arabidopsis thaliana; identical to SEQ ID NO: 91113
  misc_feature (1)..(1521): Ceres Seq. ID no. 12726480
  misc_feature (1)..(1521): Ortholog of  Ceres SEQ ID NO 15169603 as cited in SEQ ID NO 65772
  misc_feature (1)..(1521): Ortholog of  Ceres SEQ ID NO 14308003 as cited in SEQ ID NO 65919
  misc_feature (1)..(1521): Ortholog of  Ceres SEQ ID NO 14303087 as cited in SEQ ID NO 66569

SEQ ID NO: 94870 - protein, 506 aa, Arabidopsis thaliana; identical to SEQ ID NO: 91114
  peptide (1)..(506): Ceres Seq. ID no. 12726481

SEQ ID NO: 94871 - DNA, 2549 bp, Arabidopsis thaliana; identical to SEQ ID NO: 91115
  misc_feature (1)..(2549): Ceres Seq. ID no. 12726490
  misc_feature (1)..(2549): Ortholog of  Ceres SEQ ID NO 14304565 as cited in SEQ ID NO 53297
  misc_feature (1)..(2549): Ortholog of  Ceres SEQ ID NO 15225368 as cited in SEQ ID NO 58345
  misc_feature (1)..(2549): Ortholog of  Ceres SEQ ID NO 15172170 as cited in SEQ ID NO 58957
  misc_feature (1)..(2549): Ortholog of  Ceres SEQ ID NO 13654989 as cited in SEQ ID NO 63117
  misc_feature (1)..(2549): Ortholog of  Ceres SEQ ID NO 13584744 as cited in SEQ ID NO 69137

SEQ ID NO: 94872 - protein, 769 aa, Arabidopsis thaliana; identical to SEQ ID NO: 91116
  peptide (1)..(769): Ceres Seq. ID no. 12726491

SEQ ID NO: 94873 - protein, 691 aa, Arabidopsis thaliana; identical to SEQ ID NO: 91117
  peptide (1)..(691): Ceres Seq. ID no. 12726492

SEQ ID NO: 94874 - protein, 655 aa, Arabidopsis thaliana; identical to SEQ ID NO: 91118
  peptide (1)..(655): Ceres Seq. ID no. 12726493

SEQ ID NO: 94875 - DNA, 1988 bp, Arabidopsis thaliana; identical to SEQ ID NO: 91119
  misc_feature (1)..(1988): Ceres Seq. ID no. 12726505
  misc_feature (1)..(1988): Ortholog of  Ceres SEQ ID NO 13597407 as cited in SEQ ID NO 64106

SEQ ID NO: 94876 - protein, 363 aa, Arabidopsis thaliana; identical to SEQ ID NO: 88973
  peptide (1)..(363): Ceres Seq. ID no. 12726506

SEQ ID NO: 94877 - protein, 349 aa, Arabidopsis thaliana; identical to SEQ ID NO: 88974
  peptide (1)..(349): Ceres Seq. ID no. 12726507

SEQ ID NO: 94878 - protein, 347 aa, Arabidopsis thaliana; identical to SEQ ID NO: 91122
  peptide (1)..(347): Ceres Seq. ID no. 12726508

SEQ ID NO: 94879 - DNA, 1920 bp, Arabidopsis thaliana; identical to SEQ ID NO: 91123
  misc_feature (1)..(1920): Ceres Seq. ID no. 12726542
  misc_feature (1)..(1920): Ortholog of  Ceres SEQ ID NO 13639663 as cited in SEQ ID NO 57850

SEQ ID NO: 94880 - protein, 525 aa, Arabidopsis thaliana; identical to SEQ ID NO: 91124
  peptide (1)..(525): Ceres Seq. ID no. 12726543

SEQ ID NO: 94881 - protein, 500 aa, Arabidopsis thaliana; identical to SEQ ID NO: 91125
  peptide (1)..(500): Ceres Seq. ID no. 12726544

SEQ ID NO: 94882 - protein, 331 aa, Arabidopsis thaliana; identical to SEQ ID NO: 91126
  peptide (1)..(331): Ceres Seq. ID no. 12726545

SEQ ID NO: 94883 - DNA, 1113 bp, Arabidopsis thaliana; identical to SEQ ID NO: 91127
  misc_feature (1)..(1113): Ceres Seq. ID no. 12726564
  misc_feature (1)..(1113): Ortholog of  Ceres SEQ ID NO 13598741 as cited in SEQ ID NO 62749
  misc_feature (1)..(1113): Ortholog of  Ceres SEQ ID NO 12587535 as cited in SEQ ID NO 64020
  misc_feature (1)..(1113): Ortholog of  Ceres SEQ ID NO 12586366 as cited in SEQ ID NO 68983

SEQ ID NO: 94884 - protein, 370 aa, Arabidopsis thaliana; identical to SEQ ID NO: 91128
  peptide (1)..(370): Ceres Seq. ID no. 12726565

SEQ ID NO: 94885 - protein, 369 aa, Arabidopsis thaliana; identical to SEQ ID NO: 91129
  peptide (1)..(369): Ceres Seq. ID no. 12726566

SEQ ID NO: 94886 - protein, 327 aa, Arabidopsis thaliana; identical to SEQ ID NO: 91130
  peptide (1)..(327): Ceres Seq. ID no. 12726567

SEQ ID NO: 94887 - DNA, 1068 bp, Arabidopsis thaliana; identical to SEQ ID NO: 91131
  misc_feature (1)..(1068): Ceres Seq. ID no. 12726580
  misc_feature (1)..(1068): Ortholog of  Ceres SEQ ID NO 12636774 as cited in SEQ ID NO 372
  misc_feature (1)..(1068): Ortholog of  Ceres SEQ ID NO 14311866 as cited in SEQ ID NO 51178
  misc_feature (1)..(1068): Ortholog of  Ceres SEQ ID NO 13582350 as cited in SEQ ID NO 56734
  misc_feature (1)..(1068): Ortholog of  Ceres SEQ ID NO 12476493 as cited in SEQ ID NO 58163
  misc_feature (1)..(1068): Ortholog of  Ceres SEQ ID NO 13597295 as cited in SEQ ID NO 63743
  misc_feature (1)..(1068): Ortholog of  Ceres SEQ ID NO 13597233 as cited in SEQ ID NO 64370

SEQ ID NO: 94888 - protein, 355 aa, Arabidopsis thaliana; identical to SEQ ID NO: 91132
  peptide (1)..(355): Ceres Seq. ID no. 12726581

SEQ ID NO: 94889 - protein, 258 aa, Arabidopsis thaliana; identical to SEQ ID NO: 91133
  peptide (1)..(258): Ceres Seq. ID no. 12726582

SEQ ID NO: 94890 - protein, 227 aa, Arabidopsis thaliana; identical to SEQ ID NO: 91134
  peptide (1)..(227): Ceres Seq. ID no. 12726583

SEQ ID NO: 94891 - DNA, 1083 bp, Arabidopsis thaliana; identical to SEQ ID NO: 91135
  misc_feature (1)..(1083): Ceres Seq. ID no. 12726584
  misc_feature (1)..(1083): Ortholog of  Ceres SEQ ID NO 12636774 as cited in SEQ ID NO 372
  misc_feature (1)..(1083): Ortholog of  Ceres SEQ ID NO 14311866 as cited in SEQ ID NO 51178
  misc_feature (1)..(1083): Ortholog of  Ceres SEQ ID NO 12615466 as cited in SEQ ID NO 62761
  misc_feature (1)..(1083): Ortholog of  Ceres SEQ ID NO 13597295 as cited in SEQ ID NO 63743
  misc_feature (1)..(1083): Ortholog of  Ceres SEQ ID NO 13597439 as cited in SEQ ID NO 64081
  misc_feature (1)..(1083): Ortholog of  Ceres SEQ ID NO 13597233 as cited in SEQ ID NO 64370
  misc_feature (1)..(1083): Ortholog of  Ceres SEQ ID NO 13598327 as cited in SEQ ID NO 68040

SEQ ID NO: 94892 - protein, 347 aa, Arabidopsis thaliana; identical to SEQ ID NO: 91136
  peptide (1)..(347): Ceres Seq. ID no. 12726585

SEQ ID NO: 94893 - protein, 218 aa, Arabidopsis thaliana; identical to SEQ ID NO: 91137
  peptide (1)..(218): Ceres Seq. ID no. 12726586

SEQ ID NO: 94894 - protein, 181 aa, Arabidopsis thaliana; identical to SEQ ID NO: 91138
  peptide (1)..(181): Ceres Seq. ID no. 12726587

SEQ ID NO: 94895 - DNA, 1885 bp, Arabidopsis thaliana; identical to SEQ ID NO: 91139
  misc_feature (1)..(1885): Ceres Seq. ID no. 12726588
  misc_feature (1)..(1885): Ortholog of  Ceres SEQ ID NO 13595870 as cited in SEQ ID NO 62101
  misc_feature (1)..(1885): Ortholog of  Ceres SEQ ID NO 13590241 as cited in SEQ ID NO 63878
  misc_feature (1)..(1885): Ortholog of  Ceres SEQ ID NO 13657939 as cited in SEQ ID NO 66349
  misc_feature (1)..(1885): Ortholog of  Ceres SEQ ID NO 13660597 as cited in SEQ ID NO 67655

SEQ ID NO: 94896 - protein, 523 aa, Arabidopsis thaliana; identical to SEQ ID NO: 91140
  peptide (1)..(523): Ceres Seq. ID no. 12726589

SEQ ID NO: 94897 - protein, 466 aa, Arabidopsis thaliana; identical to SEQ ID NO: 91141
  peptide (1)..(466): Ceres Seq. ID no. 12726590

SEQ ID NO: 94898 - protein, 459 aa, Arabidopsis thaliana; identical to SEQ ID NO: 91142
  peptide (1)..(459): Ceres Seq. ID no. 12726591

SEQ ID NO: 94899 - DNA, 1386 bp, Arabidopsis thaliana; identical to SEQ ID NO: 91143
  misc_feature (1)..(1386): Ceres Seq. ID no. 12726592
  misc_feature (1)..(1386): Ortholog of  Ceres SEQ ID NO 15177414 as cited in SEQ ID NO 57242
  misc_feature (1)..(1386): Ortholog of  Ceres SEQ ID NO 13594151 as cited in SEQ ID NO 58886

SEQ ID NO: 94900 - protein, 461 aa, Arabidopsis thaliana; identical to SEQ ID NO: 91144
  peptide (1)..(461): Ceres Seq. ID no. 12726593

SEQ ID NO: 94901 - protein, 243 aa, Arabidopsis thaliana; identical to SEQ ID NO: 91145
  peptide (1)..(243): Ceres Seq. ID no. 12726594

SEQ ID NO: 94902 - protein, 232 aa, Arabidopsis thaliana; identical to SEQ ID NO: 91146
  peptide (1)..(232): Ceres Seq. ID no. 12726595

SEQ ID NO: 94903 - DNA, 1945 bp, Arabidopsis thaliana; identical to SEQ ID NO: 91147
  misc_feature (1)..(1945): Ceres Seq. ID no. 12726607
  misc_feature (1)..(1945): Ortholog of  Ceres SEQ ID NO 14310547 as cited in SEQ ID NO 55132
  misc_feature (1)..(1945): Ortholog of  Ceres SEQ ID NO 13596261 as cited in SEQ ID NO 67817
  misc_feature (1)..(1945): Ortholog of  Ceres SEQ ID NO 13662360 as cited in SEQ ID NO 68830

SEQ ID NO: 94904 - protein, 489 aa, Arabidopsis thaliana; identical to SEQ ID NO: 91148
  peptide (1)..(489): Ceres Seq. ID no. 12726608

SEQ ID NO: 94905 - protein, 396 aa, Arabidopsis thaliana; identical to SEQ ID NO: 91149
  peptide (1)..(396): Ceres Seq. ID no. 12726609

SEQ ID NO: 94906 - protein, 390 aa, Arabidopsis thaliana; identical to SEQ ID NO: 91150
  peptide (1)..(390): Ceres Seq. ID no. 12726610

SEQ ID NO: 94907 - DNA, 2007 bp, Arabidopsis thaliana; identical to SEQ ID NO: 91151
  misc_feature (1)..(2007): Ceres Seq. ID no. 12726614
  misc_feature (1)..(2007): Ortholog of  Ceres SEQ ID NO 13597411 as cited in SEQ ID NO 64125

SEQ ID NO: 94908 - protein, 561 aa, Arabidopsis thaliana; identical to SEQ ID NO: 91152
  peptide (1)..(561): Ceres Seq. ID no. 12726615

SEQ ID NO: 94909 - protein, 498 aa, Arabidopsis thaliana; identical to SEQ ID NO: 91153
  peptide (1)..(498): Ceres Seq. ID no. 12726616

SEQ ID NO: 94910 - protein, 482 aa, Arabidopsis thaliana; identical to SEQ ID NO: 91154
  peptide (1)..(482): Ceres Seq. ID no. 12726617

SEQ ID NO: 94911 - DNA, 1233 bp, Arabidopsis thaliana; identical to SEQ ID NO: 91155
  misc_feature (1)..(1233): Ceres Seq. ID no. 12726693
  misc_feature (1)..(1233): Ortholog of  Ceres SEQ ID NO 13659759 as cited in SEQ ID NO 67663

SEQ ID NO: 94912 - protein, 410 aa, Arabidopsis thaliana; identical to SEQ ID NO: 91156
  peptide (1)..(410): Ceres Seq. ID no. 12726694

SEQ ID NO: 94913 - protein, 300 aa, Arabidopsis thaliana; identical to SEQ ID NO: 91157
  peptide (1)..(300): Ceres Seq. ID no. 12726695

SEQ ID NO: 94914 - DNA, 1641 bp, Arabidopsis thaliana; identical to SEQ ID NO: 91158
  misc_feature (1)..(1641): Ceres Seq. ID no. 12726700
  misc_feature (1)..(1641): Ortholog of  Ceres SEQ ID NO 13585332 as cited in SEQ ID NO 60654
  misc_feature (1)..(1641): Ortholog of  Ceres SEQ ID NO 13502874 as cited in SEQ ID NO 66298
  misc_feature (1)..(1641): Ortholog of  Ceres SEQ ID NO 12614124 as cited in SEQ ID NO 68392

SEQ ID NO: 94915 - protein, 546 aa, Arabidopsis thaliana; identical to SEQ ID NO: 91159
  peptide (1)..(546): Ceres Seq. ID no. 12726701

SEQ ID NO: 94916 - protein, 491 aa, Arabidopsis thaliana; identical to SEQ ID NO: 91160
  peptide (1)..(491): Ceres Seq. ID no. 12726702

SEQ ID NO: 94917 - protein, 477 aa, Arabidopsis thaliana; identical to SEQ ID NO: 91161
  peptide (1)..(477): Ceres Seq. ID no. 12726703

SEQ ID NO: 94918 - DNA, 3747 bp, Arabidopsis thaliana; identical to SEQ ID NO: 91162
  misc_feature (1)..(3747): Ceres Seq. ID no. 12726712
  misc_feature (1)..(3747): Ortholog of  Ceres SEQ ID NO 13593889 as cited in SEQ ID NO 53305

SEQ ID NO: 94919 - protein, 1248 aa, Arabidopsis thaliana; identical to SEQ ID NO: 91163
  peptide (1)..(1248): Ceres Seq. ID no. 12726713

SEQ ID NO: 94920 - protein, 1235 aa, Arabidopsis thaliana; identical to SEQ ID NO: 91164
  peptide (1)..(1235): Ceres Seq. ID no. 12726714

SEQ ID NO: 94921 - protein, 1221 aa, Arabidopsis thaliana; identical to SEQ ID NO: 91165
  peptide (1)..(1221): Ceres Seq. ID no. 12726715

SEQ ID NO: 94922 - DNA, 1941 bp, Arabidopsis thaliana; identical to SEQ ID NO: 91166
  misc_feature (1)..(1941): Ceres Seq. ID no. 12726723
  misc_feature (1)..(1941): Ortholog of  Ceres SEQ ID NO 15174879 as cited in SEQ ID NO 53786

SEQ ID NO: 94923 - protein, 646 aa, Arabidopsis thaliana; identical to SEQ ID NO: 91167
  peptide (1)..(646): Ceres Seq. ID no. 12726724

SEQ ID NO: 94924 - protein, 595 aa, Arabidopsis thaliana; identical to SEQ ID NO: 91168
  peptide (1)..(595): Ceres Seq. ID no. 12726725

SEQ ID NO: 94925 - protein, 479 aa, Arabidopsis thaliana; identical to SEQ ID NO: 91169
  peptide (1)..(479): Ceres Seq. ID no. 12726726

SEQ ID NO: 94926 - DNA, 1233 bp, Arabidopsis thaliana; identical to SEQ ID NO: 91170
  misc_feature (1)..(1233): Ceres Seq. ID no. 12726727
  misc_feature (1)..(1233): Ortholog of  Ceres SEQ ID NO 13597334 as cited in SEQ ID NO 64244
  misc_feature (1)..(1233): Ortholog of  Ceres SEQ ID NO 14303165 as cited in SEQ ID NO 65181
  misc_feature (1)..(1233): Ortholog of  Ceres SEQ ID NO 15224550 as cited in SEQ ID NO 0

SEQ ID NO: 94927 - protein, 410 aa, Arabidopsis thaliana; identical to SEQ ID NO: 91171
  peptide (1)..(410): Ceres Seq. ID no. 12726728

SEQ ID NO: 94928 - protein, 274 aa, Arabidopsis thaliana; identical to SEQ ID NO: 91172
  peptide (1)..(274): Ceres Seq. ID no. 12726729

SEQ ID NO: 94929 - DNA, 1782 bp, Arabidopsis thaliana; identical to SEQ ID NO: 91173
  misc_feature (1)..(1782): Ceres Seq. ID no. 12726730
  misc_feature (1)..(1782): Ortholog of  Ceres SEQ ID NO 13600098 as cited in SEQ ID NO 0

SEQ ID NO: 94930 - protein, 481 aa, Arabidopsis thaliana; identical to SEQ ID NO: 41378
  peptide (1)..(481): Ceres Seq. ID no. 12726731

SEQ ID NO: 94931 - protein, 403 aa, Arabidopsis thaliana; identical to SEQ ID NO: 41379
  peptide (1)..(403): Ceres Seq. ID no. 12726732

SEQ ID NO: 94932 - protein, 338 aa, Arabidopsis thaliana; identical to SEQ ID NO: 41380
  peptide (1)..(338): Ceres Seq. ID no. 12726733

SEQ ID NO: 94933 - DNA, 1329 bp, Arabidopsis thaliana; identical to SEQ ID NO: 91177
  misc_feature (1)..(1329): Ceres Seq. ID no. 12726744
  misc_feature (1)..(1329): Ortholog of  Ceres SEQ ID NO 15226186 as cited in SEQ ID NO 0

SEQ ID NO: 94934 - protein, 442 aa, Arabidopsis thaliana; identical to SEQ ID NO: 71516
  peptide (1)..(442): Ceres Seq. ID no. 12726745

SEQ ID NO: 94935 - protein, 386 aa, Arabidopsis thaliana; identical to SEQ ID NO: 71517
  peptide (1)..(386): Ceres Seq. ID no. 12726746

SEQ ID NO: 94936 - protein, 369 aa, Arabidopsis thaliana; identical to SEQ ID NO: 91180
  peptide (1)..(369): Ceres Seq. ID no. 12726747

SEQ ID NO: 94937 - DNA, 525 bp, Arabidopsis thaliana; identical to SEQ ID NO: 91181
  misc_feature (1)..(525): Ceres Seq. ID no. 12726748
  misc_feature (1)..(525): Ortholog of  Ceres SEQ ID NO 13596338 as cited in SEQ ID NO 68005
  misc_feature (1)..(525): Ortholog of  Ceres SEQ ID NO 15179357 as cited in SEQ ID NO 0

SEQ ID NO: 94938 - protein, 174 aa, Arabidopsis thaliana; identical to SEQ ID NO: 91182
  peptide (1)..(174): Ceres Seq. ID no. 12726749

SEQ ID NO: 94939 - protein, 165 aa, Arabidopsis thaliana; identical to SEQ ID NO: 91183
  peptide (1)..(165): Ceres Seq. ID no. 12726750

SEQ ID NO: 94940 - protein, 132 aa, Arabidopsis thaliana; identical to SEQ ID NO: 91184
  peptide (1)..(132): Ceres Seq. ID no. 12726751

SEQ ID NO: 94941 - DNA, 531 bp, Arabidopsis thaliana; identical to SEQ ID NO: 91185
  misc_feature (1)..(531): Ceres Seq. ID no. 12726771
  misc_feature (1)..(531): Ortholog of  Ceres SEQ ID NO 13595497 as cited in SEQ ID NO 51127

SEQ ID NO: 94942 - protein, 176 aa, Arabidopsis thaliana; identical to SEQ ID NO: 44157
  peptide (1)..(176): Ceres Seq. ID no. 12726772

SEQ ID NO: 94943 - protein, 158 aa, Arabidopsis thaliana; identical to SEQ ID NO: 44158
  peptide (1)..(158): Ceres Seq. ID no. 12726773

SEQ ID NO: 94944 - DNA, 588 bp, Arabidopsis thaliana; identical to SEQ ID NO: 91188
  misc_feature (1)..(588): Ceres Seq. ID no. 12726786
  misc_feature (1)..(588): Ortholog of  Ceres SEQ ID NO 13594390 as cited in SEQ ID NO 51060
  misc_feature (1)..(588): Ortholog of  Ceres SEQ ID NO 14309565 as cited in SEQ ID NO 52731

SEQ ID NO: 94945 - protein, 195 aa, Arabidopsis thaliana; identical to SEQ ID NO: 91189
  peptide (1)..(195): Ceres Seq. ID no. 12726787

SEQ ID NO: 94946 - protein, 182 aa, Arabidopsis thaliana; identical to SEQ ID NO: 91190
  peptide (1)..(182): Ceres Seq. ID no. 12726788

SEQ ID NO: 94947 - protein, 125 aa, Arabidopsis thaliana; identical to SEQ ID NO: 91191
  peptide (1)..(125): Ceres Seq. ID no. 12726789

SEQ ID NO: 94948 - DNA, 1773 bp, Arabidopsis thaliana; identical to SEQ ID NO: 91192
  misc_feature (1)..(1773): Ceres Seq. ID no. 12726794
  misc_feature (1)..(1773): Ortholog of  Ceres SEQ ID NO 13657789 as cited in SEQ ID NO 66154

SEQ ID NO: 94949 - protein, 395 aa, Arabidopsis thaliana; identical to SEQ ID NO: 91193
  peptide (1)..(395): Ceres Seq. ID no. 12726795

SEQ ID NO: 94950 - DNA, 1543 bp, Arabidopsis thaliana; identical to SEQ ID NO: 91194
  misc_feature (1)..(1543): Ceres Seq. ID no. 12726796
  misc_feature (1)..(1543): Ortholog of  Ceres SEQ ID NO 13660287 as cited in SEQ ID NO 67316
  misc_feature (1)..(1543): Ortholog of  Ceres SEQ ID NO 14307892 as cited in SEQ ID NO 67490

SEQ ID NO: 94951 - protein, 485 aa, Arabidopsis thaliana; identical to SEQ ID NO: 91195
  peptide (1)..(485): Ceres Seq. ID no. 12726797

SEQ ID NO: 94952 - protein, 449 aa, Arabidopsis thaliana; identical to SEQ ID NO: 91196
  peptide (1)..(449): Ceres Seq. ID no. 12726798

SEQ ID NO: 94953 - protein, 442 aa, Arabidopsis thaliana; identical to SEQ ID NO: 91197
  peptide (1)..(442): Ceres Seq. ID no. 12726799

SEQ ID NO: 94954 - DNA, 1056 bp, Arabidopsis thaliana; identical to SEQ ID NO: 91198
  misc_feature (1)..(1056): Ceres Seq. ID no. 12726800
  misc_feature (1)..(1056): Ortholog of  Ceres SEQ ID NO 13593963 as cited in SEQ ID NO 59580

SEQ ID NO: 94955 - protein, 351 aa, Arabidopsis thaliana; identical to SEQ ID NO: 91199
  peptide (1)..(351): Ceres Seq. ID no. 12726801

SEQ ID NO: 94956 - protein, 293 aa, Arabidopsis thaliana; identical to SEQ ID NO: 88757
  peptide (1)..(293): Ceres Seq. ID no. 12726802

SEQ ID NO: 94957 - protein, 280 aa, Arabidopsis thaliana; identical to SEQ ID NO: 91201
  peptide (1)..(280): Ceres Seq. ID no. 12726803

SEQ ID NO: 94958 - DNA, 1383 bp, Arabidopsis thaliana; identical to SEQ ID NO: 91202
  misc_feature (1)..(1383): Ceres Seq. ID no. 12726804
  misc_feature (1)..(1383): Ortholog of  Ceres SEQ ID NO 13503610 as cited in SEQ ID NO 62416
  misc_feature (1)..(1383): Ortholog of  Ceres SEQ ID NO 13657610 as cited in SEQ ID NO 66165
  misc_feature (1)..(1383): Ortholog of  Ceres SEQ ID NO 13598312 as cited in SEQ ID NO 68448
  misc_feature (1)..(1383): Ortholog of  Ceres SEQ ID NO 13596100 as cited in SEQ ID NO 68573

SEQ ID NO: 94959 - protein, 460 aa, Arabidopsis thaliana; identical to SEQ ID NO: 91203
  peptide (1)..(460): Ceres Seq. ID no. 12726805

SEQ ID NO: 94960 - protein, 299 aa, Arabidopsis thaliana; identical to SEQ ID NO: 91204
  peptide (1)..(299): Ceres Seq. ID no. 12726806

SEQ ID NO: 94961 - protein, 292 aa, Arabidopsis thaliana; identical to SEQ ID NO: 91205
  peptide (1)..(292): Ceres Seq. ID no. 12726807

SEQ ID NO: 94962 - DNA, 1016 bp, Arabidopsis thaliana; identical to SEQ ID NO: 91206
  misc_feature (1)..(1016): Ceres Seq. ID no. 12726812
  misc_feature (1)..(1016): Ortholog of  Ceres SEQ ID NO 12625265 as cited in SEQ ID NO 62349
  misc_feature (1)..(1016): Ortholog of  Ceres SEQ ID NO 13596555 as cited in SEQ ID NO 62840

SEQ ID NO: 94963 - protein, 281 aa, Arabidopsis thaliana; identical to SEQ ID NO: 91207
  peptide (1)..(281): Ceres Seq. ID no. 12726813

SEQ ID NO: 94964 - protein, 276 aa, Arabidopsis thaliana; identical to SEQ ID NO: 91208
  peptide (1)..(276): Ceres Seq. ID no. 12726814

SEQ ID NO: 94965 - protein, 262 aa, Arabidopsis thaliana; identical to SEQ ID NO: 91209
  peptide (1)..(262): Ceres Seq. ID no. 12726815

SEQ ID NO: 94966 - DNA, 957 bp, Arabidopsis thaliana; identical to SEQ ID NO: 91210
  misc_feature (1)..(957): Ceres Seq. ID no. 12726819
  misc_feature (1)..(957): Ortholog of  Ceres SEQ ID NO 13594482 as cited in SEQ ID NO 51285
  misc_feature (1)..(957): Ortholog of  Ceres SEQ ID NO 13655381 as cited in SEQ ID NO 63359

SEQ ID NO: 94967 - protein, 318 aa, Arabidopsis thaliana; identical to SEQ ID NO: 77113
  peptide (1)..(318): Ceres Seq. ID no. 12726820

SEQ ID NO: 94968 - protein, 297 aa, Arabidopsis thaliana; identical to SEQ ID NO: 77114
  peptide (1)..(297): Ceres Seq. ID no. 12726821

SEQ ID NO: 94969 - protein, 274 aa, Arabidopsis thaliana; identical to SEQ ID NO: 77115
  peptide (1)..(274): Ceres Seq. ID no. 12726822

SEQ ID NO: 94970 - DNA, 959 bp, Arabidopsis thaliana; identical to SEQ ID NO: 91214
  misc_feature (1)..(959): Ceres Seq. ID no. 12726846
  misc_feature (1)..(959): Ortholog of  Ceres SEQ ID NO 13595270 as cited in SEQ ID NO 56714
  misc_feature (1)..(959): Ortholog of  Ceres SEQ ID NO 14309148 as cited in SEQ ID NO 0

SEQ ID NO: 94971 - protein, 176 aa, Arabidopsis thaliana; identical to SEQ ID NO: 91215
  peptide (1)..(176): Ceres Seq. ID no. 12726847

SEQ ID NO: 94972 - protein, 147 aa, Arabidopsis thaliana; identical to SEQ ID NO: 91216
  peptide (1)..(147): Ceres Seq. ID no. 12726848

SEQ ID NO: 94973 - DNA, 2070 bp, Arabidopsis thaliana; identical to SEQ ID NO: 91217
  misc_feature (1)..(2070): Ceres Seq. ID no. 12726871
  misc_feature (1)..(2070): Ortholog of  Ceres SEQ ID NO 13660894 as cited in SEQ ID NO 67475

SEQ ID NO: 94974 - protein, 689 aa, Arabidopsis thaliana; identical to SEQ ID NO: 91218
  peptide (1)..(689): Ceres Seq. ID no. 12726872

SEQ ID NO: 94975 - protein, 535 aa, Arabidopsis thaliana; identical to SEQ ID NO: 91219
  peptide (1)..(535): Ceres Seq. ID no. 12726873

SEQ ID NO: 94976 - protein, 485 aa, Arabidopsis thaliana; identical to SEQ ID NO: 91220
  peptide (1)..(485): Ceres Seq. ID no. 12726874

SEQ ID NO: 94977 - DNA, 888 bp, Arabidopsis thaliana; identical to SEQ ID NO: 91221
  misc_feature (1)..(888): Ceres Seq. ID no. 12726881
  misc_feature (1)..(888): Ortholog of  Ceres SEQ ID NO 13648488 as cited in SEQ ID NO 20419
  misc_feature (1)..(888): Ortholog of  Ceres SEQ ID NO 15171378 as cited in SEQ ID NO 51582

SEQ ID NO: 94978 - protein, 295 aa, Arabidopsis thaliana; identical to SEQ ID NO: 91222
  peptide (1)..(295): Ceres Seq. ID no. 12726882

SEQ ID NO: 94979 - protein, 287 aa, Arabidopsis thaliana; identical to SEQ ID NO: 91223
  peptide (1)..(287): Ceres Seq. ID no. 12726883

SEQ ID NO: 94980 - protein, 177 aa, Arabidopsis thaliana; identical to SEQ ID NO: 91224
  peptide (1)..(177): Ceres Seq. ID no. 12726884

SEQ ID NO: 94981 - DNA, 2273 bp, Arabidopsis thaliana; identical to SEQ ID NO: 91225
  misc_feature (1)..(2273): Ceres Seq. ID no. 12726893
  misc_feature (1)..(2273): Ortholog of  Ceres SEQ ID NO 13594100 as cited in SEQ ID NO 58827

SEQ ID NO: 94982 - protein, 664 aa, Arabidopsis thaliana; identical to SEQ ID NO: 91226
  peptide (1)..(664): Ceres Seq. ID no. 12726894

SEQ ID NO: 94983 - protein, 655 aa, Arabidopsis thaliana; identical to SEQ ID NO: 91227
  peptide (1)..(655): Ceres Seq. ID no. 12726895

SEQ ID NO: 94984 - protein, 638 aa, Arabidopsis thaliana; identical to SEQ ID NO: 91228
  peptide (1)..(638): Ceres Seq. ID no. 12726896

SEQ ID NO: 94985 - DNA, 1386 bp, Arabidopsis thaliana; identical to SEQ ID NO: 91229
  misc_feature (1)..(1386): Ceres Seq. ID no. 12726903
  misc_feature (1)..(1386): Ortholog of  Ceres SEQ ID NO 14311005 as cited in SEQ ID NO 53519

SEQ ID NO: 94986 - protein, 461 aa, Arabidopsis thaliana; identical to SEQ ID NO: 91230
  peptide (1)..(461): Ceres Seq. ID no. 12726904

SEQ ID NO: 94987 - protein, 337 aa, Arabidopsis thaliana; identical to SEQ ID NO: 91231
  peptide (1)..(337): Ceres Seq. ID no. 12726905

SEQ ID NO: 94988 - protein, 288 aa, Arabidopsis thaliana; identical to SEQ ID NO: 91232
  peptide (1)..(288): Ceres Seq. ID no. 12726906

SEQ ID NO: 94989 - DNA, 2388 bp, Arabidopsis thaliana; identical to SEQ ID NO: 91233
  misc_feature (1)..(2388): Ceres Seq. ID no. 12726907
  misc_feature (1)..(2388): Ortholog of  Ceres SEQ ID NO 13598023 as cited in SEQ ID NO 66487

SEQ ID NO: 94990 - protein, 692 aa, Arabidopsis thaliana; identical to SEQ ID NO: 91234
  peptide (1)..(692): Ceres Seq. ID no. 12726908

SEQ ID NO: 94991 - protein, 685 aa, Arabidopsis thaliana; identical to SEQ ID NO: 91235
  peptide (1)..(685): Ceres Seq. ID no. 12726909

SEQ ID NO: 94992 - protein, 616 aa, Arabidopsis thaliana; identical to SEQ ID NO: 91236
  peptide (1)..(616): Ceres Seq. ID no. 12726910

SEQ ID NO: 94993 - DNA, 2459 bp, Arabidopsis thaliana; identical to SEQ ID NO: 91237
  misc_feature (1)..(2459): Ceres Seq. ID no. 12726915
  misc_feature (1)..(2459): Ortholog of  Ceres SEQ ID NO 15178310 as cited in SEQ ID NO 1089
  misc_feature (1)..(2459): Ortholog of  Ceres SEQ ID NO 15178931 as cited in SEQ ID NO 1125
  misc_feature (1)..(2459): Ortholog of  Ceres SEQ ID NO 13596648 as cited in SEQ ID NO 63080
  misc_feature (1)..(2459): Ortholog of  Ceres SEQ ID NO 14303173 as cited in SEQ ID NO 66550
  misc_feature (1)..(2459): Ortholog of  Ceres SEQ ID NO 13584744 as cited in SEQ ID NO 69137
  misc_feature (1)..(2459): Ortholog of  Ceres SEQ ID NO 15179672 as cited in SEQ ID NO 0

SEQ ID NO: 94994 - protein, 625 aa, Arabidopsis thaliana; identical to SEQ ID NO: 91238
  peptide (1)..(625): Ceres Seq. ID no. 12726916

SEQ ID NO: 94995 - protein, 467 aa, Arabidopsis thaliana; identical to SEQ ID NO: 91239
  peptide (1)..(467): Ceres Seq. ID no. 12726917

SEQ ID NO: 94996 - DNA, 1413 bp, Arabidopsis thaliana; identical to SEQ ID NO: 91240
  misc_feature (1)..(1413): Ceres Seq. ID no. 12726922
  misc_feature (1)..(1413): Ortholog of  Ceres SEQ ID NO 13599231 as cited in SEQ ID NO 984

SEQ ID NO: 94997 - protein, 470 aa, Arabidopsis thaliana; identical to SEQ ID NO: 91241
  peptide (1)..(470): Ceres Seq. ID no. 12726923

SEQ ID NO: 94998 - protein, 328 aa, Arabidopsis thaliana; identical to SEQ ID NO: 91242
  peptide (1)..(328): Ceres Seq. ID no. 12726924

SEQ ID NO: 94999 - protein, 299 aa, Arabidopsis thaliana; identical to SEQ ID NO: 91243
  peptide (1)..(299): Ceres Seq. ID no. 12726925

SEQ ID NO: 95000 - DNA, 1489 bp, Arabidopsis thaliana; identical to SEQ ID NO: 91244
  misc_feature (1)..(1489): Ceres Seq. ID no. 12726940
  misc_feature (1)..(1489): Ortholog of  Ceres SEQ ID NO 13654285 as cited in SEQ ID NO 68661

SEQ ID NO: 95001 - protein, 375 aa, Arabidopsis thaliana; identical to SEQ ID NO: 91245
  peptide (1)..(375): Ceres Seq. ID no. 12726941

SEQ ID NO: 95002 - protein, 297 aa, Arabidopsis thaliana; identical to SEQ ID NO: 91246
  peptide (1)..(297): Ceres Seq. ID no. 12726942

SEQ ID NO: 95003 - protein, 294 aa, Arabidopsis thaliana; identical to SEQ ID NO: 91247
  peptide (1)..(294): Ceres Seq. ID no. 12726943

SEQ ID NO: 95004 - DNA, 1500 bp, Arabidopsis thaliana; identical to SEQ ID NO: 91248
  misc_feature (1)..(1500): Ceres Seq. ID no. 12726951
  misc_feature (1)..(1500): Ortholog of  Ceres SEQ ID NO 12623695 as cited in SEQ ID NO 61286

SEQ ID NO: 95005 - protein, 499 aa, Arabidopsis thaliana; identical to SEQ ID NO: 91249
  peptide (1)..(499): Ceres Seq. ID no. 12726952

SEQ ID NO: 95006 - protein, 475 aa, Arabidopsis thaliana; identical to SEQ ID NO: 91250
  peptide (1)..(475): Ceres Seq. ID no. 12726953

SEQ ID NO: 95007 - protein, 471 aa, Arabidopsis thaliana; identical to SEQ ID NO: 91251
  peptide (1)..(471): Ceres Seq. ID no. 12726954

SEQ ID NO: 95008 - DNA, 1747 bp, Arabidopsis thaliana; identical to SEQ ID NO: 91252
  misc_feature (1)..(1747): Ceres Seq. ID no. 12726967
  misc_feature (1)..(1747): Ortholog of  Ceres SEQ ID NO 12460981 as cited in SEQ ID NO 65146

SEQ ID NO: 95009 - protein, 490 aa, Arabidopsis thaliana; identical to SEQ ID NO: 91253
  peptide (1)..(490): Ceres Seq. ID no. 12726968

SEQ ID NO: 95010 - protein, 390 aa, Arabidopsis thaliana; identical to SEQ ID NO: 91254
  peptide (1)..(390): Ceres Seq. ID no. 12726969

SEQ ID NO: 95011 - protein, 307 aa, Arabidopsis thaliana; identical to SEQ ID NO: 91255
  peptide (1)..(307): Ceres Seq. ID no. 12726970

SEQ ID NO: 95012 - DNA, 1902 bp, Arabidopsis thaliana; identical to SEQ ID NO: 91256
  misc_feature (1)..(1902): Ceres Seq. ID no. 12727018
  misc_feature (1)..(1902): Ortholog of  Ceres SEQ ID NO 13598865 as cited in SEQ ID NO 0

SEQ ID NO: 95013 - protein, 633 aa, Arabidopsis thaliana; identical to SEQ ID NO: 91257
  peptide (1)..(633): Ceres Seq. ID no. 12727019

SEQ ID NO: 95014 - protein, 589 aa, Arabidopsis thaliana; identical to SEQ ID NO: 91258
  peptide (1)..(589): Ceres Seq. ID no. 12727020

SEQ ID NO: 95015 - protein, 549 aa, Arabidopsis thaliana; identical to SEQ ID NO: 91259
  peptide (1)..(549): Ceres Seq. ID no. 12727021

SEQ ID NO: 95016 - DNA, 567 bp, Arabidopsis thaliana; identical to SEQ ID NO: 91260
  misc_feature (1)..(567): Ceres Seq. ID no. 12727022
  misc_feature (1)..(567): Ortholog of  Ceres SEQ ID NO 13662513 as cited in SEQ ID NO 63303

SEQ ID NO: 95017 - protein, 188 aa, Arabidopsis thaliana; identical to SEQ ID NO: 91261
  peptide (1)..(188): Ceres Seq. ID no. 12727023

SEQ ID NO: 95018 - protein, 128 aa, Arabidopsis thaliana; identical to SEQ ID NO: 91262
  peptide (1)..(128): Ceres Seq. ID no. 12727024

SEQ ID NO: 95019 - protein, 106 aa, Arabidopsis thaliana; identical to SEQ ID NO: 91263
  peptide (1)..(106): Ceres Seq. ID no. 12727025

SEQ ID NO: 95020 - DNA, 1448 bp, Arabidopsis thaliana; identical to SEQ ID NO: 91264
  misc_feature (1)..(1448): Ceres Seq. ID no. 12727060
  misc_feature (1)..(1448): Ortholog of  Ceres SEQ ID NO 14303137 as cited in SEQ ID NO 53594
  misc_feature (1)..(1448): Ortholog of  Ceres SEQ ID NO 13585454 as cited in SEQ ID NO 65280
  misc_feature (1)..(1448): Ortholog of  Ceres SEQ ID NO 14307889 as cited in SEQ ID NO 67245

SEQ ID NO: 95021 - protein, 367 aa, Arabidopsis thaliana; identical to SEQ ID NO: 91265
  peptide (1)..(367): Ceres Seq. ID no. 12727061

SEQ ID NO: 95022 - protein, 365 aa, Arabidopsis thaliana; identical to SEQ ID NO: 91266
  peptide (1)..(365): Ceres Seq. ID no. 12727062

SEQ ID NO: 95023 - protein, 211 aa, Arabidopsis thaliana; identical to SEQ ID NO: 91267
  peptide (1)..(211): Ceres Seq. ID no. 12727063

SEQ ID NO: 95024 - DNA, 1178 bp, Arabidopsis thaliana; identical to SEQ ID NO: 91268
  misc_feature (1)..(1178): Ceres Seq. ID no. 12727064
  misc_feature (1)..(1178): Ortholog of  Ceres SEQ ID NO 15178181 as cited in SEQ ID NO 58740
  misc_feature (1)..(1178): Ortholog of  Ceres SEQ ID NO 12614739 as cited in SEQ ID NO 68587

SEQ ID NO: 95025 - protein, 347 aa, Arabidopsis thaliana; identical to SEQ ID NO: 76001
  peptide (1)..(347): Ceres Seq. ID no. 12727065

SEQ ID NO: 95026 - protein, 183 aa, Arabidopsis thaliana; identical to SEQ ID NO: 76002
  peptide (1)..(183): Ceres Seq. ID no. 12727066

SEQ ID NO: 95027 - DNA, 912 bp, Arabidopsis thaliana; identical to SEQ ID NO: 91271
  misc_feature (1)..(912): Ceres Seq. ID no. 12727087
  misc_feature (1)..(912): Ortholog of  Ceres SEQ ID NO 14302154 as cited in SEQ ID NO 0

SEQ ID NO: 95028 - protein, 303 aa, Arabidopsis thaliana; identical to SEQ ID NO: 35347
  peptide (1)..(303): Ceres Seq. ID no. 12727088

SEQ ID NO: 95029 - DNA, 2517 bp, Arabidopsis thaliana; identical to SEQ ID NO: 91273
  misc_feature (1)..(2517): Ceres Seq. ID no. 12727108
  misc_feature (1)..(2517): Ortholog of  Ceres SEQ ID NO 14311055 as cited in SEQ ID NO 53705

SEQ ID NO: 95030 - protein, 746 aa, Arabidopsis thaliana; identical to SEQ ID NO: 91274
  peptide (1)..(746): Ceres Seq. ID no. 12727109

SEQ ID NO: 95031 - protein, 745 aa, Arabidopsis thaliana; identical to SEQ ID NO: 91275
  peptide (1)..(745): Ceres Seq. ID no. 12727110

SEQ ID NO: 95032 - protein, 684 aa, Arabidopsis thaliana; identical to SEQ ID NO: 91276
  peptide (1)..(684): Ceres Seq. ID no. 12727111

SEQ ID NO: 95033 - DNA, 1218 bp, Arabidopsis thaliana; identical to SEQ ID NO: 91277
  misc_feature (1)..(1218): Ceres Seq. ID no. 12727120
  misc_feature (1)..(1218): Ortholog of  Ceres SEQ ID NO 13596497 as cited in SEQ ID NO 68669

SEQ ID NO: 95034 - protein, 405 aa, Arabidopsis thaliana; identical to SEQ ID NO: 84734
  peptide (1)..(405): Ceres Seq. ID no. 12727121

SEQ ID NO: 95035 - protein, 325 aa, Arabidopsis thaliana; identical to SEQ ID NO: 84735
  peptide (1)..(325): Ceres Seq. ID no. 12727122

SEQ ID NO: 95036 - protein, 268 aa, Arabidopsis thaliana; identical to SEQ ID NO: 91280
  peptide (1)..(268): Ceres Seq. ID no. 12727123

SEQ ID NO: 95037 - DNA, 1792 bp, Arabidopsis thaliana; identical to SEQ ID NO: 91281
  misc_feature (1)..(1792): Ceres Seq. ID no. 12727144
  misc_feature (1)..(1792): Ortholog of  Ceres SEQ ID NO 15177919 as cited in SEQ ID NO 52743

SEQ ID NO: 95038 - protein, 419 aa, Arabidopsis thaliana; identical to SEQ ID NO: 91282
  peptide (1)..(419): Ceres Seq. ID no. 12727145

SEQ ID NO: 95039 - protein, 397 aa, Arabidopsis thaliana; identical to SEQ ID NO: 91283
  peptide (1)..(397): Ceres Seq. ID no. 12727146

SEQ ID NO: 95040 - DNA, 1955 bp, Arabidopsis thaliana; identical to SEQ ID NO: 91284
  misc_feature (1)..(1955): Ceres Seq. ID no. 12727147
  misc_feature (1)..(1955): Ortholog of  Ceres SEQ ID NO 13594037 as cited in SEQ ID NO 55666
  misc_feature (1)..(1955): Ortholog of  Ceres SEQ ID NO 13657707 as cited in SEQ ID NO 66407

SEQ ID NO: 95041 - protein, 602 aa, Arabidopsis thaliana; identical to SEQ ID NO: 91285
  peptide (1)..(602): Ceres Seq. ID no. 12727148

SEQ ID NO: 95042 - protein, 409 aa, Arabidopsis thaliana; identical to SEQ ID NO: 91286
  peptide (1)..(409): Ceres Seq. ID no. 12727149

SEQ ID NO: 95043 - protein, 366 aa, Arabidopsis thaliana; identical to SEQ ID NO: 91287
  peptide (1)..(366): Ceres Seq. ID no. 12727150

SEQ ID NO: 95044 - DNA, 1080 bp, Arabidopsis thaliana; identical to SEQ ID NO: 91288
  misc_feature (1)..(1080): Ceres Seq. ID no. 12727154
  misc_feature (1)..(1080): Ortholog of  Ceres SEQ ID NO 15170461 as cited in SEQ ID NO 52853
  misc_feature (1)..(1080): Ortholog of  Ceres SEQ ID NO 13595351 as cited in SEQ ID NO 55934
  misc_feature (1)..(1080): Ortholog of  Ceres SEQ ID NO 13595513 as cited in SEQ ID NO 56663
  misc_feature (1)..(1080): Ortholog of  Ceres SEQ ID NO 13639645 as cited in SEQ ID NO 57488

SEQ ID NO: 95045 - protein, 359 aa, Arabidopsis thaliana; identical to SEQ ID NO: 91289
  peptide (1)..(359): Ceres Seq. ID no. 12727155

SEQ ID NO: 95046 - protein, 357 aa, Arabidopsis thaliana; identical to SEQ ID NO: 91290
  peptide (1)..(357): Ceres Seq. ID no. 12727156

SEQ ID NO: 95047 - protein, 349 aa, Arabidopsis thaliana; identical to SEQ ID NO: 91291
  peptide (1)..(349): Ceres Seq. ID no. 12727157

SEQ ID NO: 95048 - DNA, 3452 bp, Arabidopsis thaliana; identical to SEQ ID NO: 91292
  misc_feature (1)..(3452): Ceres Seq. ID no. 12727166
  misc_feature (1)..(3452): Ortholog of  Ceres SEQ ID NO 13658778 as cited in SEQ ID NO 66511

SEQ ID NO: 95049 - protein, 1084 aa, Arabidopsis thaliana; identical to SEQ ID NO: 91293
  peptide (1)..(1084): Ceres Seq. ID no. 12727167

SEQ ID NO: 95050 - protein, 956 aa, Arabidopsis thaliana; identical to SEQ ID NO: 91294
  peptide (1)..(956): Ceres Seq. ID no. 12727168

SEQ ID NO: 95051 - protein, 884 aa, Arabidopsis thaliana; identical to SEQ ID NO: 91295
  peptide (1)..(884): Ceres Seq. ID no. 12727169

SEQ ID NO: 95052 - DNA, 1525 bp, Arabidopsis thaliana; identical to SEQ ID NO: 91296
  misc_feature (1)..(1525): Ceres Seq. ID no. 12727170
  misc_feature (1)..(1525): Ortholog of  Ceres SEQ ID NO 15177361 as cited in SEQ ID NO 51598
  misc_feature (1)..(1525): Ortholog of  Ceres SEQ ID NO 15170792 as cited in SEQ ID NO 52707

SEQ ID NO: 95053 - protein, 391 aa, Arabidopsis thaliana; identical to SEQ ID NO: 91297
  peptide (1)..(391): Ceres Seq. ID no. 12727171

SEQ ID NO: 95054 - protein, 321 aa, Arabidopsis thaliana; identical to SEQ ID NO: 91298
  peptide (1)..(321): Ceres Seq. ID no. 12727172

SEQ ID NO: 95055 - protein, 319 aa, Arabidopsis thaliana; identical to SEQ ID NO: 91299
  peptide (1)..(319): Ceres Seq. ID no. 12727173

SEQ ID NO: 95056 - DNA, 1329 bp, Arabidopsis thaliana; identical to SEQ ID NO: 91300
  misc_feature (1)..(1329): Ceres Seq. ID no. 12727174
  misc_feature (1)..(1329): Ortholog of  Ceres SEQ ID NO 13597648 as cited in SEQ ID NO 69125

SEQ ID NO: 95057 - protein, 442 aa, Arabidopsis thaliana; identical to SEQ ID NO: 91301
  peptide (1)..(442): Ceres Seq. ID no. 12727175

SEQ ID NO: 95058 - protein, 422 aa, Arabidopsis thaliana; identical to SEQ ID NO: 25306
  peptide (1)..(422): Ceres Seq. ID no. 12727176

SEQ ID NO: 95059 - protein, 372 aa, Arabidopsis thaliana; identical to SEQ ID NO: 91303
  peptide (1)..(372): Ceres Seq. ID no. 12727177

SEQ ID NO: 95060 - DNA, 585 bp, Arabidopsis thaliana; identical to SEQ ID NO: 91304
  misc_feature (1)..(585): Ceres Seq. ID no. 12727180
  misc_feature (1)..(585): Ortholog of  Ceres SEQ ID NO 15175041 as cited in SEQ ID NO 57563

SEQ ID NO: 95061 - protein, 194 aa, Arabidopsis thaliana; identical to SEQ ID NO: 91305
  peptide (1)..(194): Ceres Seq. ID no. 12727181

SEQ ID NO: 95062 - protein, 171 aa, Arabidopsis thaliana; identical to SEQ ID NO: 91306
  peptide (1)..(171): Ceres Seq. ID no. 12727182

SEQ ID NO: 95063 - protein, 162 aa, Arabidopsis thaliana; identical to SEQ ID NO: 91307
  peptide (1)..(162): Ceres Seq. ID no. 12727183

SEQ ID NO: 95064 - DNA, 621 bp, Arabidopsis thaliana; identical to SEQ ID NO: 91308
  misc_feature (1)..(621): Ceres Seq. ID no. 12727191
  misc_feature (1)..(621): Ortholog of  Ceres SEQ ID NO 12608945 as cited in SEQ ID NO 51209
  misc_feature (1)..(621): Ortholog of  Ceres SEQ ID NO 14316444 as cited in SEQ ID NO 59233

SEQ ID NO: 95065 - protein, 206 aa, Arabidopsis thaliana; identical to SEQ ID NO: 91309
  peptide (1)..(206): Ceres Seq. ID no. 12727192

SEQ ID NO: 95066 - protein, 179 aa, Arabidopsis thaliana; identical to SEQ ID NO: 91310
  peptide (1)..(179): Ceres Seq. ID no. 12727193

SEQ ID NO: 95067 - DNA, 1146 bp, Arabidopsis thaliana; identical to SEQ ID NO: 91311
  misc_feature (1)..(1146): Ceres Seq. ID no. 12727205
  misc_feature (1)..(1146): Ortholog of  Ceres SEQ ID NO 15179824 as cited in SEQ ID NO 66250
  misc_feature (1)..(1146): Ortholog of  Ceres SEQ ID NO 13657872 as cited in SEQ ID NO 66357

SEQ ID NO: 95068 - protein, 381 aa, Arabidopsis thaliana; identical to SEQ ID NO: 91312
  peptide (1)..(381): Ceres Seq. ID no. 12727206

SEQ ID NO: 95069 - protein, 312 aa, Arabidopsis thaliana; identical to SEQ ID NO: 91313
  peptide (1)..(312): Ceres Seq. ID no. 12727207

SEQ ID NO: 95070 - protein, 279 aa, Arabidopsis thaliana; identical to SEQ ID NO: 91314
  peptide (1)..(279): Ceres Seq. ID no. 12727208

SEQ ID NO: 95071 - DNA, 1089 bp, Arabidopsis thaliana; identical to SEQ ID NO: 91315
  misc_feature (1)..(1089): Ceres Seq. ID no. 12727221
  misc_feature (1)..(1089): Ortholog of  Ceres SEQ ID NO 14314411 as cited in SEQ ID NO 57683

SEQ ID NO: 95072 - protein, 362 aa, Arabidopsis thaliana; identical to SEQ ID NO: 91316
  peptide (1)..(362): Ceres Seq. ID no. 12727222

SEQ ID NO: 95073 - protein, 354 aa, Arabidopsis thaliana; identical to SEQ ID NO: 91317
  peptide (1)..(354): Ceres Seq. ID no. 12727223

SEQ ID NO: 95074 - protein, 199 aa, Arabidopsis thaliana; identical to SEQ ID NO: 91318
  peptide (1)..(199): Ceres Seq. ID no. 12727224

SEQ ID NO: 95075 - DNA, 411 bp, Arabidopsis thaliana; identical to SEQ ID NO: 91319
  misc_feature (1)..(411): Ceres Seq. ID no. 12727235
  misc_feature (1)..(411): Ortholog of  Ceres SEQ ID NO 13581889 as cited in SEQ ID NO 50900
  misc_feature (1)..(411): Ortholog of  Ceres SEQ ID NO 13581902 as cited in SEQ ID NO 52223

SEQ ID NO: 95076 - protein, 136 aa, Arabidopsis thaliana; identical to SEQ ID NO: 8709
  peptide (1)..(136): Ceres Seq. ID no. 12727236

SEQ ID NO: 95077 - DNA, 3846 bp, Arabidopsis thaliana; identical to SEQ ID NO: 91321
  misc_feature (1)..(3846): Ceres Seq. ID no. 12727244
  misc_feature (1)..(3846): Ortholog of  Ceres SEQ ID NO 13600310 as cited in SEQ ID NO 5086

SEQ ID NO: 95078 - protein, 1281 aa, Arabidopsis thaliana; identical to SEQ ID NO: 91322
  peptide (1)..(1281): Ceres Seq. ID no. 12727245

SEQ ID NO: 95079 - protein, 1273 aa, Arabidopsis thaliana; identical to SEQ ID NO: 91323
  peptide (1)..(1273): Ceres Seq. ID no. 12727246

SEQ ID NO: 95080 - protein, 1246 aa, Arabidopsis thaliana; identical to SEQ ID NO: 91324
  peptide (1)..(1246): Ceres Seq. ID no. 12727247

SEQ ID NO: 95081 - DNA, 1287 bp, Arabidopsis thaliana; identical to SEQ ID NO: 91325
  misc_feature (1)..(1287): Ceres Seq. ID no. 12727274
  misc_feature (1)..(1287): Ortholog of  Ceres SEQ ID NO 15177858 as cited in SEQ ID NO 51624
  misc_feature (1)..(1287): Ortholog of  Ceres SEQ ID NO 15171249 as cited in SEQ ID NO 52276
  misc_feature (1)..(1287): Ortholog of  Ceres SEQ ID NO 13594189 as cited in SEQ ID NO 58890

SEQ ID NO: 95082 - protein, 428 aa, Arabidopsis thaliana; identical to SEQ ID NO: 91326
  peptide (1)..(428): Ceres Seq. ID no. 12727275

SEQ ID NO: 95083 - protein, 368 aa, Arabidopsis thaliana; identical to SEQ ID NO: 91327
  peptide (1)..(368): Ceres Seq. ID no. 12727276

SEQ ID NO: 95084 - protein, 358 aa, Arabidopsis thaliana; identical to SEQ ID NO: 91328
  peptide (1)..(358): Ceres Seq. ID no. 12727277

SEQ ID NO: 95085 - DNA, 1035 bp, Arabidopsis thaliana; identical to SEQ ID NO: 91329
  misc_feature (1)..(1035): Ceres Seq. ID no. 12727292
  misc_feature (1)..(1035): Ortholog of  Ceres SEQ ID NO 13623732 as cited in SEQ ID NO 0

SEQ ID NO: 95086 - protein, 344 aa, Arabidopsis thaliana; identical to SEQ ID NO: 91330
  peptide (1)..(344): Ceres Seq. ID no. 12727293

SEQ ID NO: 95087 - protein, 318 aa, Arabidopsis thaliana; identical to SEQ ID NO: 91331
  peptide (1)..(318): Ceres Seq. ID no. 12727294

SEQ ID NO: 95088 - protein, 265 aa, Arabidopsis thaliana; identical to SEQ ID NO: 91332
  peptide (1)..(265): Ceres Seq. ID no. 12727295

SEQ ID NO: 95089 - DNA, 1398 bp, Arabidopsis thaliana; identical to SEQ ID NO: 91333
  misc_feature (1)..(1398): Ceres Seq. ID no. 12727332
  misc_feature (1)..(1398): Ortholog of  Ceres SEQ ID NO 13594349 as cited in SEQ ID NO 58161
  misc_feature (1)..(1398): Ortholog of  Ceres SEQ ID NO 13663419 as cited in SEQ ID NO 66561
  misc_feature (1)..(1398): Ortholog of  Ceres SEQ ID NO 15177892 as cited in SEQ ID NO 0

SEQ ID NO: 95090 - protein, 465 aa, Arabidopsis thaliana; identical to SEQ ID NO: 91334
  peptide (1)..(465): Ceres Seq. ID no. 12727333

SEQ ID NO: 95091 - protein, 387 aa, Arabidopsis thaliana; identical to SEQ ID NO: 91335
  peptide (1)..(387): Ceres Seq. ID no. 12727334

SEQ ID NO: 95092 - protein, 379 aa, Arabidopsis thaliana; identical to SEQ ID NO: 91336
  peptide (1)..(379): Ceres Seq. ID no. 12727335

SEQ ID NO: 95093 - DNA, 1707 bp, Arabidopsis thaliana; identical to SEQ ID NO: 91337
  misc_feature (1)..(1707): Ceres Seq. ID no. 12727348
  misc_feature (1)..(1707): Ortholog of  Ceres SEQ ID NO 12611314 as cited in SEQ ID NO 56535
  misc_feature (1)..(1707): Ortholog of  Ceres SEQ ID NO 15178046 as cited in SEQ ID NO 60380
  misc_feature (1)..(1707): Ortholog of  Ceres SEQ ID NO 14312016 as cited in SEQ ID NO 60412
  misc_feature (1)..(1707): Ortholog of  Ceres SEQ ID NO 13661438 as cited in SEQ ID NO 61414

SEQ ID NO: 95094 - protein, 438 aa, Arabidopsis thaliana; identical to SEQ ID NO: 91338
  peptide (1)..(438): Ceres Seq. ID no. 12727349

SEQ ID NO: 95095 - protein, 431 aa, Arabidopsis thaliana; identical to SEQ ID NO: 91339
  peptide (1)..(431): Ceres Seq. ID no. 12727350

SEQ ID NO: 95096 - protein, 405 aa, Arabidopsis thaliana; identical to SEQ ID NO: 91340
  peptide (1)..(405): Ceres Seq. ID no. 12727351

SEQ ID NO: 95097 - DNA, 876 bp, Arabidopsis thaliana; identical to SEQ ID NO: 91341
  misc_feature (1)..(876): Ceres Seq. ID no. 12727352
  misc_feature (1)..(876): Ortholog of  Ceres SEQ ID NO 12593170 as cited in SEQ ID NO 63263
  misc_feature (1)..(876): Ortholog of  Ceres SEQ ID NO 14301882 as cited in SEQ ID NO 64381
  misc_feature (1)..(876): Ortholog of  Ceres SEQ ID NO 13597851 as cited in SEQ ID NO 64869
  misc_feature (1)..(876): Ortholog of  Ceres SEQ ID NO 13662420 as cited in SEQ ID NO 68680

SEQ ID NO: 95098 - protein, 291 aa, Arabidopsis thaliana; identical to SEQ ID NO: 91342
  peptide (1)..(291): Ceres Seq. ID no. 12727353

SEQ ID NO: 95099 - DNA, 897 bp, Arabidopsis thaliana; identical to SEQ ID NO: 91343
  misc_feature (1)..(897): Ceres Seq. ID no. 12727362
  misc_feature (1)..(897): Ortholog of  Ceres SEQ ID NO 15179926 as cited in SEQ ID NO 57010
  misc_feature (1)..(897): Ortholog of  Ceres SEQ ID NO 14316075 as cited in SEQ ID NO 60059

SEQ ID NO: 95100 - protein, 298 aa, Arabidopsis thaliana; identical to SEQ ID NO: 91344
  peptide (1)..(298): Ceres Seq. ID no. 12727363

SEQ ID NO: 95101 - protein, 273 aa, Arabidopsis thaliana; identical to SEQ ID NO: 91345
  peptide (1)..(273): Ceres Seq. ID no. 12727364

SEQ ID NO: 95102 - protein, 257 aa, Arabidopsis thaliana; identical to SEQ ID NO: 91346
  peptide (1)..(257): Ceres Seq. ID no. 12727365

SEQ ID NO: 95103 - DNA, 2493 bp, Arabidopsis thaliana; identical to SEQ ID NO: 91347
  misc_feature (1)..(2493): Ceres Seq. ID no. 12727378
  misc_feature (1)..(2493): Ortholog of  Ceres SEQ ID NO 13582534 as cited in SEQ ID NO 57409
  misc_feature (1)..(2493): Ortholog of  Ceres SEQ ID NO 13597268 as cited in SEQ ID NO 63929
  misc_feature (1)..(2493): Ortholog of  Ceres SEQ ID NO 13659840 as cited in SEQ ID NO 66970
  misc_feature (1)..(2493): Ortholog of  Ceres SEQ ID NO 14302384 as cited in SEQ ID NO 67177

SEQ ID NO: 95104 - protein, 830 aa, Arabidopsis thaliana; identical to SEQ ID NO: 91348
  peptide (1)..(830): Ceres Seq. ID no. 12727379

SEQ ID NO: 95105 - protein, 744 aa, Arabidopsis thaliana; identical to SEQ ID NO: 91349
  peptide (1)..(744): Ceres Seq. ID no. 12727380

SEQ ID NO: 95106 - protein, 732 aa, Arabidopsis thaliana; identical to SEQ ID NO: 91350
  peptide (1)..(732): Ceres Seq. ID no. 12727381

SEQ ID NO: 95107 - DNA, 1059 bp, Arabidopsis thaliana; identical to SEQ ID NO: 91351
  misc_feature (1)..(1059): Ceres Seq. ID no. 12727382
  misc_feature (1)..(1059): Ortholog of  Ceres SEQ ID NO 13595351 as cited in SEQ ID NO 55934
  misc_feature (1)..(1059): Ortholog of  Ceres SEQ ID NO 13639645 as cited in SEQ ID NO 57488

SEQ ID NO: 95108 - protein, 352 aa, Arabidopsis thaliana; identical to SEQ ID NO: 91352
  peptide (1)..(352): Ceres Seq. ID no. 12727383

SEQ ID NO: 95109 - protein, 348 aa, Arabidopsis thaliana; identical to SEQ ID NO: 91353
  peptide (1)..(348): Ceres Seq. ID no. 12727384

SEQ ID NO: 95110 - protein, 336 aa, Arabidopsis thaliana; identical to SEQ ID NO: 91354
  peptide (1)..(336): Ceres Seq. ID no. 12727385

SEQ ID NO: 95111 - DNA, 1014 bp, Arabidopsis thaliana; identical to SEQ ID NO: 91355
  misc_feature (1)..(1014): Ceres Seq. ID no. 12727386
  misc_feature (1)..(1014): Ortholog of  Ceres SEQ ID NO 13595351 as cited in SEQ ID NO 55934
  misc_feature (1)..(1014): Ortholog of  Ceres SEQ ID NO 13639645 as cited in SEQ ID NO 57488

SEQ ID NO: 95112 - protein, 337 aa, Arabidopsis thaliana; identical to SEQ ID NO: 91356
  peptide (1)..(337): Ceres Seq. ID no. 12727387

SEQ ID NO: 95113 - protein, 333 aa, Arabidopsis thaliana; identical to SEQ ID NO: 91357
  peptide (1)..(333): Ceres Seq. ID no. 12727388

SEQ ID NO: 95114 - protein, 318 aa, Arabidopsis thaliana; identical to SEQ ID NO: 91358
  peptide (1)..(318): Ceres Seq. ID no. 12727389

SEQ ID NO: 95115 - DNA, 1521 bp, Arabidopsis thaliana; identical to SEQ ID NO: 91359
  misc_feature (1)..(1521): Ceres Seq. ID no. 12727390
  misc_feature (1)..(1521): Ortholog of  Ceres SEQ ID NO 13594037 as cited in SEQ ID NO 55666
  misc_feature (1)..(1521): Ortholog of  Ceres SEQ ID NO 13657707 as cited in SEQ ID NO 66407

SEQ ID NO: 95116 - protein, 506 aa, Arabidopsis thaliana; identical to SEQ ID NO: 91360
  peptide (1)..(506): Ceres Seq. ID no. 12727391

SEQ ID NO: 95117 - protein, 454 aa, Arabidopsis thaliana; identical to SEQ ID NO: 91361
  peptide (1)..(454): Ceres Seq. ID no. 12727392

SEQ ID NO: 95118 - protein, 452 aa, Arabidopsis thaliana; identical to SEQ ID NO: 91362
  peptide (1)..(452): Ceres Seq. ID no. 12727393

SEQ ID NO: 95119 - DNA, 1494 bp, Arabidopsis thaliana; identical to SEQ ID NO: 91363
  misc_feature (1)..(1494): Ceres Seq. ID no. 12727394
  misc_feature (1)..(1494): Ortholog of  Ceres SEQ ID NO 13594209 as cited in SEQ ID NO 59089
  misc_feature (1)..(1494): Ortholog of  Ceres SEQ ID NO 14302228 as cited in SEQ ID NO 65061
  misc_feature (1)..(1494): Ortholog of  Ceres SEQ ID NO 14308027 as cited in SEQ ID NO 65826
  misc_feature (1)..(1494): Ortholog of  Ceres SEQ ID NO 15169585 as cited in SEQ ID NO 66076
  misc_feature (1)..(1494): Ortholog of  Ceres SEQ ID NO 13502874 as cited in SEQ ID NO 66298
  misc_feature (1)..(1494): Ortholog of  Ceres SEQ ID NO 12614124 as cited in SEQ ID NO 68392
  misc_feature (1)..(1494): Ortholog of  Ceres SEQ ID NO 15176087 as cited in SEQ ID NO 68692

SEQ ID NO: 95120 - protein, 497 aa, Arabidopsis thaliana; identical to SEQ ID NO: 91364
  peptide (1)..(497): Ceres Seq. ID no. 12727395

SEQ ID NO: 95121 - protein, 495 aa, Arabidopsis thaliana; identical to SEQ ID NO: 91365
  peptide (1)..(495): Ceres Seq. ID no. 12727396

SEQ ID NO: 95122 - protein, 492 aa, Arabidopsis thaliana; identical to SEQ ID NO: 91366
  peptide (1)..(492): Ceres Seq. ID no. 12727397

SEQ ID NO: 95123 - DNA, 1324 bp, Arabidopsis thaliana; identical to SEQ ID NO: 91367
  misc_feature (1)..(1324): Ceres Seq. ID no. 12727409
  misc_feature (1)..(1324): Ortholog of  Ceres SEQ ID NO 12617323 as cited in SEQ ID NO 64129

SEQ ID NO: 95124 - protein, 361 aa, Arabidopsis thaliana; identical to SEQ ID NO: 91368
  peptide (1)..(361): Ceres Seq. ID no. 12727410

SEQ ID NO: 95125 - protein, 289 aa, Arabidopsis thaliana; identical to SEQ ID NO: 91369
  peptide (1)..(289): Ceres Seq. ID no. 12727411

SEQ ID NO: 95126 - protein, 209 aa, Arabidopsis thaliana; identical to SEQ ID NO: 91370
  peptide (1)..(209): Ceres Seq. ID no. 12727412

SEQ ID NO: 95127 - DNA, 1669 bp, Arabidopsis thaliana; identical to SEQ ID NO: 91371
  misc_feature (1)..(1669): Ceres Seq. ID no. 12727415
  misc_feature (1)..(1669): Ortholog of  Ceres SEQ ID NO 14315162 as cited in SEQ ID NO 60005
  misc_feature (1)..(1669): Ortholog of  Ceres SEQ ID NO 13659881 as cited in SEQ ID NO 66938

SEQ ID NO: 95128 - protein, 331 aa, Arabidopsis thaliana; identical to SEQ ID NO: 91372
  peptide (1)..(331): Ceres Seq. ID no. 12727416

SEQ ID NO: 95129 - protein, 225 aa, Arabidopsis thaliana; identical to SEQ ID NO: 91373
  peptide (1)..(225): Ceres Seq. ID no. 12727417

SEQ ID NO: 95130 - protein, 224 aa, Arabidopsis thaliana; identical to SEQ ID NO: 91374
  peptide (1)..(224): Ceres Seq. ID no. 12727418

SEQ ID NO: 95131 - DNA, 1599 bp, Arabidopsis thaliana; identical to SEQ ID NO: 91375
  misc_feature (1)..(1599): Ceres Seq. ID no. 12727429
  misc_feature (1)..(1599): Ortholog of  Ceres SEQ ID NO 12586556 as cited in SEQ ID NO 64667
  misc_feature (1)..(1599): Ortholog of  Ceres SEQ ID NO 13660894 as cited in SEQ ID NO 67475

SEQ ID NO: 95132 - protein, 532 aa, Arabidopsis thaliana; identical to SEQ ID NO: 91376
  peptide (1)..(532): Ceres Seq. ID no. 12727430

SEQ ID NO: 95133 - protein, 423 aa, Arabidopsis thaliana; identical to SEQ ID NO: 91377
  peptide (1)..(423): Ceres Seq. ID no. 12727431

SEQ ID NO: 95134 - protein, 405 aa, Arabidopsis thaliana; identical to SEQ ID NO: 91378
  peptide (1)..(405): Ceres Seq. ID no. 12727432

SEQ ID NO: 95135 - DNA, 1863 bp, Arabidopsis thaliana; identical to SEQ ID NO: 91379
  misc_feature (1)..(1863): Ceres Seq. ID no. 12727433
  misc_feature (1)..(1863): Ortholog of  Ceres SEQ ID NO 12586556 as cited in SEQ ID NO 64667
  misc_feature (1)..(1863): Ortholog of  Ceres SEQ ID NO 14316045 as cited in SEQ ID NO 66810

SEQ ID NO: 95136 - protein, 620 aa, Arabidopsis thaliana; identical to SEQ ID NO: 91380
  peptide (1)..(620): Ceres Seq. ID no. 12727434

SEQ ID NO: 95137 - protein, 603 aa, Arabidopsis thaliana; identical to SEQ ID NO: 91381
  peptide (1)..(603): Ceres Seq. ID no. 12727435

SEQ ID NO: 95138 - protein, 584 aa, Arabidopsis thaliana; identical to SEQ ID NO: 91382
  peptide (1)..(584): Ceres Seq. ID no. 12727436

SEQ ID NO: 95139 - DNA, 967 bp, Arabidopsis thaliana; identical to SEQ ID NO: 91383
  misc_feature (1)..(967): Ceres Seq. ID no. 12727437
  misc_feature (1)..(967): Ortholog of  Ceres SEQ ID NO 13598387 as cited in SEQ ID NO 62757
  misc_feature (1)..(967): Ortholog of  Ceres SEQ ID NO 13662984 as cited in SEQ ID NO 64419

SEQ ID NO: 95140 - protein, 307 aa, Arabidopsis thaliana; identical to SEQ ID NO: 23063
  peptide (1)..(307): Ceres Seq. ID no. 12727438

SEQ ID NO: 95141 - protein, 279 aa, Arabidopsis thaliana; identical to SEQ ID NO: 23064
  peptide (1)..(279): Ceres Seq. ID no. 12727439

SEQ ID NO: 95142 - protein, 190 aa, Arabidopsis thaliana; identical to SEQ ID NO: 23065
  peptide (1)..(190): Ceres Seq. ID no. 12727440

SEQ ID NO: 95143 - DNA, 1917 bp, Arabidopsis thaliana; identical to SEQ ID NO: 91387
  misc_feature (1)..(1917): Ceres Seq. ID no. 12727441
  misc_feature (1)..(1917): Ortholog of  Ceres SEQ ID NO 13582783 as cited in SEQ ID NO 67821

SEQ ID NO: 95144 - protein, 524 aa, Arabidopsis thaliana; identical to SEQ ID NO: 91388
  peptide (1)..(524): Ceres Seq. ID no. 12727442

SEQ ID NO: 95145 - protein, 483 aa, Arabidopsis thaliana; identical to SEQ ID NO: 91389
  peptide (1)..(483): Ceres Seq. ID no. 12727443

SEQ ID NO: 95146 - protein, 453 aa, Arabidopsis thaliana; identical to SEQ ID NO: 91390
  peptide (1)..(453): Ceres Seq. ID no. 12727444

SEQ ID NO: 95147 - DNA, 1845 bp, Arabidopsis thaliana; identical to SEQ ID NO: 91391
  misc_feature (1)..(1845): Ceres Seq. ID no. 12727449
  misc_feature (1)..(1845): Ortholog of  Ceres SEQ ID NO 12607856 as cited in SEQ ID NO 55419

SEQ ID NO: 95148 - protein, 614 aa, Arabidopsis thaliana; identical to SEQ ID NO: 91392
  peptide (1)..(614): Ceres Seq. ID no. 12727450

SEQ ID NO: 95149 - protein, 603 aa, Arabidopsis thaliana; identical to SEQ ID NO: 91393
  peptide (1)..(603): Ceres Seq. ID no. 12727451

SEQ ID NO: 95150 - protein, 564 aa, Arabidopsis thaliana; identical to SEQ ID NO: 91394
  peptide (1)..(564): Ceres Seq. ID no. 12727452

SEQ ID NO: 95151 - DNA, 1356 bp, Arabidopsis thaliana; identical to SEQ ID NO: 91395
  misc_feature (1)..(1356): Ceres Seq. ID no. 12727453
  misc_feature (1)..(1356): Ortholog of  Ceres SEQ ID NO 13646221 as cited in SEQ ID NO 20310

SEQ ID NO: 95152 - protein, 451 aa, Arabidopsis thaliana; identical to SEQ ID NO: 91396
  peptide (1)..(451): Ceres Seq. ID no. 12727454

SEQ ID NO: 95153 - protein, 343 aa, Arabidopsis thaliana; identical to SEQ ID NO: 91397
  peptide (1)..(343): Ceres Seq. ID no. 12727455

SEQ ID NO: 95154 - protein, 266 aa, Arabidopsis thaliana; identical to SEQ ID NO: 91398
  peptide (1)..(266): Ceres Seq. ID no. 12727456

SEQ ID NO: 95155 - DNA, 687 bp, Arabidopsis thaliana; identical to SEQ ID NO: 91399
  misc_feature (1)..(687): Ceres Seq. ID no. 12727465
  misc_feature (1)..(687): Ortholog of  Ceres SEQ ID NO 13661617 as cited in SEQ ID NO 61132

SEQ ID NO: 95156 - protein, 228 aa, Arabidopsis thaliana; identical to SEQ ID NO: 91400
  peptide (1)..(228): Ceres Seq. ID no. 12727466

SEQ ID NO: 95157 - protein, 222 aa, Arabidopsis thaliana; identical to SEQ ID NO: 91401
  peptide (1)..(222): Ceres Seq. ID no. 12727467

SEQ ID NO: 95158 - protein, 218 aa, Arabidopsis thaliana; identical to SEQ ID NO: 91402
  peptide (1)..(218): Ceres Seq. ID no. 12727468

SEQ ID NO: 95159 - DNA, 893 bp, Arabidopsis thaliana; identical to SEQ ID NO: 91403
  misc_feature (1)..(893): Ceres Seq. ID no. 12727485
  misc_feature (1)..(893): Ortholog of  Ceres SEQ ID NO 12472913 as cited in SEQ ID NO 115
  misc_feature (1)..(893): Ortholog of  Ceres SEQ ID NO 15225086 as cited in SEQ ID NO 69009

SEQ ID NO: 95160 - protein, 261 aa, Arabidopsis thaliana; identical to SEQ ID NO: 91404
  peptide (1)..(261): Ceres Seq. ID no. 12727486

SEQ ID NO: 95161 - protein, 249 aa, Arabidopsis thaliana; identical to SEQ ID NO: 91405
  peptide (1)..(249): Ceres Seq. ID no. 12727487

SEQ ID NO: 95162 - DNA, 2430 bp, Arabidopsis thaliana; identical to SEQ ID NO: 91406
  misc_feature (1)..(2430): Ceres Seq. ID no. 12727496
  misc_feature (1)..(2430): Ortholog of  Ceres SEQ ID NO 14307030 as cited in SEQ ID NO 54041
  misc_feature (1)..(2430): Ortholog of  Ceres SEQ ID NO 14302891 as cited in SEQ ID NO 66282

SEQ ID NO: 95163 - protein, 809 aa, Arabidopsis thaliana; identical to SEQ ID NO: 91407
  peptide (1)..(809): Ceres Seq. ID no. 12727497

SEQ ID NO: 95164 - protein, 765 aa, Arabidopsis thaliana; identical to SEQ ID NO: 91408
  peptide (1)..(765): Ceres Seq. ID no. 12727498

SEQ ID NO: 95165 - protein, 752 aa, Arabidopsis thaliana; identical to SEQ ID NO: 91409
  peptide (1)..(752): Ceres Seq. ID no. 12727499

SEQ ID NO: 95166 - DNA, 2670 bp, Arabidopsis thaliana; identical to SEQ ID NO: 91410
  misc_feature (1)..(2670): Ceres Seq. ID no. 12727500
  misc_feature (1)..(2670): Ortholog of  Ceres SEQ ID NO 14307030 as cited in SEQ ID NO 54041
  misc_feature (1)..(2670): Ortholog of  Ceres SEQ ID NO 14302891 as cited in SEQ ID NO 66282

SEQ ID NO: 95167 - protein, 815 aa, Arabidopsis thaliana; identical to SEQ ID NO: 91411
  peptide (1)..(815): Ceres Seq. ID no. 12727501

SEQ ID NO: 95168 - protein, 769 aa, Arabidopsis thaliana; identical to SEQ ID NO: 91412
  peptide (1)..(769): Ceres Seq. ID no. 12727502

SEQ ID NO: 95169 - protein, 756 aa, Arabidopsis thaliana; identical to SEQ ID NO: 91413
  peptide (1)..(756): Ceres Seq. ID no. 12727503

SEQ ID NO: 95170 - DNA, 1016 bp, Arabidopsis thaliana; identical to SEQ ID NO: 91414
  misc_feature (1)..(1016): Ceres Seq. ID no. 12727504
  misc_feature (1)..(1016): Ortholog of  Ceres SEQ ID NO 12627139 as cited in SEQ ID NO 64036

SEQ ID NO: 95171 - protein, 179 aa, Arabidopsis thaliana; identical to SEQ ID NO: 91415
  peptide (1)..(179): Ceres Seq. ID no. 12727505

SEQ ID NO: 95172 - protein, 157 aa, Arabidopsis thaliana; identical to SEQ ID NO: 91416
  peptide (1)..(157): Ceres Seq. ID no. 12727506

SEQ ID NO: 95173 - DNA, 726 bp, Arabidopsis thaliana; identical to SEQ ID NO: 91417
  misc_feature (1)..(726): Ceres Seq. ID no. 12727525
  misc_feature (1)..(726): Ortholog of  Ceres SEQ ID NO 14313088 as cited in SEQ ID NO 58870
  misc_feature (1)..(726): Ortholog of  Ceres SEQ ID NO 14314571 as cited in SEQ ID NO 59360

SEQ ID NO: 95174 - protein, 241 aa, Arabidopsis thaliana; identical to SEQ ID NO: 91418
  peptide (1)..(241): Ceres Seq. ID no. 12727526

SEQ ID NO: 95175 - protein, 236 aa, Arabidopsis thaliana; identical to SEQ ID NO: 91419
  peptide (1)..(236): Ceres Seq. ID no. 12727527

SEQ ID NO: 95176 - protein, 234 aa, Arabidopsis thaliana; identical to SEQ ID NO: 91420
  peptide (1)..(234): Ceres Seq. ID no. 12727528

SEQ ID NO: 95177 - DNA, 954 bp, Arabidopsis thaliana; identical to SEQ ID NO: 91421
  misc_feature (1)..(954): Ceres Seq. ID no. 12727547
  misc_feature (1)..(954): Ortholog of  Ceres SEQ ID NO 15171378 as cited in SEQ ID NO 51582

SEQ ID NO: 95178 - protein, 317 aa, Arabidopsis thaliana; identical to SEQ ID NO: 91422
  peptide (1)..(317): Ceres Seq. ID no. 12727548

SEQ ID NO: 95179 - protein, 233 aa, Arabidopsis thaliana; identical to SEQ ID NO: 91423
  peptide (1)..(233): Ceres Seq. ID no. 12727549

SEQ ID NO: 95180 - protein, 220 aa, Arabidopsis thaliana; identical to SEQ ID NO: 91424
  peptide (1)..(220): Ceres Seq. ID no. 12727550

SEQ ID NO: 95181 - DNA, 1956 bp, Arabidopsis thaliana; identical to SEQ ID NO: 91425
  misc_feature (1)..(1956): Ceres Seq. ID no. 12727555
  misc_feature (1)..(1956): Ortholog of  Ceres SEQ ID NO 14310655 as cited in SEQ ID NO 53681

SEQ ID NO: 95182 - protein, 549 aa, Arabidopsis thaliana; identical to SEQ ID NO: 91426
  peptide (1)..(549): Ceres Seq. ID no. 12727556

SEQ ID NO: 95183 - protein, 527 aa, Arabidopsis thaliana; identical to SEQ ID NO: 91427
  peptide (1)..(527): Ceres Seq. ID no. 12727557

SEQ ID NO: 95184 - protein, 496 aa, Arabidopsis thaliana; identical to SEQ ID NO: 91428
  peptide (1)..(496): Ceres Seq. ID no. 12727558

SEQ ID NO: 95185 - DNA, 1207 bp, Arabidopsis thaliana; identical to SEQ ID NO: 91429
  misc_feature (1)..(1207): Ceres Seq. ID no. 12727579
  misc_feature (1)..(1207): Ortholog of  Ceres SEQ ID NO 13581579 as cited in SEQ ID NO 58361
  misc_feature (1)..(1207): Ortholog of  Ceres SEQ ID NO 13598714 as cited in SEQ ID NO 62656
  misc_feature (1)..(1207): Ortholog of  Ceres SEQ ID NO 13596969 as cited in SEQ ID NO 63375
  misc_feature (1)..(1207): Ortholog of  Ceres SEQ ID NO 13597870 as cited in SEQ ID NO 64982
  misc_feature (1)..(1207): Ortholog of  Ceres SEQ ID NO 13595926 as cited in SEQ ID NO 67778
  misc_feature (1)..(1207): Ortholog of  Ceres SEQ ID NO 12567001 as cited in SEQ ID NO 0

SEQ ID NO: 95186 - protein, 329 aa, Arabidopsis thaliana; identical to SEQ ID NO: 91430
  peptide (1)..(329): Ceres Seq. ID no. 12727580

SEQ ID NO: 95187 - protein, 312 aa, Arabidopsis thaliana; identical to SEQ ID NO: 91431
  peptide (1)..(312): Ceres Seq. ID no. 12727581

SEQ ID NO: 95188 - protein, 251 aa, Arabidopsis thaliana; identical to SEQ ID NO: 91432
  peptide (1)..(251): Ceres Seq. ID no. 12727582

SEQ ID NO: 95189 - DNA, 1356 bp, Arabidopsis thaliana; identical to SEQ ID NO: 91433
  misc_feature (1)..(1356): Ceres Seq. ID no. 12727622
  misc_feature (1)..(1356): Ortholog of  Ceres SEQ ID NO 13599900 as cited in SEQ ID NO 531
  misc_feature (1)..(1356): Ortholog of  Ceres SEQ ID NO 13659971 as cited in SEQ ID NO 67565
  misc_feature (1)..(1356): Ortholog of  Ceres SEQ ID NO 13500385 as cited in SEQ ID NO 67583

SEQ ID NO: 95190 - protein, 451 aa, Arabidopsis thaliana; identical to SEQ ID NO: 91434
  peptide (1)..(451): Ceres Seq. ID no. 12727623

SEQ ID NO: 95191 - protein, 431 aa, Arabidopsis thaliana; identical to SEQ ID NO: 91435
  peptide (1)..(431): Ceres Seq. ID no. 12727624

SEQ ID NO: 95192 - protein, 392 aa, Arabidopsis thaliana; identical to SEQ ID NO: 91436
  peptide (1)..(392): Ceres Seq. ID no. 12727625

SEQ ID NO: 95193 - DNA, 780 bp, Arabidopsis thaliana; identical to SEQ ID NO: 91437
  misc_feature (1)..(780): Ceres Seq. ID no. 12727654
  misc_feature (1)..(780): Ortholog of  Ceres SEQ ID NO 13594918 as cited in SEQ ID NO 55747
  misc_feature (1)..(780): Ortholog of  Ceres SEQ ID NO 12587066 as cited in SEQ ID NO 63204

SEQ ID NO: 95194 - protein, 259 aa, Arabidopsis thaliana; identical to SEQ ID NO: 91438
  peptide (1)..(259): Ceres Seq. ID no. 12727655

SEQ ID NO: 95195 - protein, 232 aa, Arabidopsis thaliana; identical to SEQ ID NO: 91439
  peptide (1)..(232): Ceres Seq. ID no. 12727656

SEQ ID NO: 95196 - protein, 212 aa, Arabidopsis thaliana; identical to SEQ ID NO: 91440
  peptide (1)..(212): Ceres Seq. ID no. 12727657

SEQ ID NO: 95197 - DNA, 1755 bp, Arabidopsis thaliana; identical to SEQ ID NO: 91441
  misc_feature (1)..(1755): Ceres Seq. ID no. 12727681
  misc_feature (1)..(1755): Ortholog of  Ceres SEQ ID NO 12586556 as cited in SEQ ID NO 64667
  misc_feature (1)..(1755): Ortholog of  Ceres SEQ ID NO 13660894 as cited in SEQ ID NO 67475

SEQ ID NO: 95198 - protein, 584 aa, Arabidopsis thaliana; identical to SEQ ID NO: 91442
  peptide (1)..(584): Ceres Seq. ID no. 12727682

SEQ ID NO: 95199 - protein, 573 aa, Arabidopsis thaliana; identical to SEQ ID NO: 91443
  peptide (1)..(573): Ceres Seq. ID no. 12727683

SEQ ID NO: 95200 - protein, 526 aa, Arabidopsis thaliana; identical to SEQ ID NO: 91444
  peptide (1)..(526): Ceres Seq. ID no. 12727684

SEQ ID NO: 95201 - DNA, 576 bp, Arabidopsis thaliana; identical to SEQ ID NO: 91445
  misc_feature (1)..(576): Ceres Seq. ID no. 12727685
  misc_feature (1)..(576): Ortholog of  Ceres SEQ ID NO 15180555 as cited in SEQ ID NO 1214

SEQ ID NO: 95202 - protein, 191 aa, Arabidopsis thaliana; identical to SEQ ID NO: 91446
  peptide (1)..(191): Ceres Seq. ID no. 12727686

SEQ ID NO: 95203 - DNA, 1680 bp, Arabidopsis thaliana; identical to SEQ ID NO: 91447
  misc_feature (1)..(1680): Ceres Seq. ID no. 12727701
  misc_feature (1)..(1680): Ortholog of  Ceres SEQ ID NO 13657677 as cited in SEQ ID NO 66119

SEQ ID NO: 95204 - protein, 559 aa, Arabidopsis thaliana; identical to SEQ ID NO: 91448
  peptide (1)..(559): Ceres Seq. ID no. 12727702

SEQ ID NO: 95205 - protein, 478 aa, Arabidopsis thaliana; identical to SEQ ID NO: 91449
  peptide (1)..(478): Ceres Seq. ID no. 12727703

SEQ ID NO: 95206 - protein, 418 aa, Arabidopsis thaliana; identical to SEQ ID NO: 91450
  peptide (1)..(418): Ceres Seq. ID no. 12727704

SEQ ID NO: 95207 - DNA, 1214 bp, Arabidopsis thaliana; identical to SEQ ID NO: 91451
  misc_feature (1)..(1214): Ceres Seq. ID no. 12727733
  misc_feature (1)..(1214): Ortholog of  Ceres SEQ ID NO 13594740 as cited in SEQ ID NO 51721
  misc_feature (1)..(1214): Ortholog of  Ceres SEQ ID NO 14316497 as cited in SEQ ID NO 58285
  misc_feature (1)..(1214): Ortholog of  Ceres SEQ ID NO 13595944 as cited in SEQ ID NO 68153

SEQ ID NO: 95208 - protein, 348 aa, Arabidopsis thaliana; identical to SEQ ID NO: 91452
  peptide (1)..(348): Ceres Seq. ID no. 12727734

SEQ ID NO: 95209 - protein, 335 aa, Arabidopsis thaliana; identical to SEQ ID NO: 91453
  peptide (1)..(335): Ceres Seq. ID no. 12727735

SEQ ID NO: 95210 - protein, 268 aa, Arabidopsis thaliana; identical to SEQ ID NO: 91454
  peptide (1)..(268): Ceres Seq. ID no. 12727736

SEQ ID NO: 95211 - DNA, 1827 bp, Arabidopsis thaliana; identical to SEQ ID NO: 91455
  misc_feature (1)..(1827): Ceres Seq. ID no. 12727741
  misc_feature (1)..(1827): Ortholog of  Ceres SEQ ID NO 15169092 as cited in SEQ ID NO 60430
  misc_feature (1)..(1827): Ortholog of  Ceres SEQ ID NO 14303680 as cited in SEQ ID NO 66019
  misc_feature (1)..(1827): Ortholog of  Ceres SEQ ID NO 15224940 as cited in SEQ ID NO 0

SEQ ID NO: 95212 - protein, 608 aa, Arabidopsis thaliana; identical to SEQ ID NO: 91456
  peptide (1)..(608): Ceres Seq. ID no. 12727742

SEQ ID NO: 95213 - protein, 567 aa, Arabidopsis thaliana; identical to SEQ ID NO: 91457
  peptide (1)..(567): Ceres Seq. ID no. 12727743

SEQ ID NO: 95214 - protein, 565 aa, Arabidopsis thaliana; identical to SEQ ID NO: 91458
  peptide (1)..(565): Ceres Seq. ID no. 12727744

SEQ ID NO: 95215 - DNA, 1881 bp, Arabidopsis thaliana; identical to SEQ ID NO: 91459
  misc_feature (1)..(1881): Ceres Seq. ID no. 12727775
  misc_feature (1)..(1881): Ortholog of  Ceres SEQ ID NO 14313893 as cited in SEQ ID NO 54646
  misc_feature (1)..(1881): Ortholog of  Ceres SEQ ID NO 13656797 as cited in SEQ ID NO 65756
  misc_feature (1)..(1881): Ortholog of  Ceres SEQ ID NO 13658498 as cited in SEQ ID NO 66557
  misc_feature (1)..(1881): Ortholog of  Ceres SEQ ID NO 15227053 as cited in SEQ ID NO 0

SEQ ID NO: 95216 - protein, 626 aa, Arabidopsis thaliana; identical to SEQ ID NO: 91460
  peptide (1)..(626): Ceres Seq. ID no. 12727776

SEQ ID NO: 95217 - protein, 564 aa, Arabidopsis thaliana; identical to SEQ ID NO: 91461
  peptide (1)..(564): Ceres Seq. ID no. 12727777

SEQ ID NO: 95218 - protein, 563 aa, Arabidopsis thaliana; identical to SEQ ID NO: 91462
  peptide (1)..(563): Ceres Seq. ID no. 12727778

SEQ ID NO: 95219 - DNA, 1647 bp, Arabidopsis thaliana; identical to SEQ ID NO: 91463
  misc_feature (1)..(1647): Ceres Seq. ID no. 12727851
  misc_feature (1)..(1647): Ortholog of  Ceres SEQ ID NO 15170151 as cited in SEQ ID NO 53069
  misc_feature (1)..(1647): Ortholog of  Ceres SEQ ID NO 13594209 as cited in SEQ ID NO 59089
  misc_feature (1)..(1647): Ortholog of  Ceres SEQ ID NO 14316039 as cited in SEQ ID NO 62062
  misc_feature (1)..(1647): Ortholog of  Ceres SEQ ID NO 13502874 as cited in SEQ ID NO 66298
  misc_feature (1)..(1647): Ortholog of  Ceres SEQ ID NO 12614124 as cited in SEQ ID NO 68392

SEQ ID NO: 95220 - protein, 500 aa, Arabidopsis thaliana; identical to SEQ ID NO: 91464
  peptide (1)..(500): Ceres Seq. ID no. 12727852

SEQ ID NO: 95221 - protein, 435 aa, Arabidopsis thaliana; identical to SEQ ID NO: 91465
  peptide (1)..(435): Ceres Seq. ID no. 12727853

SEQ ID NO: 95222 - DNA, 768 bp, Arabidopsis thaliana; identical to SEQ ID NO: 91466
  misc_feature (1)..(768): Ceres Seq. ID no. 12727892
  misc_feature (1)..(768): Ortholog of  Ceres SEQ ID NO 14311713 as cited in SEQ ID NO 51356
  misc_feature (1)..(768): Ortholog of  Ceres SEQ ID NO 14303126 as cited in SEQ ID NO 67219

SEQ ID NO: 95223 - protein, 255 aa, Arabidopsis thaliana; identical to SEQ ID NO: 91467
  peptide (1)..(255): Ceres Seq. ID no. 12727893

SEQ ID NO: 95224 - protein, 248 aa, Arabidopsis thaliana; identical to SEQ ID NO: 91468
  peptide (1)..(248): Ceres Seq. ID no. 12727894

SEQ ID NO: 95225 - protein, 128 aa, Arabidopsis thaliana; identical to SEQ ID NO: 91469
  peptide (1)..(128): Ceres Seq. ID no. 12727895

SEQ ID NO: 95226 - DNA, 1200 bp, Arabidopsis thaliana; identical to SEQ ID NO: 91470
  misc_feature (1)..(1200): Ceres Seq. ID no. 12727909
  misc_feature (1)..(1200): Ortholog of  Ceres SEQ ID NO 13596816 as cited in SEQ ID NO 62287

SEQ ID NO: 95227 - protein, 399 aa, Arabidopsis thaliana; identical to SEQ ID NO: 91471
  peptide (1)..(399): Ceres Seq. ID no. 12727910

SEQ ID NO: 95228 - protein, 385 aa, Arabidopsis thaliana; identical to SEQ ID NO: 91472
  peptide (1)..(385): Ceres Seq. ID no. 12727911

SEQ ID NO: 95229 - protein, 288 aa, Arabidopsis thaliana; identical to SEQ ID NO: 91473
  peptide (1)..(288): Ceres Seq. ID no. 12727912

SEQ ID NO: 95230 - DNA, 2256 bp, Arabidopsis thaliana; identical to SEQ ID NO: 91474
  misc_feature (1)..(2256): Ceres Seq. ID no. 12727913
  misc_feature (1)..(2256): Ortholog of  Ceres SEQ ID NO 13586013 as cited in SEQ ID NO 1182

SEQ ID NO: 95231 - protein, 653 aa, Arabidopsis thaliana; identical to SEQ ID NO: 91475
  peptide (1)..(653): Ceres Seq. ID no. 12727914

SEQ ID NO: 95232 - protein, 643 aa, Arabidopsis thaliana; identical to SEQ ID NO: 91476
  peptide (1)..(643): Ceres Seq. ID no. 12727915

SEQ ID NO: 95233 - protein, 501 aa, Arabidopsis thaliana; identical to SEQ ID NO: 91477
  peptide (1)..(501): Ceres Seq. ID no. 12727916

SEQ ID NO: 95234 - DNA, 1334 bp, Arabidopsis thaliana; identical to SEQ ID NO: 91478
  misc_feature (1)..(1334): Ceres Seq. ID no. 12727921
  misc_feature (1)..(1334): Ortholog of  Ceres SEQ ID NO 13656147 as cited in SEQ ID NO 64422
  misc_feature (1)..(1334): Ortholog of  Ceres SEQ ID NO 13596496 as cited in SEQ ID NO 68639

SEQ ID NO: 95235 - protein, 314 aa, Arabidopsis thaliana; identical to SEQ ID NO: 91479
  peptide (1)..(314): Ceres Seq. ID no. 12727922

SEQ ID NO: 95236 - protein, 309 aa, Arabidopsis thaliana; identical to SEQ ID NO: 91480
  peptide (1)..(309): Ceres Seq. ID no. 12727923

SEQ ID NO: 95237 - protein, 234 aa, Arabidopsis thaliana; identical to SEQ ID NO: 91481
  peptide (1)..(234): Ceres Seq. ID no. 12727924

SEQ ID NO: 95238 - DNA, 1412 bp, Arabidopsis thaliana; identical to SEQ ID NO: 91482
  misc_feature (1)..(1412): Ceres Seq. ID no. 12727960
  misc_feature (1)..(1412): Ortholog of  Ceres SEQ ID NO 14303434 as cited in SEQ ID NO 53963

SEQ ID NO: 95239 - protein, 371 aa, Arabidopsis thaliana; identical to SEQ ID NO: 91483
  peptide (1)..(371): Ceres Seq. ID no. 12727961

SEQ ID NO: 95240 - protein, 284 aa, Arabidopsis thaliana; identical to SEQ ID NO: 91484
  peptide (1)..(284): Ceres Seq. ID no. 12727962

SEQ ID NO: 95241 - protein, 273 aa, Arabidopsis thaliana; identical to SEQ ID NO: 91485
  peptide (1)..(273): Ceres Seq. ID no. 12727963

SEQ ID NO: 95242 - DNA, 2101 bp, Arabidopsis thaliana; identical to SEQ ID NO: 91486
  misc_feature (1)..(2101): Ceres Seq. ID no. 12727964
  misc_feature (1)..(2101): Ortholog of  Ceres SEQ ID NO 14312408 as cited in SEQ ID NO 55042

SEQ ID NO: 95243 - protein, 594 aa, Arabidopsis thaliana; identical to SEQ ID NO: 76779
  peptide (1)..(594): Ceres Seq. ID no. 12727965

SEQ ID NO: 95244 - DNA, 630 bp, Arabidopsis thaliana; identical to SEQ ID NO: 91488
  misc_feature (1)..(630): Ceres Seq. ID no. 12727970
  misc_feature (1)..(630): Ortholog of  Ceres SEQ ID NO 13599448 as cited in SEQ ID NO 521
  misc_feature (1)..(630): Ortholog of  Ceres SEQ ID NO 13596408 as cited in SEQ ID NO 62028

SEQ ID NO: 95245 - protein, 209 aa, Arabidopsis thaliana; identical to SEQ ID NO: 91489
  peptide (1)..(209): Ceres Seq. ID no. 12727971

SEQ ID NO: 95246 - DNA, 1461 bp, Arabidopsis thaliana; identical to SEQ ID NO: 91490
  misc_feature (1)..(1461): Ceres Seq. ID no. 12727996
  misc_feature (1)..(1461): Ortholog of  Ceres SEQ ID NO 13596984 as cited in SEQ ID NO 63196

SEQ ID NO: 95247 - protein, 486 aa, Arabidopsis thaliana; identical to SEQ ID NO: 91491
  peptide (1)..(486): Ceres Seq. ID no. 12727997

SEQ ID NO: 95248 - protein, 387 aa, Arabidopsis thaliana; identical to SEQ ID NO: 91492
  peptide (1)..(387): Ceres Seq. ID no. 12727998

SEQ ID NO: 95249 - protein, 299 aa, Arabidopsis thaliana; identical to SEQ ID NO: 91493
  peptide (1)..(299): Ceres Seq. ID no. 12727999

SEQ ID NO: 95250 - DNA, 981 bp, Arabidopsis thaliana; identical to SEQ ID NO: 91494
  misc_feature (1)..(981): Ceres Seq. ID no. 12728004
  misc_feature (1)..(981): Ortholog of  Ceres SEQ ID NO 13655598 as cited in SEQ ID NO 64077

SEQ ID NO: 95251 - protein, 279 aa, Arabidopsis thaliana; identical to SEQ ID NO: 91495
  peptide (1)..(279): Ceres Seq. ID no. 12728005

SEQ ID NO: 95252 - protein, 268 aa, Arabidopsis thaliana; identical to SEQ ID NO: 91496
  peptide (1)..(268): Ceres Seq. ID no. 12728006

SEQ ID NO: 95253 - DNA, 2340 bp, Arabidopsis thaliana; identical to SEQ ID NO: 91497
  misc_feature (1)..(2340): Ceres Seq. ID no. 12728007
  misc_feature (1)..(2340): Ortholog of  Ceres SEQ ID NO 14310729 as cited in SEQ ID NO 53317

SEQ ID NO: 95254 - protein, 779 aa, Arabidopsis thaliana; identical to SEQ ID NO: 91498
  peptide (1)..(779): Ceres Seq. ID no. 12728008

SEQ ID NO: 95255 - protein, 696 aa, Arabidopsis thaliana; identical to SEQ ID NO: 91499
  peptide (1)..(696): Ceres Seq. ID no. 12728009

SEQ ID NO: 95256 - protein, 557 aa, Arabidopsis thaliana; identical to SEQ ID NO: 91500
  peptide (1)..(557): Ceres Seq. ID no. 12728010

SEQ ID NO: 95257 - DNA, 1326 bp, Arabidopsis thaliana; identical to SEQ ID NO: 91501
  misc_feature (1)..(1326): Ceres Seq. ID no. 12728015
  misc_feature (1)..(1326): Ortholog of  Ceres SEQ ID NO 13663419 as cited in SEQ ID NO 66561

SEQ ID NO: 95258 - protein, 441 aa, Arabidopsis thaliana; identical to SEQ ID NO: 91502
  peptide (1)..(441): Ceres Seq. ID no. 12728016

SEQ ID NO: 95259 - protein, 339 aa, Arabidopsis thaliana; identical to SEQ ID NO: 91503
  peptide (1)..(339): Ceres Seq. ID no. 12728017

SEQ ID NO: 95260 - protein, 314 aa, Arabidopsis thaliana; identical to SEQ ID NO: 91504
  peptide (1)..(314): Ceres Seq. ID no. 12728018

SEQ ID NO: 95261 - DNA, 1326 bp, Arabidopsis thaliana; identical to SEQ ID NO: 91505
  misc_feature (1)..(1326): Ceres Seq. ID no. 12728019
  misc_feature (1)..(1326): Ortholog of  Ceres SEQ ID NO 13663419 as cited in SEQ ID NO 66561

SEQ ID NO: 95262 - protein, 441 aa, Arabidopsis thaliana; identical to SEQ ID NO: 91506
  peptide (1)..(441): Ceres Seq. ID no. 12728020

SEQ ID NO: 95263 - protein, 339 aa, Arabidopsis thaliana; identical to SEQ ID NO: 91507
  peptide (1)..(339): Ceres Seq. ID no. 12728021

SEQ ID NO: 95264 - protein, 314 aa, Arabidopsis thaliana; identical to SEQ ID NO: 91508
  peptide (1)..(314): Ceres Seq. ID no. 12728022

SEQ ID NO: 95265 - DNA, 1317 bp, Arabidopsis thaliana; identical to SEQ ID NO: 91509
  misc_feature (1)..(1317): Ceres Seq. ID no. 12728023
  misc_feature (1)..(1317): Ortholog of  Ceres SEQ ID NO 13663419 as cited in SEQ ID NO 66561

SEQ ID NO: 95266 - protein, 438 aa, Arabidopsis thaliana; identical to SEQ ID NO: 91510
  peptide (1)..(438): Ceres Seq. ID no. 12728024

SEQ ID NO: 95267 - protein, 337 aa, Arabidopsis thaliana; identical to SEQ ID NO: 91511
  peptide (1)..(337): Ceres Seq. ID no. 12728025

SEQ ID NO: 95268 - protein, 312 aa, Arabidopsis thaliana; identical to SEQ ID NO: 91512
  peptide (1)..(312): Ceres Seq. ID no. 12728026

SEQ ID NO: 95269 - DNA, 1029 bp, Arabidopsis thaliana; identical to SEQ ID NO: 91513
  misc_feature (1)..(1029): Ceres Seq. ID no. 12728041
  misc_feature (1)..(1029): Ortholog of  Ceres SEQ ID NO 13647762 as cited in SEQ ID NO 20426

SEQ ID NO: 95270 - protein, 243 aa, Arabidopsis thaliana; identical to SEQ ID NO: 91514
  peptide (1)..(243): Ceres Seq. ID no. 12728042

SEQ ID NO: 95271 - protein, 241 aa, Arabidopsis thaliana; identical to SEQ ID NO: 91515
  peptide (1)..(241): Ceres Seq. ID no. 12728043

SEQ ID NO: 95272 - protein, 141 aa, Arabidopsis thaliana; identical to SEQ ID NO: 91516
  peptide (1)..(141): Ceres Seq. ID no. 12728044

SEQ ID NO: 95273 - DNA, 546 bp, Arabidopsis thaliana; identical to SEQ ID NO: 91517
  misc_feature (1)..(546): Ceres Seq. ID no. 12728055
  misc_feature (1)..(546): Ortholog of  Ceres SEQ ID NO 13594385 as cited in SEQ ID NO 57993

SEQ ID NO: 95274 - protein, 181 aa, Arabidopsis thaliana; identical to SEQ ID NO: 91518
  peptide (1)..(181): Ceres Seq. ID no. 12728056

SEQ ID NO: 95275 - DNA, 936 bp, Arabidopsis thaliana; identical to SEQ ID NO: 91519
  misc_feature (1)..(936): Ceres Seq. ID no. 12728057
  misc_feature (1)..(936): Ortholog of  Ceres SEQ ID NO 13594966 as cited in SEQ ID NO 56152
  misc_feature (1)..(936): Ortholog of  Ceres SEQ ID NO 14312224 as cited in SEQ ID NO 57255
  misc_feature (1)..(936): Ortholog of  Ceres SEQ ID NO 12582457 as cited in SEQ ID NO 57530
  misc_feature (1)..(936): Ortholog of  Ceres SEQ ID NO 13655804 as cited in SEQ ID NO 64881

SEQ ID NO: 95276 - protein, 240 aa, Arabidopsis thaliana; identical to SEQ ID NO: 91520
  peptide (1)..(240): Ceres Seq. ID no. 12728058

SEQ ID NO: 95277 - protein, 198 aa, Arabidopsis thaliana; identical to SEQ ID NO: 91521
  peptide (1)..(198): Ceres Seq. ID no. 12728059

SEQ ID NO: 95278 - protein, 177 aa, Arabidopsis thaliana; identical to SEQ ID NO: 91522
  peptide (1)..(177): Ceres Seq. ID no. 12728060

SEQ ID NO: 95279 - DNA, 507 bp, Arabidopsis thaliana; identical to SEQ ID NO: 91523
  misc_feature (1)..(507): Ceres Seq. ID no. 12728061
  misc_feature (1)..(507): Ortholog of  Ceres SEQ ID NO 14305944 as cited in SEQ ID NO 52294
  misc_feature (1)..(507): Ortholog of  Ceres SEQ ID NO 14307370 as cited in SEQ ID NO 54127
  misc_feature (1)..(507): Ortholog of  Ceres SEQ ID NO 13596338 as cited in SEQ ID NO 68005
  misc_feature (1)..(507): Ortholog of  Ceres SEQ ID NO 14302128 as cited in SEQ ID NO 0

SEQ ID NO: 95280 - protein, 168 aa, Arabidopsis thaliana; identical to SEQ ID NO: 91524
  peptide (1)..(168): Ceres Seq. ID no. 12728062

SEQ ID NO: 95281 - protein, 165 aa, Arabidopsis thaliana; identical to SEQ ID NO: 91525
  peptide (1)..(165): Ceres Seq. ID no. 12728063

SEQ ID NO: 95282 - DNA, 1668 bp, Arabidopsis thaliana; identical to SEQ ID NO: 91526
  misc_feature (1)..(1668): Ceres Seq. ID no. 12728064
  misc_feature (1)..(1668): Ortholog of  Ceres SEQ ID NO 15179554 as cited in SEQ ID NO 1174
  misc_feature (1)..(1668): Ortholog of  Ceres SEQ ID NO 15177814 as cited in SEQ ID NO 55489

SEQ ID NO: 95283 - protein, 555 aa, Arabidopsis thaliana; identical to SEQ ID NO: 91527
  peptide (1)..(555): Ceres Seq. ID no. 12728065

SEQ ID NO: 95284 - protein, 541 aa, Arabidopsis thaliana; identical to SEQ ID NO: 91528
  peptide (1)..(541): Ceres Seq. ID no. 12728066

SEQ ID NO: 95285 - protein, 526 aa, Arabidopsis thaliana; identical to SEQ ID NO: 91529
  peptide (1)..(526): Ceres Seq. ID no. 12728067

SEQ ID NO: 95286 - DNA, 1842 bp, Arabidopsis thaliana; identical to SEQ ID NO: 91530
  misc_feature (1)..(1842): Ceres Seq. ID no. 12728096
  misc_feature (1)..(1842): Ortholog of  Ceres SEQ ID NO 12586556 as cited in SEQ ID NO 64667
  misc_feature (1)..(1842): Ortholog of  Ceres SEQ ID NO 13660894 as cited in SEQ ID NO 67475

SEQ ID NO: 95287 - protein, 613 aa, Arabidopsis thaliana; identical to SEQ ID NO: 91531
  peptide (1)..(613): Ceres Seq. ID no. 12728097

SEQ ID NO: 95288 - protein, 539 aa, Arabidopsis thaliana; identical to SEQ ID NO: 91532
  peptide (1)..(539): Ceres Seq. ID no. 12728098

SEQ ID NO: 95289 - protein, 537 aa, Arabidopsis thaliana; identical to SEQ ID NO: 91533
  peptide (1)..(537): Ceres Seq. ID no. 12728099

SEQ ID NO: 95290 - DNA, 1062 bp, Arabidopsis thaliana; identical to SEQ ID NO: 91534
  misc_feature (1)..(1062): Ceres Seq. ID no. 12728163
  misc_feature (1)..(1062): Ortholog of  Ceres SEQ ID NO 15168502 as cited in SEQ ID NO 60095
  misc_feature (1)..(1062): Ortholog of  Ceres SEQ ID NO 15169466 as cited in SEQ ID NO 66135

SEQ ID NO: 95291 - protein, 353 aa, Arabidopsis thaliana; identical to SEQ ID NO: 91535
  peptide (1)..(353): Ceres Seq. ID no. 12728164

SEQ ID NO: 95292 - DNA, 1870 bp, Arabidopsis thaliana; identical to SEQ ID NO: 91536
  misc_feature (1)..(1870): Ceres Seq. ID no. 12728176
  misc_feature (1)..(1870): Ortholog of  Ceres SEQ ID NO 14306569 as cited in SEQ ID NO 53008
  misc_feature (1)..(1870): Ortholog of  Ceres SEQ ID NO 14304855 as cited in SEQ ID NO 53974

SEQ ID NO: 95293 - protein, 513 aa, Arabidopsis thaliana; identical to SEQ ID NO: 91537
  peptide (1)..(513): Ceres Seq. ID no. 12728177

SEQ ID NO: 95294 - protein, 481 aa, Arabidopsis thaliana; identical to SEQ ID NO: 91538
  peptide (1)..(481): Ceres Seq. ID no. 12728178

SEQ ID NO: 95295 - protein, 468 aa, Arabidopsis thaliana; identical to SEQ ID NO: 91539
  peptide (1)..(468): Ceres Seq. ID no. 12728179

SEQ ID NO: 95296 - DNA, 2070 bp, Arabidopsis thaliana; identical to SEQ ID NO: 91540
  misc_feature (1)..(2070): Ceres Seq. ID no. 12728188
  misc_feature (1)..(2070): Ortholog of  Ceres SEQ ID NO 12586556 as cited in SEQ ID NO 64667
  misc_feature (1)..(2070): Ortholog of  Ceres SEQ ID NO 13660894 as cited in SEQ ID NO 67475

SEQ ID NO: 95297 - protein, 689 aa, Arabidopsis thaliana; identical to SEQ ID NO: 91541
  peptide (1)..(689): Ceres Seq. ID no. 12728189

SEQ ID NO: 95298 - protein, 617 aa, Arabidopsis thaliana; identical to SEQ ID NO: 91542
  peptide (1)..(617): Ceres Seq. ID no. 12728190

SEQ ID NO: 95299 - protein, 577 aa, Arabidopsis thaliana; identical to SEQ ID NO: 91543
  peptide (1)..(577): Ceres Seq. ID no. 12728191

SEQ ID NO: 95300 - DNA, 507 bp, Arabidopsis thaliana; identical to SEQ ID NO: 91544
  misc_feature (1)..(507): Ceres Seq. ID no. 12728204
  misc_feature (1)..(507): Ortholog of  Ceres SEQ ID NO 12635162 as cited in SEQ ID NO 0

SEQ ID NO: 95301 - protein, 168 aa, Arabidopsis thaliana; identical to SEQ ID NO: 91545
  peptide (1)..(168): Ceres Seq. ID no. 12728205

SEQ ID NO: 95302 - protein, 118 aa, Arabidopsis thaliana; identical to SEQ ID NO: 91546
  peptide (1)..(118): Ceres Seq. ID no. 12728206

SEQ ID NO: 95303 - DNA, 1336 bp, Arabidopsis thaliana; identical to SEQ ID NO: 91547
  misc_feature (1)..(1336): Ceres Seq. ID no. 12728215
  misc_feature (1)..(1336): Ortholog of  Ceres SEQ ID NO 13581804 as cited in SEQ ID NO 51424
  misc_feature (1)..(1336): Ortholog of  Ceres SEQ ID NO 14306627 as cited in SEQ ID NO 53023
  misc_feature (1)..(1336): Ortholog of  Ceres SEQ ID NO 15174917 as cited in SEQ ID NO 53650
  misc_feature (1)..(1336): Ortholog of  Ceres SEQ ID NO 14304034 as cited in SEQ ID NO 53878
  misc_feature (1)..(1336): Ortholog of  Ceres SEQ ID NO 14307559 as cited in SEQ ID NO 54006
  misc_feature (1)..(1336): Ortholog of  Ceres SEQ ID NO 13663874 as cited in SEQ ID NO 67003

SEQ ID NO: 95304 - protein, 258 aa, Arabidopsis thaliana; identical to SEQ ID NO: 91548
  peptide (1)..(258): Ceres Seq. ID no. 12728216

SEQ ID NO: 95305 - protein, 195 aa, Arabidopsis thaliana; identical to SEQ ID NO: 91549
  peptide (1)..(195): Ceres Seq. ID no. 12728217

SEQ ID NO: 95306 - protein, 180 aa, Arabidopsis thaliana; identical to SEQ ID NO: 91550
  peptide (1)..(180): Ceres Seq. ID no. 12728218

SEQ ID NO: 95307 - DNA, 975 bp, Arabidopsis thaliana; identical to SEQ ID NO: 91551
  misc_feature (1)..(975): Ceres Seq. ID no. 12728219
  misc_feature (1)..(975): Ortholog of  Ceres SEQ ID NO 12614972 as cited in SEQ ID NO 61986
  misc_feature (1)..(975): Ortholog of  Ceres SEQ ID NO 12625706 as cited in SEQ ID NO 64144
  misc_feature (1)..(975): Ortholog of  Ceres SEQ ID NO 13584933 as cited in SEQ ID NO 65009
  misc_feature (1)..(975): Ortholog of  Ceres SEQ ID NO 12634984 as cited in SEQ ID NO 0
  misc_feature (1)..(975): Ortholog of  Ceres SEQ ID NO 13599377 as cited in SEQ ID NO 0

SEQ ID NO: 95308 - protein, 324 aa, Arabidopsis thaliana; identical to SEQ ID NO: 91552
  peptide (1)..(324): Ceres Seq. ID no. 12728220

SEQ ID NO: 95309 - DNA, 1098 bp, Arabidopsis thaliana; identical to SEQ ID NO: 91553
  misc_feature (1)..(1098): Ceres Seq. ID no. 12728241
  misc_feature (1)..(1098): Ortholog of  Ceres SEQ ID NO 13579918 as cited in SEQ ID NO 64644
  misc_feature (1)..(1098): Ortholog of  Ceres SEQ ID NO 13654122 as cited in SEQ ID NO 68192

SEQ ID NO: 95310 - protein, 365 aa, Arabidopsis thaliana; identical to SEQ ID NO: 91554
  peptide (1)..(365): Ceres Seq. ID no. 12728242

SEQ ID NO: 95311 - protein, 298 aa, Arabidopsis thaliana; identical to SEQ ID NO: 91555
  peptide (1)..(298): Ceres Seq. ID no. 12728243

SEQ ID NO: 95312 - protein, 277 aa, Arabidopsis thaliana; identical to SEQ ID NO: 91556
  peptide (1)..(277): Ceres Seq. ID no. 12728244

SEQ ID NO: 95313 - DNA, 1431 bp, Arabidopsis thaliana; identical to SEQ ID NO: 91557
  misc_feature (1)..(1431): Ceres Seq. ID no. 12728249
  misc_feature (1)..(1431): Ortholog of  Ceres SEQ ID NO 13660287 as cited in SEQ ID NO 67316

SEQ ID NO: 95314 - protein, 476 aa, Arabidopsis thaliana; identical to SEQ ID NO: 91558
  peptide (1)..(476): Ceres Seq. ID no. 12728250

SEQ ID NO: 95315 - protein, 439 aa, Arabidopsis thaliana; identical to SEQ ID NO: 91559
  peptide (1)..(439): Ceres Seq. ID no. 12728251

SEQ ID NO: 95316 - protein, 423 aa, Arabidopsis thaliana; identical to SEQ ID NO: 91560
  peptide (1)..(423): Ceres Seq. ID no. 12728252

SEQ ID NO: 95317 - DNA, 1431 bp, Arabidopsis thaliana; identical to SEQ ID NO: 91561
  misc_feature (1)..(1431): Ceres Seq. ID no. 12728253
  misc_feature (1)..(1431): Ortholog of  Ceres SEQ ID NO 13660287 as cited in SEQ ID NO 67316

SEQ ID NO: 95318 - protein, 476 aa, Arabidopsis thaliana; identical to SEQ ID NO: 91562
  peptide (1)..(476): Ceres Seq. ID no. 12728254

SEQ ID NO: 95319 - protein, 439 aa, Arabidopsis thaliana; identical to SEQ ID NO: 91563
  peptide (1)..(439): Ceres Seq. ID no. 12728255

SEQ ID NO: 95320 - protein, 423 aa, Arabidopsis thaliana; identical to SEQ ID NO: 91564
  peptide (1)..(423): Ceres Seq. ID no. 12728256

SEQ ID NO: 95321 - DNA, 2397 bp, Arabidopsis thaliana; identical to SEQ ID NO: 91565
  misc_feature (1)..(2397): Ceres Seq. ID no. 12728299
  misc_feature (1)..(2397): Ortholog of  Ceres SEQ ID NO 13655988 as cited in SEQ ID NO 65557

SEQ ID NO: 95322 - protein, 798 aa, Arabidopsis thaliana; identical to SEQ ID NO: 91566
  peptide (1)..(798): Ceres Seq. ID no. 12728300

SEQ ID NO: 95323 - protein, 630 aa, Arabidopsis thaliana; identical to SEQ ID NO: 91567
  peptide (1)..(630): Ceres Seq. ID no. 12728301

SEQ ID NO: 95324 - protein, 405 aa, Arabidopsis thaliana; identical to SEQ ID NO: 91568
  peptide (1)..(405): Ceres Seq. ID no. 12728302

SEQ ID NO: 95325 - DNA, 2322 bp, Arabidopsis thaliana; identical to SEQ ID NO: 91569
  misc_feature (1)..(2322): Ceres Seq. ID no. 12728312
  misc_feature (1)..(2322): Ortholog of  Ceres SEQ ID NO 12465083 as cited in SEQ ID NO 68239

SEQ ID NO: 95326 - protein, 773 aa, Arabidopsis thaliana; identical to SEQ ID NO: 91570
  peptide (1)..(773): Ceres Seq. ID no. 12728313

SEQ ID NO: 95327 - protein, 736 aa, Arabidopsis thaliana; identical to SEQ ID NO: 91571
  peptide (1)..(736): Ceres Seq. ID no. 12728314

SEQ ID NO: 95328 - protein, 726 aa, Arabidopsis thaliana; identical to SEQ ID NO: 91572
  peptide (1)..(726): Ceres Seq. ID no. 12728315

SEQ ID NO: 95329 - DNA, 1943 bp, Arabidopsis thaliana; identical to SEQ ID NO: 91573
  misc_feature (1)..(1943): Ceres Seq. ID no. 12728316
  misc_feature (1)..(1943): Ortholog of  Ceres SEQ ID NO 15176081 as cited in SEQ ID NO 65838
  misc_feature (1)..(1943): Ortholog of  Ceres SEQ ID NO 13660287 as cited in SEQ ID NO 67316

SEQ ID NO: 95330 - protein, 534 aa, Arabidopsis thaliana; identical to SEQ ID NO: 91574
  peptide (1)..(534): Ceres Seq. ID no. 12728317

SEQ ID NO: 95331 - protein, 503 aa, Arabidopsis thaliana; identical to SEQ ID NO: 91575
  peptide (1)..(503): Ceres Seq. ID no. 12728318

SEQ ID NO: 95332 - protein, 476 aa, Arabidopsis thaliana; identical to SEQ ID NO: 91576
  peptide (1)..(476): Ceres Seq. ID no. 12728319

SEQ ID NO: 95333 - DNA, 1155 bp, Arabidopsis thaliana; identical to SEQ ID NO: 91577
  misc_feature (1)..(1155): Ceres Seq. ID no. 12728327
  misc_feature (1)..(1155): Ortholog of  Ceres SEQ ID NO 15170209 as cited in SEQ ID NO 58562
  misc_feature (1)..(1155): Ortholog of  Ceres SEQ ID NO 12616332 as cited in SEQ ID NO 63449
  misc_feature (1)..(1155): Ortholog of  Ceres SEQ ID NO 13597498 as cited in SEQ ID NO 64648

SEQ ID NO: 95334 - protein, 384 aa, Arabidopsis thaliana; identical to SEQ ID NO: 91578
  peptide (1)..(384): Ceres Seq. ID no. 12728328

SEQ ID NO: 95335 - protein, 360 aa, Arabidopsis thaliana; identical to SEQ ID NO: 91579
  peptide (1)..(360): Ceres Seq. ID no. 12728329

SEQ ID NO: 95336 - protein, 351 aa, Arabidopsis thaliana; identical to SEQ ID NO: 91580
  peptide (1)..(351): Ceres Seq. ID no. 12728330

SEQ ID NO: 95337 - DNA, 2568 bp, Arabidopsis thaliana; identical to SEQ ID NO: 91581
  misc_feature (1)..(2568): Ceres Seq. ID no. 12728364
  misc_feature (1)..(2568): Ortholog of  Ceres SEQ ID NO 15169142 as cited in SEQ ID NO 58748

SEQ ID NO: 95338 - protein, 375 aa, Arabidopsis thaliana; identical to SEQ ID NO: 91582
  peptide (1)..(375): Ceres Seq. ID no. 12728365

SEQ ID NO: 95339 - protein, 327 aa, Arabidopsis thaliana; identical to SEQ ID NO: 91583
  peptide (1)..(327): Ceres Seq. ID no. 12728366

SEQ ID NO: 95340 - protein, 325 aa, Arabidopsis thaliana; identical to SEQ ID NO: 91584
  peptide (1)..(325): Ceres Seq. ID no. 12728367

SEQ ID NO: 95341 - DNA, 888 bp, Arabidopsis thaliana; identical to SEQ ID NO: 91585
  misc_feature (1)..(888): Ceres Seq. ID no. 12728373
  misc_feature (1)..(888): Ortholog of  Ceres SEQ ID NO 14311878 as cited in SEQ ID NO 51611

SEQ ID NO: 95342 - protein, 295 aa, Arabidopsis thaliana; identical to SEQ ID NO: 91586
  peptide (1)..(295): Ceres Seq. ID no. 12728374

SEQ ID NO: 95343 - protein, 199 aa, Arabidopsis thaliana; identical to SEQ ID NO: 91587
  peptide (1)..(199): Ceres Seq. ID no. 12728375

SEQ ID NO: 95344 - protein, 181 aa, Arabidopsis thaliana; identical to SEQ ID NO: 91588
  peptide (1)..(181): Ceres Seq. ID no. 12728376

SEQ ID NO: 95345 - DNA, 2444 bp, Arabidopsis thaliana; identical to SEQ ID NO: 91589
  misc_feature (1)..(2444): Ceres Seq. ID no. 12728377
  misc_feature (1)..(2444): Ortholog of  Ceres SEQ ID NO 14302746 as cited in SEQ ID NO 66646

SEQ ID NO: 95346 - protein, 744 aa, Arabidopsis thaliana; identical to SEQ ID NO: 91590
  peptide (1)..(744): Ceres Seq. ID no. 12728378

SEQ ID NO: 95347 - protein, 634 aa, Arabidopsis thaliana; identical to SEQ ID NO: 91591
  peptide (1)..(634): Ceres Seq. ID no. 12728379

SEQ ID NO: 95348 - protein, 599 aa, Arabidopsis thaliana; identical to SEQ ID NO: 91592
  peptide (1)..(599): Ceres Seq. ID no. 12728380

SEQ ID NO: 95349 - DNA, 1188 bp, Arabidopsis thaliana; identical to SEQ ID NO: 91593
  misc_feature (1)..(1188): Ceres Seq. ID no. 12728424
  misc_feature (1)..(1188): Ortholog of  Ceres SEQ ID NO 13582619 as cited in SEQ ID NO 56520
  misc_feature (1)..(1188): Ortholog of  Ceres SEQ ID NO 13660872 as cited in SEQ ID NO 60830
  misc_feature (1)..(1188): Ortholog of  Ceres SEQ ID NO 15226831 as cited in SEQ ID NO 62916
  misc_feature (1)..(1188): Ortholog of  Ceres SEQ ID NO 12616221 as cited in SEQ ID NO 63291

SEQ ID NO: 95350 - protein, 395 aa, Arabidopsis thaliana; identical to SEQ ID NO: 91594
  peptide (1)..(395): Ceres Seq. ID no. 12728425

SEQ ID NO: 95351 - protein, 287 aa, Arabidopsis thaliana; identical to SEQ ID NO: 91595
  peptide (1)..(287): Ceres Seq. ID no. 12728426

SEQ ID NO: 95352 - protein, 266 aa, Arabidopsis thaliana; identical to SEQ ID NO: 91596
  peptide (1)..(266): Ceres Seq. ID no. 12728427

SEQ ID NO: 95353 - DNA, 1518 bp, Arabidopsis thaliana; identical to SEQ ID NO: 91597
  misc_feature (1)..(1518): Ceres Seq. ID no. 12728436
  misc_feature (1)..(1518): Ortholog of  Ceres SEQ ID NO 15171181 as cited in SEQ ID NO 56848

SEQ ID NO: 95354 - protein, 505 aa, Arabidopsis thaliana; identical to SEQ ID NO: 91598
  peptide (1)..(505): Ceres Seq. ID no. 12728437

SEQ ID NO: 95355 - protein, 300 aa, Arabidopsis thaliana; identical to SEQ ID NO: 91599
  peptide (1)..(300): Ceres Seq. ID no. 12728438

SEQ ID NO: 95356 - DNA, 789 bp, Arabidopsis thaliana; identical to SEQ ID NO: 91600
  misc_feature (1)..(789): Ceres Seq. ID no. 12728462
  misc_feature (1)..(789): Ortholog of  Ceres SEQ ID NO 13596519 as cited in SEQ ID NO 62572
  misc_feature (1)..(789): Ortholog of  Ceres SEQ ID NO 12625108 as cited in SEQ ID NO 68102

SEQ ID NO: 95357 - protein, 262 aa, Arabidopsis thaliana; identical to SEQ ID NO: 91601
  peptide (1)..(262): Ceres Seq. ID no. 12728463

SEQ ID NO: 95358 - protein, 209 aa, Arabidopsis thaliana; identical to SEQ ID NO: 91602
  peptide (1)..(209): Ceres Seq. ID no. 12728464

SEQ ID NO: 95359 - DNA, 1970 bp, Arabidopsis thaliana; identical to SEQ ID NO: 91603
  misc_feature (1)..(1970): Ceres Seq. ID no. 12728465
  misc_feature (1)..(1970): Ortholog of  Ceres SEQ ID NO 13596509 as cited in SEQ ID NO 62004
  misc_feature (1)..(1970): Ortholog of  Ceres SEQ ID NO 14307904 as cited in SEQ ID NO 66440
  misc_feature (1)..(1970): Ortholog of  Ceres SEQ ID NO 13659971 as cited in SEQ ID NO 67565
  misc_feature (1)..(1970): Ortholog of  Ceres SEQ ID NO 13500385 as cited in SEQ ID NO 67583

SEQ ID NO: 95360 - protein, 522 aa, Arabidopsis thaliana; identical to SEQ ID NO: 91604
  peptide (1)..(522): Ceres Seq. ID no. 12728466

SEQ ID NO: 95361 - protein, 520 aa, Arabidopsis thaliana; identical to SEQ ID NO: 91605
  peptide (1)..(520): Ceres Seq. ID no. 12728467

SEQ ID NO: 95362 - protein, 437 aa, Arabidopsis thaliana; identical to SEQ ID NO: 91606
  peptide (1)..(437): Ceres Seq. ID no. 12728468

SEQ ID NO: 95363 - DNA, 630 bp, Arabidopsis thaliana; identical to SEQ ID NO: 91607
  misc_feature (1)..(630): Ceres Seq. ID no. 12728473
  misc_feature (1)..(630): Ortholog of  Ceres SEQ ID NO 13661642 as cited in SEQ ID NO 61598

SEQ ID NO: 95364 - protein, 209 aa, Arabidopsis thaliana; identical to SEQ ID NO: 91608
  peptide (1)..(209): Ceres Seq. ID no. 12728474

SEQ ID NO: 95365 - protein, 199 aa, Arabidopsis thaliana; identical to SEQ ID NO: 91609
  peptide (1)..(199): Ceres Seq. ID no. 12728475

SEQ ID NO: 95366 - protein, 146 aa, Arabidopsis thaliana; identical to SEQ ID NO: 91610
  peptide (1)..(146): Ceres Seq. ID no. 12728476

SEQ ID NO: 95367 - DNA, 567 bp, Arabidopsis thaliana; identical to SEQ ID NO: 91611
  misc_feature (1)..(567): Ceres Seq. ID no. 12728481
  misc_feature (1)..(567): Ortholog of  Ceres SEQ ID NO 14306809 as cited in SEQ ID NO 57963

SEQ ID NO: 95368 - protein, 188 aa, Arabidopsis thaliana; identical to SEQ ID NO: 91612
  peptide (1)..(188): Ceres Seq. ID no. 12728482

SEQ ID NO: 95369 - protein, 144 aa, Arabidopsis thaliana; identical to SEQ ID NO: 91613
  peptide (1)..(144): Ceres Seq. ID no. 12728483

SEQ ID NO: 95370 - protein, 141 aa, Arabidopsis thaliana; identical to SEQ ID NO: 91614
  peptide (1)..(141): Ceres Seq. ID no. 12728484

SEQ ID NO: 95371 - DNA, 1437 bp, Arabidopsis thaliana; identical to SEQ ID NO: 91615
  misc_feature (1)..(1437): Ceres Seq. ID no. 12728504
  misc_feature (1)..(1437): Ortholog of  Ceres SEQ ID NO 15176532 as cited in SEQ ID NO 58184
  misc_feature (1)..(1437): Ortholog of  Ceres SEQ ID NO 13597546 as cited in SEQ ID NO 65017
  misc_feature (1)..(1437): Ortholog of  Ceres SEQ ID NO 14307912 as cited in SEQ ID NO 66380
  misc_feature (1)..(1437): Ortholog of  Ceres SEQ ID NO 14308045 as cited in SEQ ID NO 67444
  misc_feature (1)..(1437): Ortholog of  Ceres SEQ ID NO 13654353 as cited in SEQ ID NO 68318

SEQ ID NO: 95372 - protein, 478 aa, Arabidopsis thaliana; identical to SEQ ID NO: 91616
  peptide (1)..(478): Ceres Seq. ID no. 12728505

SEQ ID NO: 95373 - protein, 443 aa, Arabidopsis thaliana; identical to SEQ ID NO: 91617
  peptide (1)..(443): Ceres Seq. ID no. 12728506

SEQ ID NO: 95374 - protein, 355 aa, Arabidopsis thaliana; identical to SEQ ID NO: 91618
  peptide (1)..(355): Ceres Seq. ID no. 12728507

SEQ ID NO: 95375 - DNA, 1107 bp, Arabidopsis thaliana; identical to SEQ ID NO: 91619
  misc_feature (1)..(1107): Ceres Seq. ID no. 12728512
  misc_feature (1)..(1107): Ortholog of  Ceres SEQ ID NO 15169350 as cited in SEQ ID NO 53271

SEQ ID NO: 95376 - protein, 368 aa, Arabidopsis thaliana; identical to SEQ ID NO: 91620
  peptide (1)..(368): Ceres Seq. ID no. 12728513

SEQ ID NO: 95377 - protein, 297 aa, Arabidopsis thaliana; identical to SEQ ID NO: 91621
  peptide (1)..(297): Ceres Seq. ID no. 12728514

SEQ ID NO: 95378 - protein, 292 aa, Arabidopsis thaliana; identical to SEQ ID NO: 91622
  peptide (1)..(292): Ceres Seq. ID no. 12728515

SEQ ID NO: 95379 - DNA, 1002 bp, Arabidopsis thaliana; identical to SEQ ID NO: 91623
  misc_feature (1)..(1002): Ceres Seq. ID no. 12728522
  misc_feature (1)..(1002): Ortholog of  Ceres SEQ ID NO 12609041 as cited in SEQ ID NO 51310
  misc_feature (1)..(1002): Ortholog of  Ceres SEQ ID NO 13594966 as cited in SEQ ID NO 56152
  misc_feature (1)..(1002): Ortholog of  Ceres SEQ ID NO 14312140 as cited in SEQ ID NO 57002
  misc_feature (1)..(1002): Ortholog of  Ceres SEQ ID NO 14312224 as cited in SEQ ID NO 57255
  misc_feature (1)..(1002): Ortholog of  Ceres SEQ ID NO 12582457 as cited in SEQ ID NO 57530

SEQ ID NO: 95380 - protein, 203 aa, Arabidopsis thaliana; identical to SEQ ID NO: 91624
  peptide (1)..(203): Ceres Seq. ID no. 12728523

SEQ ID NO: 95381 - protein, 173 aa, Arabidopsis thaliana; identical to SEQ ID NO: 91625
  peptide (1)..(173): Ceres Seq. ID no. 12728524

SEQ ID NO: 95382 - protein, 152 aa, Arabidopsis thaliana; identical to SEQ ID NO: 91626
  peptide (1)..(152): Ceres Seq. ID no. 12728525

SEQ ID NO: 95383 - DNA, 1569 bp, Arabidopsis thaliana; identical to SEQ ID NO: 91627
  misc_feature (1)..(1569): Ceres Seq. ID no. 12728530
  misc_feature (1)..(1569): Ortholog of  Ceres SEQ ID NO 13660287 as cited in SEQ ID NO 67316

SEQ ID NO: 95384 - protein, 522 aa, Arabidopsis thaliana; identical to SEQ ID NO: 91628
  peptide (1)..(522): Ceres Seq. ID no. 12728531

SEQ ID NO: 95385 - protein, 494 aa, Arabidopsis thaliana; identical to SEQ ID NO: 91629
  peptide (1)..(494): Ceres Seq. ID no. 12728532

SEQ ID NO: 95386 - protein, 440 aa, Arabidopsis thaliana; identical to SEQ ID NO: 91630
  peptide (1)..(440): Ceres Seq. ID no. 12728533

SEQ ID NO: 95387 - DNA, 1637 bp, Arabidopsis thaliana; identical to SEQ ID NO: 91631
  misc_feature (1)..(1637): Ceres Seq. ID no. 12728534
  misc_feature (1)..(1637): Ortholog of  Ceres SEQ ID NO 14315279 as cited in SEQ ID NO 52534
  misc_feature (1)..(1637): Ortholog of  Ceres SEQ ID NO 12583190 as cited in SEQ ID NO 56386

SEQ ID NO: 95388 - protein, 493 aa, Arabidopsis thaliana; identical to SEQ ID NO: 91632
  peptide (1)..(493): Ceres Seq. ID no. 12728535

SEQ ID NO: 95389 - protein, 464 aa, Arabidopsis thaliana; identical to SEQ ID NO: 91633
  peptide (1)..(464): Ceres Seq. ID no. 12728536

SEQ ID NO: 95390 - DNA, 1785 bp, Arabidopsis thaliana; identical to SEQ ID NO: 91634
  misc_feature (1)..(1785): Ceres Seq. ID no. 12728541
  misc_feature (1)..(1785): Ortholog of  Ceres SEQ ID NO 14303423 as cited in SEQ ID NO 54243
  misc_feature (1)..(1785): Ortholog of  Ceres SEQ ID NO 12611314 as cited in SEQ ID NO 56535
  misc_feature (1)..(1785): Ortholog of  Ceres SEQ ID NO 13661438 as cited in SEQ ID NO 61414

SEQ ID NO: 95391 - protein, 401 aa, Arabidopsis thaliana; identical to SEQ ID NO: 91635
  peptide (1)..(401): Ceres Seq. ID no. 12728542

SEQ ID NO: 95392 - protein, 381 aa, Arabidopsis thaliana; identical to SEQ ID NO: 91636
  peptide (1)..(381): Ceres Seq. ID no. 12728543

SEQ ID NO: 95393 - protein, 292 aa, Arabidopsis thaliana; identical to SEQ ID NO: 91637
  peptide (1)..(292): Ceres Seq. ID no. 12728544

SEQ ID NO: 95394 - DNA, 2165 bp, Arabidopsis thaliana; identical to SEQ ID NO: 91638
  misc_feature (1)..(2165): Ceres Seq. ID no. 12728545
  misc_feature (1)..(2165): Ortholog of  Ceres SEQ ID NO 14305215 as cited in SEQ ID NO 0

SEQ ID NO: 95395 - protein, 608 aa, Arabidopsis thaliana [sequence omitted]

SEQ ID NO: 95396 - protein, 542 aa, Arabidopsis thaliana; identical to SEQ ID NO: 91640
  peptide (1)..(542): Ceres Seq. ID no. 12728547

SEQ ID NO: 95397 - protein, 484 aa, Arabidopsis thaliana; identical to SEQ ID NO: 91641
  peptide (1)..(484): Ceres Seq. ID no. 12728548

SEQ ID NO: 95398 - DNA, 1620 bp, Arabidopsis thaliana; identical to SEQ ID NO: 91642
  misc_feature (1)..(1620): Ceres Seq. ID no. 12728556
  misc_feature (1)..(1620): Ortholog of  Ceres SEQ ID NO 13594209 as cited in SEQ ID NO 59089
  misc_feature (1)..(1620): Ortholog of  Ceres SEQ ID NO 14313084 as cited in SEQ ID NO 59183
  misc_feature (1)..(1620): Ortholog of  Ceres SEQ ID NO 14308041 as cited in SEQ ID NO 62601
  misc_feature (1)..(1620): Ortholog of  Ceres SEQ ID NO 14307995 as cited in SEQ ID NO 63970
  misc_feature (1)..(1620): Ortholog of  Ceres SEQ ID NO 14303546 as cited in SEQ ID NO 64893
  misc_feature (1)..(1620): Ortholog of  Ceres SEQ ID NO 15176091 as cited in SEQ ID NO 65733
  misc_feature (1)..(1620): Ortholog of  Ceres SEQ ID NO 14308007 as cited in SEQ ID NO 65760
  misc_feature (1)..(1620): Ortholog of  Ceres SEQ ID NO 14308027 as cited in SEQ ID NO 65826
  misc_feature (1)..(1620): Ortholog of  Ceres SEQ ID NO 15170163 as cited in SEQ ID NO 66262
  misc_feature (1)..(1620): Ortholog of  Ceres SEQ ID NO 13502874 as cited in SEQ ID NO 66298
  misc_feature (1)..(1620): Ortholog of  Ceres SEQ ID NO 15169631 as cited in SEQ ID NO 67173
  misc_feature (1)..(1620): Ortholog of  Ceres SEQ ID NO 12614124 as cited in SEQ ID NO 68392

SEQ ID NO: 95399 - protein, 505 aa, Arabidopsis thaliana; identical to SEQ ID NO: 91643
  peptide (1)..(505): Ceres Seq. ID no. 12728557

SEQ ID NO: 95400 - protein, 502 aa, Arabidopsis thaliana; identical to SEQ ID NO: 91644
  peptide (1)..(502): Ceres Seq. ID no. 12728558

SEQ ID NO: 95401 - DNA, 1473 bp, Arabidopsis thaliana; identical to SEQ ID NO: 91645
  misc_feature (1)..(1473): Ceres Seq. ID no. 12728559
  misc_feature (1)..(1473): Ortholog of  Ceres SEQ ID NO 13594209 as cited in SEQ ID NO 59089
  misc_feature (1)..(1473): Ortholog of  Ceres SEQ ID NO 13502874 as cited in SEQ ID NO 66298
  misc_feature (1)..(1473): Ortholog of  Ceres SEQ ID NO 12614124 as cited in SEQ ID NO 68392

SEQ ID NO: 95402 - protein, 490 aa, Arabidopsis thaliana; identical to SEQ ID NO: 91646
  peptide (1)..(490): Ceres Seq. ID no. 12728560

SEQ ID NO: 95403 - protein, 371 aa, Arabidopsis thaliana; identical to SEQ ID NO: 91647
  peptide (1)..(371): Ceres Seq. ID no. 12728561

SEQ ID NO: 95404 - protein, 283 aa, Arabidopsis thaliana; identical to SEQ ID NO: 91648
  peptide (1)..(283): Ceres Seq. ID no. 12728562

SEQ ID NO: 95405 - DNA, 1691 bp, Arabidopsis thaliana; identical to SEQ ID NO: 91649
  misc_feature (1)..(1691): Ceres Seq. ID no. 12728563
  misc_feature (1)..(1691): Ortholog of  Ceres SEQ ID NO 13594209 as cited in SEQ ID NO 59089
  misc_feature (1)..(1691): Ortholog of  Ceres SEQ ID NO 14313084 as cited in SEQ ID NO 59183
  misc_feature (1)..(1691): Ortholog of  Ceres SEQ ID NO 13502874 as cited in SEQ ID NO 66298
  misc_feature (1)..(1691): Ortholog of  Ceres SEQ ID NO 15169631 as cited in SEQ ID NO 67173
  misc_feature (1)..(1691): Ortholog of  Ceres SEQ ID NO 12614124 as cited in SEQ ID NO 68392

SEQ ID NO: 95406 - protein, 504 aa, Arabidopsis thaliana; identical to SEQ ID NO: 76886
  peptide (1)..(504): Ceres Seq. ID no. 12728564

SEQ ID NO: 95407 - protein, 438 aa, Arabidopsis thaliana; identical to SEQ ID NO: 76887
  peptide (1)..(438): Ceres Seq. ID no. 12728565

SEQ ID NO: 95408 - protein, 398 aa, Arabidopsis thaliana; identical to SEQ ID NO: 91652
  peptide (1)..(398): Ceres Seq. ID no. 12728566

SEQ ID NO: 95409 - DNA, 1170 bp, Arabidopsis thaliana; identical to SEQ ID NO: 91653
  misc_feature (1)..(1170): Ceres Seq. ID no. 12728599
  misc_feature (1)..(1170): Ortholog of  Ceres SEQ ID NO 14313743 as cited in SEQ ID NO 59555

SEQ ID NO: 95410 - protein, 389 aa, Arabidopsis thaliana; identical to SEQ ID NO: 91654
  peptide (1)..(389): Ceres Seq. ID no. 12728600

SEQ ID NO: 95411 - protein, 296 aa, Arabidopsis thaliana; identical to SEQ ID NO: 91655
  peptide (1)..(296): Ceres Seq. ID no. 12728601

SEQ ID NO: 95412 - protein, 219 aa, Arabidopsis thaliana; identical to SEQ ID NO: 91656
  peptide (1)..(219): Ceres Seq. ID no. 12728602

SEQ ID NO: 95413 - DNA, 531 bp, Arabidopsis thaliana; identical to SEQ ID NO: 91657
  misc_feature (1)..(531): Ceres Seq. ID no. 12728619
  misc_feature (1)..(531): Ortholog of  Ceres SEQ ID NO 15174355 as cited in SEQ ID NO 0

SEQ ID NO: 95414 - protein, 176 aa, Arabidopsis thaliana; identical to SEQ ID NO: 91658
  peptide (1)..(176): Ceres Seq. ID no. 12728620

SEQ ID NO: 95415 - protein, 175 aa, Arabidopsis thaliana; identical to SEQ ID NO: 91659
  peptide (1)..(175): Ceres Seq. ID no. 12728621

SEQ ID NO: 95416 - protein, 162 aa, Arabidopsis thaliana; identical to SEQ ID NO: 91660
  peptide (1)..(162): Ceres Seq. ID no. 12728622

SEQ ID NO: 95417 - DNA, 1020 bp, Arabidopsis thaliana; identical to SEQ ID NO: 91661
  misc_feature (1)..(1020): Ceres Seq. ID no. 12728623
  misc_feature (1)..(1020): Ortholog of  Ceres SEQ ID NO 12614972 as cited in SEQ ID NO 61986
  misc_feature (1)..(1020): Ortholog of  Ceres SEQ ID NO 12625706 as cited in SEQ ID NO 64144
  misc_feature (1)..(1020): Ortholog of  Ceres SEQ ID NO 13584933 as cited in SEQ ID NO 65009
  misc_feature (1)..(1020): Ortholog of  Ceres SEQ ID NO 12634984 as cited in SEQ ID NO 0
  misc_feature (1)..(1020): Ortholog of  Ceres SEQ ID NO 13599377 as cited in SEQ ID NO 0

SEQ ID NO: 95418 - protein, 339 aa, Arabidopsis thaliana; identical to SEQ ID NO: 91662
  peptide (1)..(339): Ceres Seq. ID no. 12728624

SEQ ID NO: 95419 - protein, 187 aa, Arabidopsis thaliana; identical to SEQ ID NO: 91663
  peptide (1)..(187): Ceres Seq. ID no. 12728625

SEQ ID NO: 95420 - DNA, 615 bp, Arabidopsis thaliana; identical to SEQ ID NO: 91664
  misc_feature (1)..(615): Ceres Seq. ID no. 12728700
  misc_feature (1)..(615): Ortholog of  Ceres SEQ ID NO 13599568 as cited in SEQ ID NO 509
  misc_feature (1)..(615): Ortholog of  Ceres SEQ ID NO 15172903 as cited in SEQ ID NO 51839
  misc_feature (1)..(615): Ortholog of  Ceres SEQ ID NO 15177108 as cited in SEQ ID NO 52015
  misc_feature (1)..(615): Ortholog of  Ceres SEQ ID NO 13638595 as cited in SEQ ID NO 52050
  misc_feature (1)..(615): Ortholog of  Ceres SEQ ID NO 13594748 as cited in SEQ ID NO 52114
  misc_feature (1)..(615): Ortholog of  Ceres SEQ ID NO 15173596 as cited in SEQ ID NO 63267
  misc_feature (1)..(615): Ortholog of  Ceres SEQ ID NO 12583993 as cited in SEQ ID NO 68098
  misc_feature (1)..(615): Ortholog of  Ceres SEQ ID NO 13654535 as cited in SEQ ID NO 68227

SEQ ID NO: 95421 - protein, 204 aa, Arabidopsis thaliana; identical to SEQ ID NO: 44280
  peptide (1)..(204): Ceres Seq. ID no. 12728701

SEQ ID NO: 95422 - protein, 123 aa, Arabidopsis thaliana; identical to SEQ ID NO: 91666
  peptide (1)..(123): Ceres Seq. ID no. 12728702

SEQ ID NO: 95423 - DNA, 1736 bp, Arabidopsis thaliana; identical to SEQ ID NO: 91667
  misc_feature (1)..(1736): Ceres Seq. ID no. 12728711
  misc_feature (1)..(1736): Ortholog of  Ceres SEQ ID NO 13581563 as cited in SEQ ID NO 58942
  misc_feature (1)..(1736): Ortholog of  Ceres SEQ ID NO 13658707 as cited in SEQ ID NO 66286
  misc_feature (1)..(1736): Ortholog of  Ceres SEQ ID NO 13654528 as cited in SEQ ID NO 68080

SEQ ID NO: 95424 - protein, 506 aa, Arabidopsis thaliana; identical to SEQ ID NO: 91668
  peptide (1)..(506): Ceres Seq. ID no. 12728712

SEQ ID NO: 95425 - protein, 364 aa, Arabidopsis thaliana; identical to SEQ ID NO: 91669
  peptide (1)..(364): Ceres Seq. ID no. 12728713

SEQ ID NO: 95426 - protein, 342 aa, Arabidopsis thaliana; identical to SEQ ID NO: 79534
  peptide (1)..(342): Ceres Seq. ID no. 12728714

SEQ ID NO: 95427 - DNA, 537 bp, Arabidopsis thaliana; identical to SEQ ID NO: 91671
  misc_feature (1)..(537): Ceres Seq. ID no. 12728715
  misc_feature (1)..(537): Ortholog of  Ceres SEQ ID NO 15170337 as cited in SEQ ID NO 57970

SEQ ID NO: 95428 - protein, 178 aa, Arabidopsis thaliana; identical to SEQ ID NO: 91672
  peptide (1)..(178): Ceres Seq. ID no. 12728716

SEQ ID NO: 95429 - DNA, 819 bp, Arabidopsis thaliana; identical to SEQ ID NO: 91673
  misc_feature (1)..(819): Ceres Seq. ID no. 12728717
  misc_feature (1)..(819): Ortholog of  Ceres SEQ ID NO 12613614 as cited in SEQ ID NO 68243
  misc_feature (1)..(819): Ortholog of  Ceres SEQ ID NO 12556636 as cited in SEQ ID NO 0
  misc_feature (1)..(819): Ortholog of  Ceres SEQ ID NO 13600066 as cited in SEQ ID NO 0
  misc_feature (1)..(819): Ortholog of  Ceres SEQ ID NO 15179946 as cited in SEQ ID NO 0

SEQ ID NO: 95430 - protein, 173 aa, Arabidopsis thaliana; identical to SEQ ID NO: 29808
  peptide (1)..(173): Ceres Seq. ID no. 12728718

SEQ ID NO: 95431 - protein, 137 aa, Arabidopsis thaliana; identical to SEQ ID NO: 29809
  peptide (1)..(137): Ceres Seq. ID no. 12728719

SEQ ID NO: 95432 - protein, 100 aa, Arabidopsis thaliana; identical to SEQ ID NO: 29810
  peptide (1)..(100): Ceres Seq. ID no. 12728720

SEQ ID NO: 95433 - DNA, 1360 bp, Arabidopsis thaliana; identical to SEQ ID NO: 91677
  misc_feature (1)..(1360): Ceres Seq. ID no. 12728755
  misc_feature (1)..(1360): Ortholog of  Ceres SEQ ID NO 13597638 as cited in SEQ ID NO 65448
  misc_feature (1)..(1360): Ortholog of  Ceres SEQ ID NO 14302772 as cited in SEQ ID NO 69055

SEQ ID NO: 95434 - protein, 381 aa, Arabidopsis thaliana; identical to SEQ ID NO: 91678
  peptide (1)..(381): Ceres Seq. ID no. 12728756

SEQ ID NO: 95435 - protein, 361 aa, Arabidopsis thaliana; identical to SEQ ID NO: 36043
  peptide (1)..(361): Ceres Seq. ID no. 12728757

SEQ ID NO: 95436 - protein, 322 aa, Arabidopsis thaliana; identical to SEQ ID NO: 36044
  peptide (1)..(322): Ceres Seq. ID no. 12728758

SEQ ID NO: 95437 - DNA, 1080 bp, Arabidopsis thaliana; identical to SEQ ID NO: 91681
  misc_feature (1)..(1080): Ceres Seq. ID no. 12728759
  misc_feature (1)..(1080): Ortholog of  Ceres SEQ ID NO 15169976 as cited in SEQ ID NO 60438

SEQ ID NO: 95438 - protein, 318 aa, Arabidopsis thaliana; identical to SEQ ID NO: 91682
  peptide (1)..(318): Ceres Seq. ID no. 12728760

SEQ ID NO: 95439 - protein, 316 aa, Arabidopsis thaliana; identical to SEQ ID NO: 91683
  peptide (1)..(316): Ceres Seq. ID no. 12728761

SEQ ID NO: 95440 - DNA, 570 bp, Arabidopsis thaliana; identical to SEQ ID NO: 91684
  misc_feature (1)..(570): Ceres Seq. ID no. 12728798
  misc_feature (1)..(570): Ortholog of  Ceres SEQ ID NO 12585325 as cited in SEQ ID NO 63062

SEQ ID NO: 95441 - protein, 189 aa, Arabidopsis thaliana; identical to SEQ ID NO: 77692
  peptide (1)..(189): Ceres Seq. ID no. 12728799

SEQ ID NO: 95442 - protein, 110 aa, Arabidopsis thaliana; identical to SEQ ID NO: 77693
  peptide (1)..(110): Ceres Seq. ID no. 12728800

SEQ ID NO: 95443 - protein, 105 aa, Arabidopsis thaliana; identical to SEQ ID NO: 77694
  peptide (1)..(105): Ceres Seq. ID no. 12728801

SEQ ID NO: 95444 - DNA, 923 bp, Arabidopsis thaliana; identical to SEQ ID NO: 91688
  misc_feature (1)..(923): Ceres Seq. ID no. 12728840
  misc_feature (1)..(923): Ortholog of  Ceres SEQ ID NO 14316367 as cited in SEQ ID NO 57626
  misc_feature (1)..(923): Ortholog of  Ceres SEQ ID NO 14315039 as cited in SEQ ID NO 57668
  misc_feature (1)..(923): Ortholog of  Ceres SEQ ID NO 13664189 as cited in SEQ ID NO 66834
  misc_feature (1)..(923): Ortholog of  Ceres SEQ ID NO 13654321 as cited in SEQ ID NO 67850

SEQ ID NO: 95445 - protein, 210 aa, Arabidopsis thaliana; identical to SEQ ID NO: 26646
  peptide (1)..(210): Ceres Seq. ID no. 12728841

SEQ ID NO: 95446 - protein, 183 aa, Arabidopsis thaliana; identical to SEQ ID NO: 26647
  peptide (1)..(183): Ceres Seq. ID no. 12728842

SEQ ID NO: 95447 - protein, 154 aa, Arabidopsis thaliana; identical to SEQ ID NO: 26648
  peptide (1)..(154): Ceres Seq. ID no. 12728843

SEQ ID NO: 95448 - DNA, 1809 bp, Arabidopsis thaliana; identical to SEQ ID NO: 91692
  misc_feature (1)..(1809): Ceres Seq. ID no. 12728880
  misc_feature (1)..(1809): Ortholog of  Ceres SEQ ID NO 15180188 as cited in SEQ ID NO 0

SEQ ID NO: 95449 - protein, 602 aa, Arabidopsis thaliana; identical to SEQ ID NO: 91693
  peptide (1)..(602): Ceres Seq. ID no. 12728881

SEQ ID NO: 95450 - protein, 563 aa, Arabidopsis thaliana; identical to SEQ ID NO: 91694
  peptide (1)..(563): Ceres Seq. ID no. 12728882

SEQ ID NO: 95451 - protein, 484 aa, Arabidopsis thaliana; identical to SEQ ID NO: 91695
  peptide (1)..(484): Ceres Seq. ID no. 12728883

SEQ ID NO: 95452 - DNA, 1083 bp, Arabidopsis thaliana; identical to SEQ ID NO: 91696
  misc_feature (1)..(1083): Ceres Seq. ID no. 12728893
  misc_feature (1)..(1083): Ortholog of  Ceres SEQ ID NO 14304176 as cited in SEQ ID NO 56343

SEQ ID NO: 95453 - protein, 360 aa, Arabidopsis thaliana; identical to SEQ ID NO: 91697
  peptide (1)..(360): Ceres Seq. ID no. 12728894

SEQ ID NO: 95454 - protein, 336 aa, Arabidopsis thaliana; identical to SEQ ID NO: 91698
  peptide (1)..(336): Ceres Seq. ID no. 12728895

SEQ ID NO: 95455 - protein, 242 aa, Arabidopsis thaliana; identical to SEQ ID NO: 91699
  peptide (1)..(242): Ceres Seq. ID no. 12728896

SEQ ID NO: 95456 - DNA, 1428 bp, Arabidopsis thaliana; identical to SEQ ID NO: 91700
  misc_feature (1)..(1428): Ceres Seq. ID no. 12728922
  misc_feature (1)..(1428): Ortholog of  Ceres SEQ ID NO 14303706 as cited in SEQ ID NO 66068

SEQ ID NO: 95457 - protein, 475 aa, Arabidopsis thaliana; identical to SEQ ID NO: 91701
  peptide (1)..(475): Ceres Seq. ID no. 12728923

SEQ ID NO: 95458 - protein, 396 aa, Arabidopsis thaliana; identical to SEQ ID NO: 91702
  peptide (1)..(396): Ceres Seq. ID no. 12728924

SEQ ID NO: 95459 - protein, 330 aa, Arabidopsis thaliana; identical to SEQ ID NO: 91703
  peptide (1)..(330): Ceres Seq. ID no. 12728925

SEQ ID NO: 95460 - DNA, 2194 bp, Arabidopsis thaliana; identical to SEQ ID NO: 91704
  misc_feature (1)..(2194): Ceres Seq. ID no. 12728930
  misc_feature (1)..(2194): Ortholog of  Ceres SEQ ID NO 12544053 as cited in SEQ ID NO 62492

SEQ ID NO: 95461 - protein, 668 aa, Arabidopsis thaliana; identical to SEQ ID NO: 91705
  peptide (1)..(668): Ceres Seq. ID no. 12728931

SEQ ID NO: 95462 - protein, 641 aa, Arabidopsis thaliana; identical to SEQ ID NO: 91706
  peptide (1)..(641): Ceres Seq. ID no. 12728932

SEQ ID NO: 95463 - protein, 544 aa, Arabidopsis thaliana; identical to SEQ ID NO: 91707
  peptide (1)..(544): Ceres Seq. ID no. 12728933

SEQ ID NO: 95464 - DNA, 573 bp, Arabidopsis thaliana; identical to SEQ ID NO: 91708
  misc_feature (1)..(573): Ceres Seq. ID no. 12728950
  misc_feature (1)..(573): Ortholog of  Ceres SEQ ID NO 13595210 as cited in SEQ ID NO 56285

SEQ ID NO: 95465 - protein, 190 aa, Arabidopsis thaliana; identical to SEQ ID NO: 91709
  peptide (1)..(190): Ceres Seq. ID no. 12728951

SEQ ID NO: 95466 - protein, 108 aa, Arabidopsis thaliana; identical to SEQ ID NO: 91710
  peptide (1)..(108): Ceres Seq. ID no. 12728952

SEQ ID NO: 95467 - DNA, 1980 bp, Arabidopsis thaliana; identical to SEQ ID NO: 91711
  misc_feature (1)..(1980): Ceres Seq. ID no. 12728957
  misc_feature (1)..(1980): Ortholog of  Ceres SEQ ID NO 13657677 as cited in SEQ ID NO 66119

SEQ ID NO: 95468 - protein, 659 aa, Arabidopsis thaliana; identical to SEQ ID NO: 91712
  peptide (1)..(659): Ceres Seq. ID no. 12728958

SEQ ID NO: 95469 - protein, 530 aa, Arabidopsis thaliana; identical to SEQ ID NO: 91713
  peptide (1)..(530): Ceres Seq. ID no. 12728959

SEQ ID NO: 95470 - protein, 512 aa, Arabidopsis thaliana; identical to SEQ ID NO: 91714
  peptide (1)..(512): Ceres Seq. ID no. 12728960

SEQ ID NO: 95471 - DNA, 1002 bp, Arabidopsis thaliana; identical to SEQ ID NO: 91715
  misc_feature (1)..(1002): Ceres Seq. ID no. 12728965
  misc_feature (1)..(1002): Ortholog of  Ceres SEQ ID NO 14307280 as cited in SEQ ID NO 59443
  misc_feature (1)..(1002): Ortholog of  Ceres SEQ ID NO 14316536 as cited in SEQ ID NO 60272
  misc_feature (1)..(1002): Ortholog of  Ceres SEQ ID NO 13598570 as cited in SEQ ID NO 65434
  misc_feature (1)..(1002): Ortholog of  Ceres SEQ ID NO 13660333 as cited in SEQ ID NO 67464
  misc_feature (1)..(1002): Ortholog of  Ceres SEQ ID NO 13596238 as cited in SEQ ID NO 68834

SEQ ID NO: 95472 - protein, 333 aa, Arabidopsis thaliana; identical to SEQ ID NO: 42185
  peptide (1)..(333): Ceres Seq. ID no. 12728966

SEQ ID NO: 95473 - protein, 212 aa, Arabidopsis thaliana; identical to SEQ ID NO: 91717
  peptide (1)..(212): Ceres Seq. ID no. 12728967

SEQ ID NO: 95474 - protein, 176 aa, Arabidopsis thaliana; identical to SEQ ID NO: 91718
  peptide (1)..(176): Ceres Seq. ID no. 12728968

SEQ ID NO: 95475 - DNA, 552 bp, Arabidopsis thaliana; identical to SEQ ID NO: 91719
  misc_feature (1)..(552): Ceres Seq. ID no. 12728984
  misc_feature (1)..(552): Ortholog of  Ceres SEQ ID NO 15176173 as cited in SEQ ID NO 0

SEQ ID NO: 95476 - protein, 183 aa, Arabidopsis thaliana; identical to SEQ ID NO: 91720
  peptide (1)..(183): Ceres Seq. ID no. 12728985

SEQ ID NO: 95477 - protein, 118 aa, Arabidopsis thaliana; identical to SEQ ID NO: 91721
  peptide (1)..(118): Ceres Seq. ID no. 12728986

SEQ ID NO: 95478 - protein, 110 aa, Arabidopsis thaliana; identical to SEQ ID NO: 91722
  peptide (1)..(110): Ceres Seq. ID no. 12728987

SEQ ID NO: 95479 - DNA, 1437 bp, Arabidopsis thaliana; identical to SEQ ID NO: 91723
  misc_feature (1)..(1437): Ceres Seq. ID no. 12728992
  misc_feature (1)..(1437): Ortholog of  Ceres SEQ ID NO 13594349 as cited in SEQ ID NO 58161
  misc_feature (1)..(1437): Ortholog of  Ceres SEQ ID NO 13663419 as cited in SEQ ID NO 66561

SEQ ID NO: 95480 - protein, 478 aa, Arabidopsis thaliana; identical to SEQ ID NO: 91724
  peptide (1)..(478): Ceres Seq. ID no. 12728993

SEQ ID NO: 95481 - protein, 472 aa, Arabidopsis thaliana; identical to SEQ ID NO: 91725
  peptide (1)..(472): Ceres Seq. ID no. 12728994

SEQ ID NO: 95482 - protein, 348 aa, Arabidopsis thaliana; identical to SEQ ID NO: 91726
  peptide (1)..(348): Ceres Seq. ID no. 12728995

SEQ ID NO: 95483 - DNA, 6027 bp, Arabidopsis thaliana; identical to SEQ ID NO: 91727
  misc_feature (1)..(6027): Ceres Seq. ID no. 12729019
  misc_feature (1)..(6027): Ortholog of  Ceres SEQ ID NO 13600310 as cited in SEQ ID NO 5086

SEQ ID NO: 95484 - protein, 2008 aa, Arabidopsis thaliana; identical to SEQ ID NO: 91728
  peptide (1)..(2008): Ceres Seq. ID no. 12729020

SEQ ID NO: 95485 - protein, 1999 aa, Arabidopsis thaliana; identical to SEQ ID NO: 91729
  peptide (1)..(1999): Ceres Seq. ID no. 12729021

SEQ ID NO: 95486 - protein, 1828 aa, Arabidopsis thaliana; identical to SEQ ID NO: 91730
  peptide (1)..(1828): Ceres Seq. ID no. 12729022

SEQ ID NO: 95487 - DNA, 1324 bp, Arabidopsis thaliana; identical to SEQ ID NO: 91731
  misc_feature (1)..(1324): Ceres Seq. ID no. 12729055
  misc_feature (1)..(1324): Ortholog of  Ceres SEQ ID NO 13637958 as cited in SEQ ID NO 60404

SEQ ID NO: 95488 - protein, 350 aa, Arabidopsis thaliana; identical to SEQ ID NO: 91732
  peptide (1)..(350): Ceres Seq. ID no. 12729056

SEQ ID NO: 95489 - protein, 334 aa, Arabidopsis thaliana; identical to SEQ ID NO: 91733
  peptide (1)..(334): Ceres Seq. ID no. 12729057

SEQ ID NO: 95490 - protein, 321 aa, Arabidopsis thaliana; identical to SEQ ID NO: 91734
  peptide (1)..(321): Ceres Seq. ID no. 12729058

SEQ ID NO: 95491 - DNA, 2067 bp, Arabidopsis thaliana; identical to SEQ ID NO: 91735
  misc_feature (1)..(2067): Ceres Seq. ID no. 12729094
  misc_feature (1)..(2067): Ortholog of  Ceres SEQ ID NO 13657677 as cited in SEQ ID NO 66119

SEQ ID NO: 95492 - protein, 688 aa, Arabidopsis thaliana; identical to SEQ ID NO: 91736
  peptide (1)..(688): Ceres Seq. ID no. 12729095

SEQ ID NO: 95493 - protein, 520 aa, Arabidopsis thaliana; identical to SEQ ID NO: 91737
  peptide (1)..(520): Ceres Seq. ID no. 12729096

SEQ ID NO: 95494 - protein, 501 aa, Arabidopsis thaliana; identical to SEQ ID NO: 91738
  peptide (1)..(501): Ceres Seq. ID no. 12729097

SEQ ID NO: 95495 - DNA, 1533 bp, Arabidopsis thaliana; identical to SEQ ID NO: 91739
  misc_feature (1)..(1533): Ceres Seq. ID no. 12729098
  misc_feature (1)..(1533): Ortholog of  Ceres SEQ ID NO 13532807 as cited in SEQ ID NO 53012
  misc_feature (1)..(1533): Ortholog of  Ceres SEQ ID NO 13663060 as cited in SEQ ID NO 60964
  misc_feature (1)..(1533): Ortholog of  Ceres SEQ ID NO 13500573 as cited in SEQ ID NO 67431
  misc_feature (1)..(1533): Ortholog of  Ceres SEQ ID NO 13656501 as cited in SEQ ID NO 69206

SEQ ID NO: 95496 - protein, 510 aa, Arabidopsis thaliana; identical to SEQ ID NO: 87363
  peptide (1)..(510): Ceres Seq. ID no. 12729099

SEQ ID NO: 95497 - protein, 422 aa, Arabidopsis thaliana; identical to SEQ ID NO: 87364
  peptide (1)..(422): Ceres Seq. ID no. 12729100

SEQ ID NO: 95498 - protein, 404 aa, Arabidopsis thaliana; identical to SEQ ID NO: 91742
  peptide (1)..(404): Ceres Seq. ID no. 12729101

SEQ ID NO: 95499 - DNA, 1506 bp, Arabidopsis thaliana; identical to SEQ ID NO: 91743
  misc_feature (1)..(1506): Ceres Seq. ID no. 12729102
  misc_feature (1)..(1506): Ortholog of  Ceres SEQ ID NO 13600220 as cited in SEQ ID NO 0

SEQ ID NO: 95500 - protein, 501 aa, Arabidopsis thaliana; identical to SEQ ID NO: 91744
  peptide (1)..(501): Ceres Seq. ID no. 12729103

SEQ ID NO: 95501 - protein, 405 aa, Arabidopsis thaliana; identical to SEQ ID NO: 91745
  peptide (1)..(405): Ceres Seq. ID no. 12729104

SEQ ID NO: 95502 - protein, 312 aa, Arabidopsis thaliana; identical to SEQ ID NO: 91746
  peptide (1)..(312): Ceres Seq. ID no. 12729105

SEQ ID NO: 95503 - DNA, 1311 bp, Arabidopsis thaliana; identical to SEQ ID NO: 91747
  misc_feature (1)..(1311): Ceres Seq. ID no. 12729130
  misc_feature (1)..(1311): Ortholog of  Ceres SEQ ID NO 13599520 as cited in SEQ ID NO 633
  misc_feature (1)..(1311): Ortholog of  Ceres SEQ ID NO 13595142 as cited in SEQ ID NO 56671
  misc_feature (1)..(1311): Ortholog of  Ceres SEQ ID NO 15168569 as cited in SEQ ID NO 58123
  misc_feature (1)..(1311): Ortholog of  Ceres SEQ ID NO 15226382 as cited in SEQ ID NO 63295
  misc_feature (1)..(1311): Ortholog of  Ceres SEQ ID NO 13598460 as cited in SEQ ID NO 63382

SEQ ID NO: 95504 - protein, 436 aa, Arabidopsis thaliana; identical to SEQ ID NO: 38880
  peptide (1)..(436): Ceres Seq. ID no. 12729131

SEQ ID NO: 95505 - protein, 315 aa, Arabidopsis thaliana; identical to SEQ ID NO: 38881
  peptide (1)..(315): Ceres Seq. ID no. 12729132

SEQ ID NO: 95506 - protein, 304 aa, Arabidopsis thaliana; identical to SEQ ID NO: 91750
  peptide (1)..(304): Ceres Seq. ID no. 12729133

SEQ ID NO: 95507 - DNA, 627 bp, Arabidopsis thaliana; identical to SEQ ID NO: 91751
  misc_feature (1)..(627): Ceres Seq. ID no. 12729164
  misc_feature (1)..(627): Ortholog of  Ceres SEQ ID NO 13594341 as cited in SEQ ID NO 57917
  misc_feature (1)..(627): Ortholog of  Ceres SEQ ID NO 13656441 as cited in SEQ ID NO 65703

SEQ ID NO: 95508 - protein, 208 aa, Arabidopsis thaliana; identical to SEQ ID NO: 91752
  peptide (1)..(208): Ceres Seq. ID no. 12729165

SEQ ID NO: 95509 - DNA, 1236 bp, Arabidopsis thaliana; identical to SEQ ID NO: 91753
  misc_feature (1)..(1236): Ceres Seq. ID no. 12729166
  misc_feature (1)..(1236): Ortholog of  Ceres SEQ ID NO 15175898 as cited in SEQ ID NO 57344

SEQ ID NO: 95510 - protein, 411 aa, Arabidopsis thaliana; identical to SEQ ID NO: 91754
  peptide (1)..(411): Ceres Seq. ID no. 12729167

SEQ ID NO: 95511 - protein, 347 aa, Arabidopsis thaliana; identical to SEQ ID NO: 91755
  peptide (1)..(347): Ceres Seq. ID no. 12729168

SEQ ID NO: 95512 - protein, 325 aa, Arabidopsis thaliana; identical to SEQ ID NO: 91756
  peptide (1)..(325): Ceres Seq. ID no. 12729169

SEQ ID NO: 95513 - DNA, 1359 bp, Arabidopsis thaliana; identical to SEQ ID NO: 91757
  misc_feature (1)..(1359): Ceres Seq. ID no. 12729181
  misc_feature (1)..(1359): Ortholog of  Ceres SEQ ID NO 13596816 as cited in SEQ ID NO 62287

SEQ ID NO: 95514 - protein, 452 aa, Arabidopsis thaliana; identical to SEQ ID NO: 91758
  peptide (1)..(452): Ceres Seq. ID no. 12729182

SEQ ID NO: 95515 - protein, 439 aa, Arabidopsis thaliana; identical to SEQ ID NO: 91759
  peptide (1)..(439): Ceres Seq. ID no. 12729183

SEQ ID NO: 95516 - protein, 420 aa, Arabidopsis thaliana; identical to SEQ ID NO: 91760
  peptide (1)..(420): Ceres Seq. ID no. 12729184

SEQ ID NO: 95517 - DNA, 1328 bp, Arabidopsis thaliana; identical to SEQ ID NO: 91761
  misc_feature (1)..(1328): Ceres Seq. ID no. 12729185
  misc_feature (1)..(1328): Ortholog of  Ceres SEQ ID NO 14311981 as cited in SEQ ID NO 55703
  misc_feature (1)..(1328): Ortholog of  Ceres SEQ ID NO 13599003 as cited in SEQ ID NO 0

SEQ ID NO: 95518 - protein, 388 aa, Arabidopsis thaliana; identical to SEQ ID NO: 91762
  peptide (1)..(388): Ceres Seq. ID no. 12729186

SEQ ID NO: 95519 - protein, 371 aa, Arabidopsis thaliana; identical to SEQ ID NO: 91763
  peptide (1)..(371): Ceres Seq. ID no. 12729187

SEQ ID NO: 95520 - protein, 312 aa, Arabidopsis thaliana; identical to SEQ ID NO: 91764
  peptide (1)..(312): Ceres Seq. ID no. 12729188

SEQ ID NO: 95521 - DNA, 348 bp, Arabidopsis thaliana; identical to SEQ ID NO: 91765
  misc_feature (1)..(348): Ceres Seq. ID no. 12729337
  misc_feature (1)..(348): Ortholog of  Ceres SEQ ID NO 13496874 as cited in SEQ ID NO 20713

SEQ ID NO: 95522 - protein, 115 aa, Arabidopsis thaliana; identical to SEQ ID NO: 91766
  peptide (1)..(115): Ceres Seq. ID no. 12729338

SEQ ID NO: 95523 - protein, 74 aa, Arabidopsis thaliana; identical to SEQ ID NO: 91767
  peptide (1)..(74): Ceres Seq. ID no. 12729339

SEQ ID NO: 95524 - protein, 68 aa, Arabidopsis thaliana; identical to SEQ ID NO: 91768
  peptide (1)..(68): Ceres Seq. ID no. 12729340

SEQ ID NO: 95525 - DNA, 1422 bp, Arabidopsis thaliana; identical to SEQ ID NO: 91769
  misc_feature (1)..(1422): Ceres Seq. ID no. 12729358
  misc_feature (1)..(1422): Ortholog of  Ceres SEQ ID NO 13596816 as cited in SEQ ID NO 62287

SEQ ID NO: 95526 - protein, 473 aa, Arabidopsis thaliana; identical to SEQ ID NO: 91770
  peptide (1)..(473): Ceres Seq. ID no. 12729359

SEQ ID NO: 95527 - protein, 340 aa, Arabidopsis thaliana; identical to SEQ ID NO: 91771
  peptide (1)..(340): Ceres Seq. ID no. 12729360

SEQ ID NO: 95528 - protein, 332 aa, Arabidopsis thaliana; identical to SEQ ID NO: 91772
  peptide (1)..(332): Ceres Seq. ID no. 12729361

SEQ ID NO: 95529 - DNA, 1583 bp, Arabidopsis thaliana; identical to SEQ ID NO: 91773
  misc_feature (1)..(1583): Ceres Seq. ID no. 12729365
  misc_feature (1)..(1583): Ortholog of  Ceres SEQ ID NO 14315241 as cited in SEQ ID NO 52516
  misc_feature (1)..(1583): Ortholog of  Ceres SEQ ID NO 13594349 as cited in SEQ ID NO 58161
  misc_feature (1)..(1583): Ortholog of  Ceres SEQ ID NO 13663419 as cited in SEQ ID NO 66561

SEQ ID NO: 95530 - protein, 496 aa, Arabidopsis thaliana; identical to SEQ ID NO: 91774
  peptide (1)..(496): Ceres Seq. ID no. 12729366

SEQ ID NO: 95531 - protein, 487 aa, Arabidopsis thaliana; identical to SEQ ID NO: 91775
  peptide (1)..(487): Ceres Seq. ID no. 12729367

SEQ ID NO: 95532 - protein, 333 aa, Arabidopsis thaliana; identical to SEQ ID NO: 91776
  peptide (1)..(333): Ceres Seq. ID no. 12729368

SEQ ID NO: 95533 - DNA, 1407 bp, Arabidopsis thaliana; identical to SEQ ID NO: 91777
  misc_feature (1)..(1407): Ceres Seq. ID no. 12729409
  misc_feature (1)..(1407): Ortholog of  Ceres SEQ ID NO 15176457 as cited in SEQ ID NO 55547
  misc_feature (1)..(1407): Ortholog of  Ceres SEQ ID NO 13594349 as cited in SEQ ID NO 58161
  misc_feature (1)..(1407): Ortholog of  Ceres SEQ ID NO 13663419 as cited in SEQ ID NO 66561

SEQ ID NO: 95534 - protein, 468 aa, Arabidopsis thaliana; identical to SEQ ID NO: 91778
  peptide (1)..(468): Ceres Seq. ID no. 12729410

SEQ ID NO: 95535 - protein, 460 aa, Arabidopsis thaliana; identical to SEQ ID NO: 91779
  peptide (1)..(460): Ceres Seq. ID no. 12729411

SEQ ID NO: 95536 - protein, 457 aa, Arabidopsis thaliana; identical to SEQ ID NO: 91780
  peptide (1)..(457): Ceres Seq. ID no. 12729412

SEQ ID NO: 95537 - DNA, 1455 bp, Arabidopsis thaliana; identical to SEQ ID NO: 91781
  misc_feature (1)..(1455): Ceres Seq. ID no. 12729515
  misc_feature (1)..(1455): Ortholog of  Ceres SEQ ID NO 13655640 as cited in SEQ ID NO 63844
  misc_feature (1)..(1455): Ortholog of  Ceres SEQ ID NO 13584744 as cited in SEQ ID NO 69137

SEQ ID NO: 95538 - protein, 484 aa, Arabidopsis thaliana; identical to SEQ ID NO: 91782
  peptide (1)..(484): Ceres Seq. ID no. 12729516

SEQ ID NO: 95539 - protein, 409 aa, Arabidopsis thaliana; identical to SEQ ID NO: 91783
  peptide (1)..(409): Ceres Seq. ID no. 12729517

SEQ ID NO: 95540 - protein, 279 aa, Arabidopsis thaliana; identical to SEQ ID NO: 91784
  peptide (1)..(279): Ceres Seq. ID no. 12729518

SEQ ID NO: 95541 - DNA, 1080 bp, Arabidopsis thaliana; identical to SEQ ID NO: 91785
  misc_feature (1)..(1080): Ceres Seq. ID no. 12729529
  misc_feature (1)..(1080): Ortholog of  Ceres SEQ ID NO 13658153 as cited in SEQ ID NO 66326

SEQ ID NO: 95542 - protein, 359 aa, Arabidopsis thaliana; identical to SEQ ID NO: 88264
  peptide (1)..(359): Ceres Seq. ID no. 12729530

SEQ ID NO: 95543 - protein, 325 aa, Arabidopsis thaliana; identical to SEQ ID NO: 88265
  peptide (1)..(325): Ceres Seq. ID no. 12729531

SEQ ID NO: 95544 - protein, 298 aa, Arabidopsis thaliana; identical to SEQ ID NO: 91788
  peptide (1)..(298): Ceres Seq. ID no. 12729532

SEQ ID NO: 95545 - DNA, 1557 bp, Arabidopsis thaliana; identical to SEQ ID NO: 91789
  misc_feature (1)..(1557): Ceres Seq. ID no. 12729533
  misc_feature (1)..(1557): Ortholog of  Ceres SEQ ID NO 13585332 as cited in SEQ ID NO 60654
  misc_feature (1)..(1557): Ortholog of  Ceres SEQ ID NO 13502874 as cited in SEQ ID NO 66298
  misc_feature (1)..(1557): Ortholog of  Ceres SEQ ID NO 12614124 as cited in SEQ ID NO 68392

SEQ ID NO: 95546 - protein, 518 aa, Arabidopsis thaliana; identical to SEQ ID NO: 91790
  peptide (1)..(518): Ceres Seq. ID no. 12729534

SEQ ID NO: 95547 - protein, 390 aa, Arabidopsis thaliana; identical to SEQ ID NO: 91791
  peptide (1)..(390): Ceres Seq. ID no. 12729535

SEQ ID NO: 95548 - protein, 380 aa, Arabidopsis thaliana; identical to SEQ ID NO: 91792
  peptide (1)..(380): Ceres Seq. ID no. 12729536

SEQ ID NO: 95549 - DNA, 1075 bp, Arabidopsis thaliana; identical to SEQ ID NO: 91793
  misc_feature (1)..(1075): Ceres Seq. ID no. 12729537
  misc_feature (1)..(1075): Ortholog of  Ceres SEQ ID NO 13581804 as cited in SEQ ID NO 51424
  misc_feature (1)..(1075): Ortholog of  Ceres SEQ ID NO 13663874 as cited in SEQ ID NO 67003

SEQ ID NO: 95550 - protein, 234 aa, Arabidopsis thaliana; identical to SEQ ID NO: 91794
  peptide (1)..(234): Ceres Seq. ID no. 12729538

SEQ ID NO: 95551 - protein, 172 aa, Arabidopsis thaliana; identical to SEQ ID NO: 91795
  peptide (1)..(172): Ceres Seq. ID no. 12729539

SEQ ID NO: 95552 - DNA, 1912 bp, Arabidopsis thaliana; identical to SEQ ID NO: 91796
  misc_feature (1)..(1912): Ceres Seq. ID no. 12729562
  misc_feature (1)..(1912): Ortholog of  Ceres SEQ ID NO 13597407 as cited in SEQ ID NO 64106

SEQ ID NO: 95553 - protein, 488 aa, Arabidopsis thaliana; identical to SEQ ID NO: 91797
  peptide (1)..(488): Ceres Seq. ID no. 12729563

SEQ ID NO: 95554 - protein, 461 aa, Arabidopsis thaliana; identical to SEQ ID NO: 91798
  peptide (1)..(461): Ceres Seq. ID no. 12729564

SEQ ID NO: 95555 - protein, 454 aa, Arabidopsis thaliana; identical to SEQ ID NO: 91799
  peptide (1)..(454): Ceres Seq. ID no. 12729565

SEQ ID NO: 95556 - DNA, 975 bp, Arabidopsis thaliana; identical to SEQ ID NO: 91800
  misc_feature (1)..(975): Ceres Seq. ID no. 12729589
  misc_feature (1)..(975): Ortholog of  Ceres SEQ ID NO 14316324 as cited in SEQ ID NO 55612
  misc_feature (1)..(975): Ortholog of  Ceres SEQ ID NO 14316378 as cited in SEQ ID NO 57746
  misc_feature (1)..(975): Ortholog of  Ceres SEQ ID NO 13596097 as cited in SEQ ID NO 68421
  misc_feature (1)..(975): Ortholog of  Ceres SEQ ID NO 13598439 as cited in SEQ ID NO 69016
  misc_feature (1)..(975): Ortholog of  Ceres SEQ ID NO 13599524 as cited in SEQ ID NO 0

SEQ ID NO: 95557 - protein, 324 aa, Arabidopsis thaliana; identical to SEQ ID NO: 91801
  peptide (1)..(324): Ceres Seq. ID no. 12729590

SEQ ID NO: 95558 - protein, 310 aa, Arabidopsis thaliana; identical to SEQ ID NO: 91802
  peptide (1)..(310): Ceres Seq. ID no. 12729591

SEQ ID NO: 95559 - DNA, 4474 bp, Arabidopsis thaliana; identical to SEQ ID NO: 91803
  misc_feature (1)..(4474): Ceres Seq. ID no. 12729600
  misc_feature (1)..(4474): Ortholog of  Ceres SEQ ID NO 13660894 as cited in SEQ ID NO 67475

SEQ ID NO: 95560 - protein, 1470 aa, Arabidopsis thaliana; identical to SEQ ID NO: 91804
  peptide (1)..(1470): Ceres Seq. ID no. 12729601

SEQ ID NO: 95561 - protein, 1347 aa, Arabidopsis thaliana; identical to SEQ ID NO: 91805
  peptide (1)..(1347): Ceres Seq. ID no. 12729602

SEQ ID NO: 95562 - protein, 1330 aa, Arabidopsis thaliana; identical to SEQ ID NO: 91806
  peptide (1)..(1330): Ceres Seq. ID no. 12729603

SEQ ID NO: 95563 - DNA, 1038 bp, Arabidopsis thaliana; identical to SEQ ID NO: 91807
  misc_feature (1)..(1038): Ceres Seq. ID no. 12729604
  misc_feature (1)..(1038): Ortholog of  Ceres SEQ ID NO 14315162 as cited in SEQ ID NO 60005
  misc_feature (1)..(1038): Ortholog of  Ceres SEQ ID NO 13659881 as cited in SEQ ID NO 66938

SEQ ID NO: 95564 - protein, 345 aa, Arabidopsis thaliana; identical to SEQ ID NO: 91808
  peptide (1)..(345): Ceres Seq. ID no. 12729605

SEQ ID NO: 95565 - protein, 272 aa, Arabidopsis thaliana; identical to SEQ ID NO: 91809
  peptide (1)..(272): Ceres Seq. ID no. 12729606

SEQ ID NO: 95566 - protein, 229 aa, Arabidopsis thaliana; identical to SEQ ID NO: 91810
  peptide (1)..(229): Ceres Seq. ID no. 12729607

SEQ ID NO: 95567 - DNA, 414 bp, Arabidopsis thaliana; identical to SEQ ID NO: 91811
  misc_feature (1)..(414): Ceres Seq. ID no. 12729622
  misc_feature (1)..(414): Ortholog of  Ceres SEQ ID NO 13581889 as cited in SEQ ID NO 50900

SEQ ID NO: 95568 - protein, 137 aa, Arabidopsis thaliana; identical to SEQ ID NO: 91812
  peptide (1)..(137): Ceres Seq. ID no. 12729623

SEQ ID NO: 95569 - DNA, 1843 bp, Arabidopsis thaliana; identical to SEQ ID NO: 91813
  misc_feature (1)..(1843): Ceres Seq. ID no. 12729624
  misc_feature (1)..(1843): Ortholog of  Ceres SEQ ID NO 15174947 as cited in SEQ ID NO 236

SEQ ID NO: 95570 - protein, 567 aa, Arabidopsis thaliana; identical to SEQ ID NO: 91814
  peptide (1)..(567): Ceres Seq. ID no. 12729625

SEQ ID NO: 95571 - protein, 548 aa, Arabidopsis thaliana; identical to SEQ ID NO: 91815
  peptide (1)..(548): Ceres Seq. ID no. 12729626

SEQ ID NO: 95572 - protein, 504 aa, Arabidopsis thaliana; identical to SEQ ID NO: 91816
  peptide (1)..(504): Ceres Seq. ID no. 12729627

SEQ ID NO: 95573 - DNA, 1366 bp, Arabidopsis thaliana; identical to SEQ ID NO: 91817
  misc_feature (1)..(1366): Ceres Seq. ID no. 12729653
  misc_feature (1)..(1366): Ortholog of  Ceres SEQ ID NO 13597715 as cited in SEQ ID NO 65577
  misc_feature (1)..(1366): Ortholog of  Ceres SEQ ID NO 15178668 as cited in SEQ ID NO 68301

SEQ ID NO: 95574 - protein, 315 aa, Arabidopsis thaliana; identical to SEQ ID NO: 91818
  peptide (1)..(315): Ceres Seq. ID no. 12729654

SEQ ID NO: 95575 - protein, 290 aa, Arabidopsis thaliana; identical to SEQ ID NO: 91819
  peptide (1)..(290): Ceres Seq. ID no. 12729655

SEQ ID NO: 95576 - protein, 279 aa, Arabidopsis thaliana; identical to SEQ ID NO: 91820
  peptide (1)..(279): Ceres Seq. ID no. 12729656

SEQ ID NO: 95577 - DNA, 2283 bp, Arabidopsis thaliana; identical to SEQ ID NO: 91821
  misc_feature (1)..(2283): Ceres Seq. ID no. 12729657
  misc_feature (1)..(2283): Ortholog of  Ceres SEQ ID NO 12586556 as cited in SEQ ID NO 64667
  misc_feature (1)..(2283): Ortholog of  Ceres SEQ ID NO 13660894 as cited in SEQ ID NO 67475

SEQ ID NO: 95578 - protein, 760 aa, Arabidopsis thaliana; identical to SEQ ID NO: 91822
  peptide (1)..(760): Ceres Seq. ID no. 12729658

SEQ ID NO: 95579 - protein, 654 aa, Arabidopsis thaliana; identical to SEQ ID NO: 91823
  peptide (1)..(654): Ceres Seq. ID no. 12729659

SEQ ID NO: 95580 - protein, 612 aa, Arabidopsis thaliana; identical to SEQ ID NO: 91824
  peptide (1)..(612): Ceres Seq. ID no. 12729660

SEQ ID NO: 95581 - DNA, 1828 bp, Arabidopsis thaliana; identical to SEQ ID NO: 91825
  misc_feature (1)..(1828): Ceres Seq. ID no. 12729665
  misc_feature (1)..(1828): Ortholog of  Ceres SEQ ID NO 13594216 as cited in SEQ ID NO 57054
  misc_feature (1)..(1828): Ortholog of  Ceres SEQ ID NO 13657677 as cited in SEQ ID NO 66119

SEQ ID NO: 95582 - protein, 555 aa, Arabidopsis thaliana; identical to SEQ ID NO: 91826
  peptide (1)..(555): Ceres Seq. ID no. 12729666

SEQ ID NO: 95583 - protein, 537 aa, Arabidopsis thaliana; identical to SEQ ID NO: 91827
  peptide (1)..(537): Ceres Seq. ID no. 12729667

SEQ ID NO: 95584 - protein, 381 aa, Arabidopsis thaliana; identical to SEQ ID NO: 91828
  peptide (1)..(381): Ceres Seq. ID no. 12729668

SEQ ID NO: 95585 - DNA, 1837 bp, Arabidopsis thaliana; identical to SEQ ID NO: 91829
  misc_feature (1)..(1837): Ceres Seq. ID no. 12729691
  misc_feature (1)..(1837): Ortholog of  Ceres SEQ ID NO 13648571 as cited in SEQ ID NO 197

SEQ ID NO: 95586 - protein, 550 aa, Arabidopsis thaliana; identical to SEQ ID NO: 91830
  peptide (1)..(550): Ceres Seq. ID no. 12729692

SEQ ID NO: 95587 - protein, 546 aa, Arabidopsis thaliana; identical to SEQ ID NO: 91831
  peptide (1)..(546): Ceres Seq. ID no. 12729693

SEQ ID NO: 95588 - protein, 444 aa, Arabidopsis thaliana; identical to SEQ ID NO: 91832
  peptide (1)..(444): Ceres Seq. ID no. 12729694

SEQ ID NO: 95589 - DNA, 3068 bp, Arabidopsis thaliana; identical to SEQ ID NO: 91833
  misc_feature (1)..(3068): Ceres Seq. ID no. 12729703
  misc_feature (1)..(3068): Ortholog of  Ceres SEQ ID NO 15170741 as cited in SEQ ID NO 58530

SEQ ID NO: 95590 - protein, 844 aa, Arabidopsis thaliana; identical to SEQ ID NO: 91834
  peptide (1)..(844): Ceres Seq. ID no. 12729704

SEQ ID NO: 95591 - protein, 832 aa, Arabidopsis thaliana; identical to SEQ ID NO: 91835
  peptide (1)..(832): Ceres Seq. ID no. 12729705

SEQ ID NO: 95592 - protein, 827 aa, Arabidopsis thaliana; identical to SEQ ID NO: 91836
  peptide (1)..(827): Ceres Seq. ID no. 12729706

SEQ ID NO: 95593 - DNA, 636 bp, Arabidopsis thaliana; identical to SEQ ID NO: 91837
  misc_feature (1)..(636): Ceres Seq. ID no. 12729711
  misc_feature (1)..(636): Ortholog of  Ceres SEQ ID NO 15179562 as cited in SEQ ID NO 0
  misc_feature (1)..(636): Ortholog of  Ceres SEQ ID NO 15179680 as cited in SEQ ID NO 0

SEQ ID NO: 95594 - protein, 211 aa, Arabidopsis thaliana; identical to SEQ ID NO: 91838
  peptide (1)..(211): Ceres Seq. ID no. 12729712

SEQ ID NO: 95595 - protein, 195 aa, Arabidopsis thaliana; identical to SEQ ID NO: 91839
  peptide (1)..(195): Ceres Seq. ID no. 12729713

SEQ ID NO: 95596 - protein, 181 aa, Arabidopsis thaliana; identical to SEQ ID NO: 91840
  peptide (1)..(181): Ceres Seq. ID no. 12729714

SEQ ID NO: 95597 - DNA, 594 bp, Arabidopsis thaliana; identical to SEQ ID NO: 91841
  misc_feature (1)..(594): Ceres Seq. ID no. 12729715
  misc_feature (1)..(594): Ortholog of  Ceres SEQ ID NO 15179562 as cited in SEQ ID NO 0
  misc_feature (1)..(594): Ortholog of  Ceres SEQ ID NO 15179680 as cited in SEQ ID NO 0

SEQ ID NO: 95598 - protein, 197 aa, Arabidopsis thaliana; identical to SEQ ID NO: 91842
  peptide (1)..(197): Ceres Seq. ID no. 12729716

SEQ ID NO: 95599 - protein, 183 aa, Arabidopsis thaliana; identical to SEQ ID NO: 91843
  peptide (1)..(183): Ceres Seq. ID no. 12729717

SEQ ID NO: 95600 - protein, 178 aa, Arabidopsis thaliana; identical to SEQ ID NO: 91844
  peptide (1)..(178): Ceres Seq. ID no. 12729718

SEQ ID NO: 95601 - DNA, 862 bp, Arabidopsis thaliana; identical to SEQ ID NO: 91845
  misc_feature (1)..(862): Ceres Seq. ID no. 12729727
  misc_feature (1)..(862): Ortholog of  Ceres SEQ ID NO 14306406 as cited in SEQ ID NO 1412
  misc_feature (1)..(862): Ortholog of  Ceres SEQ ID NO 14309488 as cited in SEQ ID NO 52755
  misc_feature (1)..(862): Ortholog of  Ceres SEQ ID NO 15178824 as cited in SEQ ID NO 0

SEQ ID NO: 95602 - protein, 223 aa, Arabidopsis thaliana; identical to SEQ ID NO: 91846
  peptide (1)..(223): Ceres Seq. ID no. 12729728

SEQ ID NO: 95603 - protein, 197 aa, Arabidopsis thaliana; identical to SEQ ID NO: 91847
  peptide (1)..(197): Ceres Seq. ID no. 12729729

SEQ ID NO: 95604 - DNA, 1323 bp, Arabidopsis thaliana; identical to SEQ ID NO: 91848
  misc_feature (1)..(1323): Ceres Seq. ID no. 12729734
  misc_feature (1)..(1323): Ortholog of  Ceres SEQ ID NO 13584646 as cited in SEQ ID NO 60715

SEQ ID NO: 95605 - protein, 311 aa, Arabidopsis thaliana; identical to SEQ ID NO: 91849
  peptide (1)..(311): Ceres Seq. ID no. 12729735

SEQ ID NO: 95606 - DNA, 2202 bp, Arabidopsis thaliana; identical to SEQ ID NO: 91850
  misc_feature (1)..(2202): Ceres Seq. ID no. 12729755
  misc_feature (1)..(2202): Ortholog of  Ceres SEQ ID NO 13584744 as cited in SEQ ID NO 69137

SEQ ID NO: 95607 - protein, 733 aa, Arabidopsis thaliana; identical to SEQ ID NO: 91851
  peptide (1)..(733): Ceres Seq. ID no. 12729756

SEQ ID NO: 95608 - protein, 725 aa, Arabidopsis thaliana; identical to SEQ ID NO: 91852
  peptide (1)..(725): Ceres Seq. ID no. 12729757

SEQ ID NO: 95609 - protein, 591 aa, Arabidopsis thaliana; identical to SEQ ID NO: 91853
  peptide (1)..(591): Ceres Seq. ID no. 12729758

SEQ ID NO: 95610 - DNA, 2226 bp, Arabidopsis thaliana; identical to SEQ ID NO: 91854
  misc_feature (1)..(2226): Ceres Seq. ID no. 12729759
  misc_feature (1)..(2226): Ortholog of  Ceres SEQ ID NO 13654989 as cited in SEQ ID NO 63117
  misc_feature (1)..(2226): Ortholog of  Ceres SEQ ID NO 13584744 as cited in SEQ ID NO 69137

SEQ ID NO: 95611 - protein, 741 aa, Arabidopsis thaliana; identical to SEQ ID NO: 91855
  peptide (1)..(741): Ceres Seq. ID no. 12729760

SEQ ID NO: 95612 - protein, 411 aa, Arabidopsis thaliana; identical to SEQ ID NO: 91856
  peptide (1)..(411): Ceres Seq. ID no. 12729761

SEQ ID NO: 95613 - DNA, 2552 bp, Arabidopsis thaliana; identical to SEQ ID NO: 91857
  misc_feature (1)..(2552): Ceres Seq. ID no. 12729762
  misc_feature (1)..(2552): Ortholog of  Ceres SEQ ID NO 13654989 as cited in SEQ ID NO 63117
  misc_feature (1)..(2552): Ortholog of  Ceres SEQ ID NO 13584744 as cited in SEQ ID NO 69137

SEQ ID NO: 95614 - protein, 735 aa, Arabidopsis thaliana; identical to SEQ ID NO: 91858
  peptide (1)..(735): Ceres Seq. ID no. 12729763

SEQ ID NO: 95615 - protein, 598 aa, Arabidopsis thaliana; identical to SEQ ID NO: 91859
  peptide (1)..(598): Ceres Seq. ID no. 12729764

SEQ ID NO: 95616 - protein, 548 aa, Arabidopsis thaliana; identical to SEQ ID NO: 91860
  peptide (1)..(548): Ceres Seq. ID no. 12729765

SEQ ID NO: 95617 - DNA, 2614 bp, Arabidopsis thaliana; identical to SEQ ID NO: 91861
  misc_feature (1)..(2614): Ceres Seq. ID no. 12729802
  misc_feature (1)..(2614): Ortholog of  Ceres SEQ ID NO 13654989 as cited in SEQ ID NO 63117
  misc_feature (1)..(2614): Ortholog of  Ceres SEQ ID NO 13657138 as cited in SEQ ID NO 65923
  misc_feature (1)..(2614): Ortholog of  Ceres SEQ ID NO 13584744 as cited in SEQ ID NO 69137

SEQ ID NO: 95618 - protein, 756 aa, Arabidopsis thaliana; identical to SEQ ID NO: 91862
  peptide (1)..(756): Ceres Seq. ID no. 12729803

SEQ ID NO: 95619 - protein, 742 aa, Arabidopsis thaliana; identical to SEQ ID NO: 91863
  peptide (1)..(742): Ceres Seq. ID no. 12729804

SEQ ID NO: 95620 - protein, 651 aa, Arabidopsis thaliana; identical to SEQ ID NO: 91864
  peptide (1)..(651): Ceres Seq. ID no. 12729805

SEQ ID NO: 95621 - DNA, 3260 bp, Arabidopsis thaliana; identical to SEQ ID NO: 91865
  misc_feature (1)..(3260): Ceres Seq. ID no. 12729806
  misc_feature (1)..(3260): Ortholog of  Ceres SEQ ID NO 12581696 as cited in SEQ ID NO 55411

SEQ ID NO: 95622 - protein, 985 aa, Arabidopsis thaliana; identical to SEQ ID NO: 91866
  peptide (1)..(985): Ceres Seq. ID no. 12729807

SEQ ID NO: 95623 - protein, 973 aa, Arabidopsis thaliana; identical to SEQ ID NO: 91867
  peptide (1)..(973): Ceres Seq. ID no. 12729808

SEQ ID NO: 95624 - protein, 868 aa, Arabidopsis thaliana; identical to SEQ ID NO: 91868
  peptide (1)..(868): Ceres Seq. ID no. 12729809

SEQ ID NO: 95625 - DNA, 792 bp, Arabidopsis thaliana; identical to SEQ ID NO: 91869
  misc_feature (1)..(792): Ceres Seq. ID no. 12729830
  misc_feature (1)..(792): Ortholog of  Ceres SEQ ID NO 14312328 as cited in SEQ ID NO 59022

SEQ ID NO: 95626 - protein, 263 aa, Arabidopsis thaliana; identical to SEQ ID NO: 91870
  peptide (1)..(263): Ceres Seq. ID no. 12729831

SEQ ID NO: 95627 - protein, 163 aa, Arabidopsis thaliana; identical to SEQ ID NO: 91871
  peptide (1)..(163): Ceres Seq. ID no. 12729832

SEQ ID NO: 95628 - protein, 149 aa, Arabidopsis thaliana; identical to SEQ ID NO: 91872
  peptide (1)..(149): Ceres Seq. ID no. 12729833

SEQ ID NO: 95629 - DNA, 705 bp, Arabidopsis thaliana; identical to SEQ ID NO: 91873
  misc_feature (1)..(705): Ceres Seq. ID no. 12729850
  misc_feature (1)..(705): Ortholog of  Ceres SEQ ID NO 15173263 as cited in SEQ ID NO 64606

SEQ ID NO: 95630 - protein, 176 aa, Arabidopsis thaliana; identical to SEQ ID NO: 91874
  peptide (1)..(176): Ceres Seq. ID no. 12729851

SEQ ID NO: 95631 - protein, 158 aa, Arabidopsis thaliana; identical to SEQ ID NO: 91875
  peptide (1)..(158): Ceres Seq. ID no. 12729852

SEQ ID NO: 95632 - DNA, 1467 bp, Arabidopsis thaliana; identical to SEQ ID NO: 91876
  misc_feature (1)..(1467): Ceres Seq. ID no. 12729861
  misc_feature (1)..(1467): Ortholog of  Ceres SEQ ID NO 14310907 as cited in SEQ ID NO 54338

SEQ ID NO: 95633 - protein, 488 aa, Arabidopsis thaliana; identical to SEQ ID NO: 91877
  peptide (1)..(488): Ceres Seq. ID no. 12729862

SEQ ID NO: 95634 - protein, 469 aa, Arabidopsis thaliana; identical to SEQ ID NO: 91878
  peptide (1)..(469): Ceres Seq. ID no. 12729863

SEQ ID NO: 95635 - protein, 423 aa, Arabidopsis thaliana; identical to SEQ ID NO: 91879
  peptide (1)..(423): Ceres Seq. ID no. 12729864

SEQ ID NO: 95636 - DNA, 1943 bp, Arabidopsis thaliana; identical to SEQ ID NO: 91880
  misc_feature (1)..(1943): Ceres Seq. ID no. 12729865
  misc_feature (1)..(1943): Ortholog of  Ceres SEQ ID NO 14310907 as cited in SEQ ID NO 54338

SEQ ID NO: 95637 - protein, 556 aa, Arabidopsis thaliana; identical to SEQ ID NO: 91881
  peptide (1)..(556): Ceres Seq. ID no. 12729866

SEQ ID NO: 95638 - protein, 465 aa, Arabidopsis thaliana; identical to SEQ ID NO: 91882
  peptide (1)..(465): Ceres Seq. ID no. 12729867

SEQ ID NO: 95639 - protein, 343 aa, Arabidopsis thaliana; identical to SEQ ID NO: 91883
  peptide (1)..(343): Ceres Seq. ID no. 12729868

SEQ ID NO: 95640 - DNA, 1889 bp, Arabidopsis thaliana; identical to SEQ ID NO: 91884
  misc_feature (1)..(1889): Ceres Seq. ID no. 12729881
  misc_feature (1)..(1889): Ortholog of  Ceres SEQ ID NO 13600220 as cited in SEQ ID NO 0

SEQ ID NO: 95641 - protein, 527 aa, Arabidopsis thaliana; identical to SEQ ID NO: 91885
  peptide (1)..(527): Ceres Seq. ID no. 12729882

SEQ ID NO: 95642 - protein, 485 aa, Arabidopsis thaliana; identical to SEQ ID NO: 91886
  peptide (1)..(485): Ceres Seq. ID no. 12729883

SEQ ID NO: 95643 - protein, 428 aa, Arabidopsis thaliana; identical to SEQ ID NO: 91887
  peptide (1)..(428): Ceres Seq. ID no. 12729884

SEQ ID NO: 95644 - DNA, 2271 bp, Arabidopsis thaliana; identical to SEQ ID NO: 91888
  misc_feature (1)..(2271): Ceres Seq. ID no. 12729920
  misc_feature (1)..(2271): Ortholog of  Ceres SEQ ID NO 15169142 as cited in SEQ ID NO 58748

SEQ ID NO: 95645 - protein, 756 aa, Arabidopsis thaliana; identical to SEQ ID NO: 91889
  peptide (1)..(756): Ceres Seq. ID no. 12729921

SEQ ID NO: 95646 - protein, 681 aa, Arabidopsis thaliana; identical to SEQ ID NO: 91890
  peptide (1)..(681): Ceres Seq. ID no. 12729922

SEQ ID NO: 95647 - protein, 675 aa, Arabidopsis thaliana; identical to SEQ ID NO: 91891
  peptide (1)..(675): Ceres Seq. ID no. 12729923

SEQ ID NO: 95648 - DNA, 1614 bp, Arabidopsis thaliana; identical to SEQ ID NO: 91892
  misc_feature (1)..(1614): Ceres Seq. ID no. 12729924
  misc_feature (1)..(1614): Ortholog of  Ceres SEQ ID NO 15169474 as cited in SEQ ID NO 66139
  misc_feature (1)..(1614): Ortholog of  Ceres SEQ ID NO 13584744 as cited in SEQ ID NO 69137

SEQ ID NO: 95649 - protein, 537 aa, Arabidopsis thaliana; identical to SEQ ID NO: 38774
  peptide (1)..(537): Ceres Seq. ID no. 12729925

SEQ ID NO: 95650 - protein, 491 aa, Arabidopsis thaliana; identical to SEQ ID NO: 38775
  peptide (1)..(491): Ceres Seq. ID no. 12729926

SEQ ID NO: 95651 - DNA, 1641 bp, Arabidopsis thaliana; identical to SEQ ID NO: 91895
  misc_feature (1)..(1641): Ceres Seq. ID no. 12729927
  misc_feature (1)..(1641): Ortholog of  Ceres SEQ ID NO 13599322 as cited in SEQ ID NO 0

SEQ ID NO: 95652 - protein, 546 aa, Arabidopsis thaliana; identical to SEQ ID NO: 91896
  peptide (1)..(546): Ceres Seq. ID no. 12729928

SEQ ID NO: 95653 - protein, 478 aa, Arabidopsis thaliana; identical to SEQ ID NO: 91897
  peptide (1)..(478): Ceres Seq. ID no. 12729929

SEQ ID NO: 95654 - protein, 423 aa, Arabidopsis thaliana; identical to SEQ ID NO: 91898
  peptide (1)..(423): Ceres Seq. ID no. 12729930

SEQ ID NO: 95655 - DNA, 633 bp, Arabidopsis thaliana; identical to SEQ ID NO: 91899
  misc_feature (1)..(633): Ceres Seq. ID no. 12729960
  misc_feature (1)..(633): Ortholog of  Ceres SEQ ID NO 15171175 as cited in SEQ ID NO 57476
  misc_feature (1)..(633): Ortholog of  Ceres SEQ ID NO 15178436 as cited in SEQ ID NO 57919
  misc_feature (1)..(633): Ortholog of  Ceres SEQ ID NO 13655808 as cited in SEQ ID NO 64901

SEQ ID NO: 95656 - protein, 210 aa, Arabidopsis thaliana; identical to SEQ ID NO: 91900
  peptide (1)..(210): Ceres Seq. ID no. 12729961

SEQ ID NO: 95657 - protein, 176 aa, Arabidopsis thaliana; identical to SEQ ID NO: 91901
  peptide (1)..(176): Ceres Seq. ID no. 12729962

SEQ ID NO: 95658 - DNA, 837 bp, Arabidopsis thaliana; identical to SEQ ID NO: 91902
  misc_feature (1)..(837): Ceres Seq. ID no. 12729971
  misc_feature (1)..(837): Ortholog of  Ceres SEQ ID NO 15178924 as cited in SEQ ID NO 1050
  misc_feature (1)..(837): Ortholog of  Ceres SEQ ID NO 13661768 as cited in SEQ ID NO 61427

SEQ ID NO: 95659 - protein, 278 aa, Arabidopsis thaliana; identical to SEQ ID NO: 91903
  peptide (1)..(278): Ceres Seq. ID no. 12729972

SEQ ID NO: 95660 - protein, 244 aa, Arabidopsis thaliana; identical to SEQ ID NO: 91904
  peptide (1)..(244): Ceres Seq. ID no. 12729973

SEQ ID NO: 95661 - protein, 199 aa, Arabidopsis thaliana; identical to SEQ ID NO: 91905
  peptide (1)..(199): Ceres Seq. ID no. 12729974

SEQ ID NO: 95662 - DNA, 789 bp, Arabidopsis thaliana; identical to SEQ ID NO: 91906
  misc_feature (1)..(789): Ceres Seq. ID no. 12729983
  misc_feature (1)..(789): Ortholog of  Ceres SEQ ID NO 13661768 as cited in SEQ ID NO 61427

SEQ ID NO: 95663 - protein, 262 aa, Arabidopsis thaliana; identical to SEQ ID NO: 91907
  peptide (1)..(262): Ceres Seq. ID no. 12729984

SEQ ID NO: 95664 - protein, 241 aa, Arabidopsis thaliana; identical to SEQ ID NO: 91908
  peptide (1)..(241): Ceres Seq. ID no. 12729985

SEQ ID NO: 95665 - DNA, 795 bp, Arabidopsis thaliana; identical to SEQ ID NO: 91909
  misc_feature (1)..(795): Ceres Seq. ID no. 12729986
  misc_feature (1)..(795): Ortholog of  Ceres SEQ ID NO 13661768 as cited in SEQ ID NO 61427
  misc_feature (1)..(795): Ortholog of  Ceres SEQ ID NO 15179176 as cited in SEQ ID NO 0

SEQ ID NO: 95666 - protein, 264 aa, Arabidopsis thaliana; identical to SEQ ID NO: 91910
  peptide (1)..(264): Ceres Seq. ID no. 12729987

SEQ ID NO: 95667 - DNA, 771 bp, Arabidopsis thaliana; identical to SEQ ID NO: 91911
  misc_feature (1)..(771): Ceres Seq. ID no. 12729988
  misc_feature (1)..(771): Ortholog of  Ceres SEQ ID NO 13661768 as cited in SEQ ID NO 61427
  misc_feature (1)..(771): Ortholog of  Ceres SEQ ID NO 15179176 as cited in SEQ ID NO 0

SEQ ID NO: 95668 - protein, 256 aa, Arabidopsis thaliana; identical to SEQ ID NO: 72354
  peptide (1)..(256): Ceres Seq. ID no. 12729989

SEQ ID NO: 95669 - protein, 244 aa, Arabidopsis thaliana; identical to SEQ ID NO: 72355
  peptide (1)..(244): Ceres Seq. ID no. 12729990

SEQ ID NO: 95670 - protein, 170 aa, Arabidopsis thaliana; identical to SEQ ID NO: 72356
  peptide (1)..(170): Ceres Seq. ID no. 12729991

SEQ ID NO: 95671 - DNA, 822 bp, Arabidopsis thaliana; identical to SEQ ID NO: 91915
  misc_feature (1)..(822): Ceres Seq. ID no. 12729992
  misc_feature (1)..(822): Ortholog of  Ceres SEQ ID NO 15178924 as cited in SEQ ID NO 1050
  misc_feature (1)..(822): Ortholog of  Ceres SEQ ID NO 13661768 as cited in SEQ ID NO 61427
  misc_feature (1)..(822): Ortholog of  Ceres SEQ ID NO 15179239 as cited in SEQ ID NO 0

SEQ ID NO: 95672 - protein, 273 aa, Arabidopsis thaliana; identical to SEQ ID NO: 91916
  peptide (1)..(273): Ceres Seq. ID no. 12729993

SEQ ID NO: 95673 - protein, 196 aa, Arabidopsis thaliana; identical to SEQ ID NO: 91917
  peptide (1)..(196): Ceres Seq. ID no. 12729994

SEQ ID NO: 95674 - protein, 194 aa, Arabidopsis thaliana; identical to SEQ ID NO: 91918
  peptide (1)..(194): Ceres Seq. ID no. 12729995

SEQ ID NO: 95675 - DNA, 1007 bp, Arabidopsis thaliana; identical to SEQ ID NO: 91919
  misc_feature (1)..(1007): Ceres Seq. ID no. 12729998
  misc_feature (1)..(1007): Ortholog of  Ceres SEQ ID NO 13661768 as cited in SEQ ID NO 61427

SEQ ID NO: 95676 - protein, 268 aa, Arabidopsis thaliana; identical to SEQ ID NO: 91920
  peptide (1)..(268): Ceres Seq. ID no. 12729999

SEQ ID NO: 95677 - protein, 252 aa, Arabidopsis thaliana; identical to SEQ ID NO: 91921
  peptide (1)..(252): Ceres Seq. ID no. 12730000

SEQ ID NO: 95678 - DNA, 1329 bp, Arabidopsis thaliana; identical to SEQ ID NO: 91922
  misc_feature (1)..(1329): Ceres Seq. ID no. 12730004
  misc_feature (1)..(1329): Ortholog of  Ceres SEQ ID NO 12612333 as cited in SEQ ID NO 56421

SEQ ID NO: 95679 - protein, 351 aa, Arabidopsis thaliana; identical to SEQ ID NO: 91923
  peptide (1)..(351): Ceres Seq. ID no. 12730005

SEQ ID NO: 95680 - protein, 334 aa, Arabidopsis thaliana; identical to SEQ ID NO: 91924
  peptide (1)..(334): Ceres Seq. ID no. 12730006

SEQ ID NO: 95681 - DNA, 2463 bp, Arabidopsis thaliana
  misc_feature (1)..(2463): Ceres Seq. ID no. 12730007
  misc_feature (1)..(2463): Ortholog of  Ceres SEQ ID NO 12586556 as cited in SEQ ID NO 64667
  misc_feature (1)..(2463): Ortholog of  Ceres SEQ ID NO 13660894 as cited in SEQ ID NO 67475
atggctggatcagctctacctctaccacctcctccaccactatcattacaatctccgtcacaaaatcaaacccgtcattcttctaccttttctccaccaacccttactcctcaaacaccttctatccgttcccgtcttagcaaaatctgtcaagatggaaacccacaacttgcacgccaattgttcgacgcaattcctaaaccaactactgttctttggaacactatcatcatcgggtttatttgtaataatctaccacacgaagctcttcttttctattcccggatgaaaaagacggcaccttttactaattgtgatgcttatacttactcttctacactcaaggcgtgtgctgagactaagaatttgaaagctggtaaagctgtgcattgtcatttgatccgttgtttacagaattcaagcagagttgtgcataattctttgatgaatatgtatgtttcttgtttgaatgctcctgattgttttgagtatgatgttgtgcgtaaagttttcgataatatgcgtaggaagaatgttgtcgcttggaatactttgatttcttggtatgtgaaaacagggagaaatgctgaagcttgtaggcaatttgggataatgatgagaatggaggtaaaaccgagcccggttagctttgttaatgtttttcctgcggtgtcgatttcgagaagcattaagaaagctaacgttttttatggtttgatgcttaaattgggagatgaatatgtgaaggacttgtttgtggttagttcggctatttctatgtatgctgagcttggtgatattgagtcatcaaggagagtgtttgattcttgtgttgagagaaacatcgaggtttggaatacaatgataggtgtttatgttcagaatgattgtctggttgaaagtattgagctttttcttgaagcgataggatcgaaagagattgtgtctgatgaagtaacgtacctcttggcagcgagtgctgtttcagcgttgcagcaagtagaactaggcaggcagtttcatggttttgtgagcaagaactttcgagagctaccgattgtgattgttaactcgttgatggtgatgtactcaaggtgtggttctgtgcacaagtcatttggagtctttctttccatgcgagagagagatgttgtatcgtggaacactatgatctctgcatttgtccaaaatggcttagatgatgaaggattgatgctggtttacgagatgcagaagcaagggtttaagattgattacataactgtgacagctttgctttcggctgcatcaaatcttagaaacaaggagatcgggaagcagactcacgctttccttatcaggcaagggattcagttcgagggaatgaacagttaccttatcgacatgtattctaagtcaggtctaattaggatatcacagaagctttttgaaggaagtggttatgctgaaagagatcaggctacttggaattctatgatttccgggtacacgcagaatggacacacagagaaaacgtttctagtgttcaggaagatgttagaacagaatatacgacccaatgcggtaactgtggcatcaattctccctgcttgtagccaaataggtagtgttgacttgggtaaacagctccatggtttctctatcaggcaatacttggatcagaacgtatttgtggcttctgcgttagtagatatgtattcaaaggcaggagcaataaagtatgcagaagacatgttttctcaaacgaaagagagaaattctgtgacatacaccacgatgatactggggtatggccaacatggaatgggcgagagagctatctcgctgtttctctcaatgcaagagtcgggaatcaaacccgatgctataacctttgttgcagtgttatcagcttgcagctattcaggtctaatagatgaaggtctcaaaatattcgaggaaatgagagaagtttataacattcagccttcaagtgagcactattgctgcattacagatatgttggggagagttgggcgggtgaatgaagcctacgagtttgttaaaggacttggtgaagaagggaacatagctgagctatggggttcactactcgggtcttgtaaactacacggtgagcttgagcttgctgaaactgtttcggagaggttggctaaatttgataaagggaagaacttttccgggtatgaggttttgctctcgaatatgtatgctgaggaacaaaaatggaagagcgttgataaggtgaggagaggaatgagagaaaaaggtttaaagaaagaagttggtcgtagtgggattgaaattgcaggttacgtcaactgttttgtgtctagagatcaagagcatcctcattctagtgagatttatgatgtaatcgacggtttggctaaagatatgagaggcgattcgtttctgacaacattgccaactgttactccaagtttggaattggatgagtga

SEQ ID NO: 95682 - protein, 820 aa, Arabidopsis thaliana
  peptide (1)..(820): Ceres Seq. ID no. 12730008
MAGSALPLPPPPPLSLQSPSQNQTRHSSTFSPPTLTPQTPSIRSRLSKICQDGNPQLARQLFDAIPKPTTVLWNTIIIGFICNNLPHEALLFYSRMKKTAPFTNCDAYTYSSTLKACAETKNLKAGKAVHCHLIRCLQNSSRVVHNSLMNMYVSCLNAPDCFEYDVVRKVFDNMRRKNVVAWNTLISWYVKTGRNAEACRQFGIMMRMEVKPSPVSFVNVFPAVSISRSIKKANVFYGLMLKLGDEYVKDLFVVSSAISMYAELGDIESSRRVFDSCVERNIEVWNTMIGVYVQNDCLVESIELFLEAIGSKEIVSDEVTYLLAASAVSALQQVELGRQFHGFVSKNFRELPIVIVNSLMVMYSRCGSVHKSFGVFLSMRERDVVSWNTMISAFVQNGLDDEGLMLVYEMQKQGFKIDYITVTALLSAASNLRNKEIGKQTHAFLIRQGIQFEGMNSYLIDMYSKSGLIRISQKLFEGSGYAERDQATWNSMISGYTQNGHTEKTFLVFRKMLEQNIRPNAVTVASILPACSQIGSVDLGKQLHGFSIRQYLDQNVFVASALVDMYSKAGAIKYAEDMFSQTKERNSVTYTTMILGYGQHGMGERAISLFLSMQESGIKPDAITFVAVLSACSYSGLIDEGLKIFEEMREVYNIQPSSEHYCCITDMLGRVGRVNEAYEFVKGLGEEGNIAELWGSLLGSCKLHGELELAETVSERLAKFDKGKNFSGYEVLLSNMYAEEQKWKSVDKVRRGMREKGLKKEVGRSGIEIAGYVNCFVSRDQEHPHSSEIYDVIDGLAKDMRGDSFLTTLPTVTPSLELDE

SEQ ID NO: 95683 - protein, 725 aa, Arabidopsis thaliana
  peptide (1)..(725): Ceres Seq. ID no. 12730009
MKKTAPFTNCDAYTYSSTLKACAETKNLKAGKAVHCHLIRCLQNSSRVVHNSLMNMYVSCLNAPDCFEYDVVRKVFDNMRRKNVVAWNTLISWYVKTGRNAEACRQFGIMMRMEVKPSPVSFVNVFPAVSISRSIKKANVFYGLMLKLGDEYVKDLFVVSSAISMYAELGDIESSRRVFDSCVERNIEVWNTMIGVYVQNDCLVESIELFLEAIGSKEIVSDEVTYLLAASAVSALQQVELGRQFHGFVSKNFRELPIVIVNSLMVMYSRCGSVHKSFGVFLSMRERDVVSWNTMISAFVQNGLDDEGLMLVYEMQKQGFKIDYITVTALLSAASNLRNKEIGKQTHAFLIRQGIQFEGMNSYLIDMYSKSGLIRISQKLFEGSGYAERDQATWNSMISGYTQNGHTEKTFLVFRKMLEQNIRPNAVTVASILPACSQIGSVDLGKQLHGFSIRQYLDQNVFVASALVDMYSKAGAIKYAEDMFSQTKERNSVTYTTMILGYGQHGMGERAISLFLSMQESGIKPDAITFVAVLSACSYSGLIDEGLKIFEEMREVYNIQPSSEHYCCITDMLGRVGRVNEAYEFVKGLGEEGNIAELWGSLLGSCKLHGELELAETVSERLAKFDKGKNFSGYEVLLSNMYAEEQKWKSVDKVRRGMREKGLKKEVGRSGIEIAGYVNCFVSRDQEHPHSSEIYDVIDGLAKDMRGDSFLTTLPTVTPSLELDE

SEQ ID NO: 95684 - protein, 672 aa, Arabidopsis thaliana
  peptide (1)..(672): Ceres Seq. ID no. 12730010
MNMYVSCLNAPDCFEYDVVRKVFDNMRRKNVVAWNTLISWYVKTGRNAEACRQFGIMMRMEVKPSPVSFVNVFPAVSISRSIKKANVFYGLMLKLGDEYVKDLFVVSSAISMYAELGDIESSRRVFDSCVERNIEVWNTMIGVYVQNDCLVESIELFLEAIGSKEIVSDEVTYLLAASAVSALQQVELGRQFHGFVSKNFRELPIVIVNSLMVMYSRCGSVHKSFGVFLSMRERDVVSWNTMISAFVQNGLDDEGLMLVYEMQKQGFKIDYITVTALLSAASNLRNKEIGKQTHAFLIRQGIQFEGMNSYLIDMYSKSGLIRISQKLFEGSGYAERDQATWNSMISGYTQNGHTEKTFLVFRKMLEQNIRPNAVTVASILPACSQIGSVDLGKQLHGFSIRQYLDQNVFVASALVDMYSKAGAIKYAEDMFSQTKERNSVTYTTMILGYGQHGMGERAISLFLSMQESGIKPDAITFVAVLSACSYSGLIDEGLKIFEEMREVYNIQPSSEHYCCITDMLGRVGRVNEAYEFVKGLGEEGNIAELWGSLLGSCKLHGELELAETVSERLAKFDKGKNFSGYEVLLSNMYAEEQKWKSVDKVRRGMREKGLKKEVGRSGIEIAGYVNCFVSRDQEHPHSSEIYDVIDGLAKDMRGDSFLTTLPTVTPSLELDE

SEQ ID NO: 95685 - DNA, 1386 bp, Arabidopsis thaliana
  misc_feature (1)..(1386): Ceres Seq. ID no. 12730024
  misc_feature (1)..(1386): Ortholog of  Ceres SEQ ID NO 14315063 as cited in SEQ ID NO 52256
  misc_feature (1)..(1386): Ortholog of  Ceres SEQ ID NO 14310736 as cited in SEQ ID NO 52901
  misc_feature (1)..(1386): Ortholog of  Ceres SEQ ID NO 15172325 as cited in SEQ ID NO 54668
  misc_feature (1)..(1386): Ortholog of  Ceres SEQ ID NO 13594345 as cited in SEQ ID NO 58043
  misc_feature (1)..(1386): Ortholog of  Ceres SEQ ID NO 14308594 as cited in SEQ ID NO 60384
  misc_feature (1)..(1386): Ortholog of  Ceres SEQ ID NO 13662880 as cited in SEQ ID NO 65422
  misc_feature (1)..(1386): Ortholog of  Ceres SEQ ID NO 12779098 as cited in SEQ ID NO 67698
atgaaagtaacacaaaagccaaagataatattcatcccttatccggcgcaaggccacgtcactccgatgcttcaccttgcatcggctttcctcagccgtggattctcccctgtcgttatgactcccgagtctatccaccgtaggatctcggctactaacgaggatcttgggatcacgttcttggccttatctgacggtcaagatcgtccggacgcacctccctcggacttcttctcgatagagaactcaatggagaacatcatgccaccacagctcgaacggctcctactagaagaagacttggatgtggcttgtgttgtggttgatttgctggcttcgtgggctataggagtggctgatcggtgtggagttccggtcgccggattctggccggtgatgttcgctgcttaccgtttgatccaagcaataccggagctagtccgaacaggcttagtttcccaaaaaggttgtcctcgtcaactagaaaaaacaatagtccagccagagcaaccgctcctatccgcagaagatctaccgtggctgatcggaactcccaaagctcagaaaaaacgattcaagttctggcaaagaactctagaacgaacaaaaagtctccgttggatcttgacaagctcctttaaagatgaatatgaagatgtcgacaaccacaaagcatcctacaaaaaatctaacgatttaaacaaagaaaacaatggtcaaaaccctcaaatccttcatttaggtccattgcataaccaagaagcaacaaataatataactataaccaagactagtttttgggaagaagacatgtcttgtctaggttggcttcaagaacaaaacccgaactcagtcatttatatctcatttggaagttgggtttctcctataggagaatcaaatattcaaacgttggcattggcgttggaagcgtcagggagacctttcctttgggcgttaaaccgagtgtggcaagagggactaccaccaggttttgtgcatagagtcacaattaccaaaaaccaaggaaggatcgtctcatgggctccgcaacttgaagttcttagaaacgattctgtgggatgttacgtgactcattgtggctggaactcgactatggaggcagtggcaagttcccggaggctactatgttatccggtggccggagaccagtttgttaactgtaaatacatcgtggacgtttggaagattggagtgagattgagcgggtttggagagaaggaggttgaagatggactaaggaaagtaatggaggatcaagatatgggtgagagattgaggaagttaagagacagagcaatggggaatgaagctcgtttgagttcggaaatgaattttacatttttaaaaaacgagcttaattag

SEQ ID NO: 95686 - protein, 461 aa, Arabidopsis thaliana
  peptide (1)..(461): Ceres Seq. ID no. 12730025
MKVTQKPKIIFIPYPAQGHVTPMLHLASAFLSRGFSPVVMTPESIHRRISATNEDLGITFLALSDGQDRPDAPPSDFFSIENSMENIMPPQLERLLLEEDLDVACVVVDLLASWAIGVADRCGVPVAGFWPVMFAAYRLIQAIPELVRTGLVSQKGCPRQLEKTIVQPEQPLLSAEDLPWLIGTPKAQKKRFKFWQRTLERTKSLRWILTSSFKDEYEDVDNHKASYKKSNDLNKENNGQNPQILHLGPLHNQEATNNITITKTSFWEEDMSCLGWLQEQNPNSVIYISFGSWVSPIGESNIQTLALALEASGRPFLWALNRVWQEGLPPGFVHRVTITKNQGRIVSWAPQLEVLRNDSVGCYVTHCGWNSTMEAVASSRRLLCYPVAGDQFVNCKYIVDVWKIGVRLSGFGEKEVEDGLRKVMEDQDMGERLRKLRDRAMGNEARLSSEMNFTFLKNELN

SEQ ID NO: 95687 - protein, 439 aa, Arabidopsis thaliana
  peptide (1)..(439): Ceres Seq. ID no. 12730026
MLHLASAFLSRGFSPVVMTPESIHRRISATNEDLGITFLALSDGQDRPDAPPSDFFSIENSMENIMPPQLERLLLEEDLDVACVVVDLLASWAIGVADRCGVPVAGFWPVMFAAYRLIQAIPELVRTGLVSQKGCPRQLEKTIVQPEQPLLSAEDLPWLIGTPKAQKKRFKFWQRTLERTKSLRWILTSSFKDEYEDVDNHKASYKKSNDLNKENNGQNPQILHLGPLHNQEATNNITITKTSFWEEDMSCLGWLQEQNPNSVIYISFGSWVSPIGESNIQTLALALEASGRPFLWALNRVWQEGLPPGFVHRVTITKNQGRIVSWAPQLEVLRNDSVGCYVTHCGWNSTMEAVASSRRLLCYPVAGDQFVNCKYIVDVWKIGVRLSGFGEKEVEDGLRKVMEDQDMGERLRKLRDRAMGNEARLSSEMNFTFLKNELN

SEQ ID NO: 95688 - protein, 422 aa, Arabidopsis thaliana
  peptide (1)..(422): Ceres Seq. ID no. 12730027
MTPESIHRRISATNEDLGITFLALSDGQDRPDAPPSDFFSIENSMENIMPPQLERLLLEEDLDVACVVVDLLASWAIGVADRCGVPVAGFWPVMFAAYRLIQAIPELVRTGLVSQKGCPRQLEKTIVQPEQPLLSAEDLPWLIGTPKAQKKRFKFWQRTLERTKSLRWILTSSFKDEYEDVDNHKASYKKSNDLNKENNGQNPQILHLGPLHNQEATNNITITKTSFWEEDMSCLGWLQEQNPNSVIYISFGSWVSPIGESNIQTLALALEASGRPFLWALNRVWQEGLPPGFVHRVTITKNQGRIVSWAPQLEVLRNDSVGCYVTHCGWNSTMEAVASSRRLLCYPVAGDQFVNCKYIVDVWKIGVRLSGFGEKEVEDGLRKVMEDQDMGERLRKLRDRAMGNEARLSSEMNFTFLKNELN

SEQ ID NO: 95689 - DNA, 2140 bp, Arabidopsis thaliana
  misc_feature (1)..(2140): Ceres Seq. ID no. 12730035
  misc_feature (1)..(2140): Ortholog of  Ceres SEQ ID NO 13656177 as cited in SEQ ID NO 64997
aaacccttttgccgtctccctaaaaccctaattctcatttctggggtttcacatttcatcttcaccagaatccatcacactctctgaaatctgaaaatgattagcacagtacttcgccgatctatccttggtacgtcaaggcgtactctcgccgcttcggtgacctccattaacgcagctctatttcataaccttgctccagccgccgccacagtctccgatctagcaaatggagctactaatgtcaagtctctcccttcgaattcgagcccttttggtgttaaagtgagagactttcatgttaaatctgtaccgtcggagtttagatcgtcgattgtttcttctgcgggattcgcggctcaagagtatgctccttcttatgagaacgatggagggattggagattcggagagtgttggtagcagcggtggtggtgatgggcttgcgatagctgatcttggtatatctccggagattgttaaagctttgaagggtaggggtattgagaaactctttcctattcagaaagctgtgttggagccagcgatggagggtcgtgatatgattggccgtgcaaggactggaacgggaaagacacttgcttttgggattcctattattgacaaaatcatcaaattcaacgctaaacatggtcgtgggaagaatcctcagtgcttggttttggcaccgacgagggagcttgctcgtcaggttgagaaagagttcagggaatctgctccaagtttggatactatttgtctctatggaggtacaccaatcgggcaacaaatgagggagctgaactatggtattgatgtggcggttggaactcctggtcgtatcattgatctgatgaaaaggggagctttgaatctatcagaggttcagtttgtggttcttgatgaagctgatcagatgcttcaagttggatttgcggaagatgttgaaataatattgcagaagttgccagcgaagcgtcagagtatgatgttttctgcaacaatgccaagttggatcagatctctcaccaagaagtacctgaacaatcctttgacaattgatcttgttggagattcagatcagaaacttgcagatgggattactatgtattctatcgctgcagattcttatggaagagcatccatcattggtcctcttgtaaaggaacatggcaaaggaggaaaatgcattgtctttacccaaacaaaacgtgatgcagatcgccttgcatttggattggcaaaaagctataaatgtgaagctttacacggtgacatatctcaagctcagagagaaagaacacttgctggtttcagggatgggaatttcagtattcttgttgcaactgatgttgctgcccgtggacttgatgtacctaatgtcgatttagtaattcattatgagcttcctaataacacggagacgtttgttcaccgaacggggcgaactggtcgtgctggaaagaaaggaagcgcgattctcatccacggtcaagatcaaaccagggctgttaaaatgattgagaaagaagtcggaagcagattcaatgagctgcctagcattgctgtggaaagaggaagcgcaagcatgtttgaaggagtaggtgctagatctggtgggtcgttcggaggaggtcgatcaggcggtggtgggtatggtagttacggtagcagcagtggccgttcaggtggtggtagttatggaggttatggtggcagcagtggccgttcaggtggtggtggtggtagttatggaggttcagggggatcaagcagccgttactctggtggttcagaccgctcatctggtttcggaagctttggttcaggcggttcttcaggaggatttggttcagaccgttcttctcagtcaagtggaaggagcagctttggtgggtttggatcaaacgatggtaaaagatcttactgagagaagtgttgtgttggttttgacccgactcagcaataatggagttgacttaggagagaactcggtatctcgagttgagtagtttacaaggagtcgagctatatataaattctgtagctacttcttgtctcataaaccaacataagttatatcattatttcatatcctctaattcatttttatttctcaatttgagtgaaatgtgtttccc

SEQ ID NO: 95690 - protein, 610 aa, Arabidopsis thaliana
  peptide (1)..(610): Ceres Seq. ID no. 12730036
MISTVLRRSILGTSRRTLAASVTSINAALFHNLAPAAATVSDLANGATNVKSLPSNSSPFGVKVRDFHVKSVPSEFRSSIVSSAGFAAQEYAPSYENDGGIGDSESVGSSGGGDGLAIADLGISPEIVKALKGRGIEKLFPIQKAVLEPAMEGRDMIGRARTGTGKTLAFGIPIIDKIIKFNAKHGRGKNPQCLVLAPTRELARQVEKEFRESAPSLDTICLYGGTPIGQQMRELNYGIDVAVGTPGRIIDLMKRGALNLSEVQFVVLDEADQMLQVGFAEDVEIILQKLPAKRQSMMFSATMPSWIRSLTKKYLNNPLTIDLVGDSDQKLADGITMYSIAADSYGRASIIGPLVKEHGKGGKCIVFTQTKRDADRLAFGLAKSYKCEALHGDISQAQRERTLAGFRDGNFSILVATDVAARGLDVPNVDLVIHYELPNNTETFVHRTGRTGRAGKKGSAILIHGQDQTRAVKMIEKEVGSRFNELPSIAVERGSASMFEGVGARSGGSFGGGRSGGGGYGSYGSSSGRSGGGSYGGYGGSSGRSGGGGGSYGGSGGSSSRYSGGSDRSSGFGSFGSGGSSGGFGSDRSSQSSGRSSFGGFGSNDGKRSY

SEQ ID NO: 95691 - protein, 460 aa, Arabidopsis thaliana
  peptide (1)..(460): Ceres Seq. ID no. 12730037
MEGRDMIGRARTGTGKTLAFGIPIIDKIIKFNAKHGRGKNPQCLVLAPTRELARQVEKEFRESAPSLDTICLYGGTPIGQQMRELNYGIDVAVGTPGRIIDLMKRGALNLSEVQFVVLDEADQMLQVGFAEDVEIILQKLPAKRQSMMFSATMPSWIRSLTKKYLNNPLTIDLVGDSDQKLADGITMYSIAADSYGRASIIGPLVKEHGKGGKCIVFTQTKRDADRLAFGLAKSYKCEALHGDISQAQRERTLAGFRDGNFSILVATDVAARGLDVPNVDLVIHYELPNNTETFVHRTGRTGRAGKKGSAILIHGQDQTRAVKMIEKEVGSRFNELPSIAVERGSASMFEGVGARSGGSFGGGRSGGGGYGSYGSSSGRSGGGSYGGYGGSSGRSGGGGGSYGGSGGSSSRYSGGSDRSSGFGSFGSGGSSGGFGSDRSSQSSGRSSFGGFGSNDGKRSY

SEQ ID NO: 95692 - protein, 455 aa, Arabidopsis thaliana
  peptide (1)..(455): Ceres Seq. ID no. 12730038
MIGRARTGTGKTLAFGIPIIDKIIKFNAKHGRGKNPQCLVLAPTRELARQVEKEFRESAPSLDTICLYGGTPIGQQMRELNYGIDVAVGTPGRIIDLMKRGALNLSEVQFVVLDEADQMLQVGFAEDVEIILQKLPAKRQSMMFSATMPSWIRSLTKKYLNNPLTIDLVGDSDQKLADGITMYSIAADSYGRASIIGPLVKEHGKGGKCIVFTQTKRDADRLAFGLAKSYKCEALHGDISQAQRERTLAGFRDGNFSILVATDVAARGLDVPNVDLVIHYELPNNTETFVHRTGRTGRAGKKGSAILIHGQDQTRAVKMIEKEVGSRFNELPSIAVERGSASMFEGVGARSGGSFGGGRSGGGGYGSYGSSSGRSGGGSYGGYGGSSGRSGGGGGSYGGSGGSSSRYSGGSDRSSGFGSFGSGGSSGGFGSDRSSQSSGRSSFGGFGSNDGKRSY

SEQ ID NO: 95693 - DNA, 2052 bp, Arabidopsis thaliana
  misc_feature (1)..(2052): Ceres Seq. ID no. 12730039
  misc_feature (1)..(2052): Ortholog of  Ceres SEQ ID NO 13656177 as cited in SEQ ID NO 64997
atcaagagaacacctgaatctgaaaatgatcactacagtgctacgacgatctctccttgatgcgtcgaagaggaatctctccgcttcgttgacctcaatcaatactgttctgtttcacaacctggccccagccgccactagagtctccgacctagccttaattggatcttccgatgtcaaagctgggtttccgtttggtgttgaagcgaaaggaattcattttcaatctgggccgttggattttagagcttcgatggtttctcaagctggatttgcgatctctgagagtagcgagagaagggttggtgattcggagagtgttggtggtgatgggcttgcgatatctgagcttgggatatctccggagattgttaaagctttgagtagtaagggtattgagaaactctttcctattcagaaagctgtgctggagccagcgatggagggtcgagatatgattggtcgtgctaggactggaacgggaaagacacttgcttttgggattcctatcattgacaaaatcatcaaatacaacgctaaacatggacgagggaggaatccgctttgtttggttttggcaccgacaagagagcttgctcgccaggttgagaaggagtttagggagtctgctccgagcttggatactatttgtctttatggaggtacaccgattggacagcaaatgaggcagcttgactatggtgttgatgtggcggttggaactccaggtcgtgtcattgatctgatgaagagaggagctttgaatctatcggaagttcagtttgtggttctggatgaagctgatcagatgcttcaagttggatttgctgaggatgttgaaataatattggaaaagttgcctgagaaacgtcagagtatgatgttttctgcaacaatgccgagttggatcagatctctcactaagaagtacctgaataatcctttgacagttgatcttgttggagattctgatcagaaactagcagatggaattacgacatattctatcatagcagattcttatggaagagcatccattattggtcctcttgtaacggagcatgccaaaggaggaaaatgcattgtttttacacaaacaaaacgagatgctgatcgcctttcatatgcattggctagaagcttcaaatgtgaagctttacacggtgatatatcccagagtcagagggaaagaacgcttgctggtttccgagatgggcatttcaatattcttgttgcgactgatgttgctgcccgtggacttgatgtacctaatgtcgatttgatcattcactatgagcttcctaataacacggagacatttgtccatcgaaccgggcgaacgggtcgggctggaaagaaaggaagtgctattctgatctacagtcaagatcaatccagggctgtaaaaataattgagagagaagttgggagccgattcactgagctccctagcattgctgtggaacgtggaagcgcaagcatgtttgaaggaataggttctcgatccggtggttcctttggaggaggcatgagggatcgtggttcaagctttggtggtcgttcaggcggtggtggttatggtggcagcagtggtggttatggtggtgggcgttcaggcggatcaagcaaccgttattctggtgattctgaccgttctggttttgggagcttcggtatgcgttctcctgagggatatggttcggatcgttcatctcagtcaggtggaaggagcagctttggtggtggtcgttcaggcggatcatcaaacaatcgttcctctggtttcggggactttggctctgaccgttcttctcagtcaggcggaaggagcagctttggtgggtttggatcaaatgatgggaaaagatcttactgagagaagtgtttttggagccgagccggcaataattggtttgaccctaggaggagggaggattcggtgactcgagtagattagttactacggcggatacgaaggagtcaagttatatatataaatctgtagctatgtaaaacaaacatatactttcgaagttatgttatcatcatttc

SEQ ID NO: 95694 - protein, 624 aa, Arabidopsis thaliana
  peptide (1)..(624): Ceres Seq. ID no. 12730040
SREHLNLKMITTVLRRSLLDASKRNLSASLTSINTVLFHNLAPAATRVSDLALIGSSDVKAGFPFGVEAKGIHFQSGPLDFRASMVSQAGFAISESSERRVGDSESVGGDGLAISELGISPEIVKALSSKGIEKLFPIQKAVLEPAMEGRDMIGRARTGTGKTLAFGIPIIDKIIKYNAKHGRGRNPLCLVLAPTRELARQVEKEFRESAPSLDTICLYGGTPIGQQMRQLDYGVDVAVGTPGRVIDLMKRGALNLSEVQFVVLDEADQMLQVGFAEDVEIILEKLPEKRQSMMFSATMPSWIRSLTKKYLNNPLTVDLVGDSDQKLADGITTYSIIADSYGRASIIGPLVTEHAKGGKCIVFTQTKRDADRLSYALARSFKCEALHGDISQSQRERTLAGFRDGHFNILVATDVAARGLDVPNVDLIIHYELPNNTETFVHRTGRTGRAGKKGSAILIYSQDQSRAVKIIEREVGSRFTELPSIAVERGSASMFEGIGSRSGGSFGGGMRDRGSSFGGRSGGGGYGGSSGGYGGGRSGGSSNRYSGDSDRSGFGSFGMRSPEGYGSDRSSQSGGRSSFGGGRSGGSSNNRSSGFGDFGSDRSSQSGGRSSFGGFGSNDGKRSY

SEQ ID NO: 95695 - protein, 616 aa, Arabidopsis thaliana [sequence omitted]

SEQ ID NO: 95696 - protein, 540 aa, Arabidopsis thaliana
  peptide (1)..(540): Ceres Seq. ID no. 12730042
MVSQAGFAISESSERRVGDSESVGGDGLAISELGISPEIVKALSSKGIEKLFPIQKAVLEPAMEGRDMIGRARTGTGKTLAFGIPIIDKIIKYNAKHGRGRNPLCLVLAPTRELARQVEKEFRESAPSLDTICLYGGTPIGQQMRQLDYGVDVAVGTPGRVIDLMKRGALNLSEVQFVVLDEADQMLQVGFAEDVEIILEKLPEKRQSMMFSATMPSWIRSLTKKYLNNPLTVDLVGDSDQKLADGITTYSIIADSYGRASIIGPLVTEHAKGGKCIVFTQTKRDADRLSYALARSFKCEALHGDISQSQRERTLAGFRDGHFNILVATDVAARGLDVPNVDLIIHYELPNNTETFVHRTGRTGRAGKKGSAILIYSQDQSRAVKIIEREVGSRFTELPSIAVERGSASMFEGIGSRSGGSFGGGMRDRGSSFGGRSGGGGYGGSSGGYGGGRSGGSSNRYSGDSDRSGFGSFGMRSPEGYGSDRSSQSGGRSSFGGGRSGGSSNNRSSGFGDFGSDRSSQSGGRSSFGGFGSNDGKRSY

SEQ ID NO: 95697 - DNA, 978 bp, Arabidopsis thaliana
  misc_feature (1)..(978): Ceres Seq. ID no. 12730047
  misc_feature (1)..(978): Ortholog of  Ceres SEQ ID NO 13654187 as cited in SEQ ID NO 68219
atgatgatgagtcgtcgctatggagccaagctaatggaaactgctgtgactcacagccatcttttgaatcctagggttcctctcgtgacggaaaatattagggttccggcgatgggagtcgtgagagttttcagcaagatgacatttgagaagaagaaaactacggaggagaaaggatctagcggtggcaaggctgatcaaggtaacaaaggggagcaattaatcgttagctactggggagtgaagccgatgaagatcaccaaagaagatggaactgaatggaaatggagttgctttaggccatgggagacatataaatcagatctgactatagatttgaagaagcatcatgttccatcgactttaccggacaaactagcttattggaccgtgaaatctcttcgatggcctaccgatcttttcttccagaggcggtacggatgcagagcaatgatgctagaaacggttgcagcggttccaggaatggttggagggatgttagtacactgcaaatcgcttcgacggtttgaacaaagcggtggttggatcaaagccctacttgaagaagcagagaacgagagaatgcatttaatgacattcatggaagtcgcgaaacctaattggtacgaacgagctcttgtgattgccgttcaaggcattttcttcaatgcttatttccttggatacctaatttctcccaaatttgctcatcgtatggttggataccttgaggaagaagcaatccactcttacactgagtttcttaaagaactcgataatggtaacatcgaaaatgtgcctgcaccggctattgccattgattactggagacttgaagctgatgcgacgcttcgtgatgtcgtcatggtggtccgtgctgatgaagcgcatcaccgtgatgttaaccactatgcatccgatattcattaccaaggtcgtgagctaaaagaagctccagctcccattggatatcattga

SEQ ID NO: 95698 - protein, 325 aa, Arabidopsis thaliana
  peptide (1)..(325): Ceres Seq. ID no. 12730048
MMMSRRYGAKLMETAVTHSHLLNPRVPLVTENIRVPAMGVVRVFSKMTFEKKKTTEEKGSSGGKADQGNKGEQLIVSYWGVKPMKITKEDGTEWKWSCFRPWETYKSDLTIDLKKHHVPSTLPDKLAYWTVKSLRWPTDLFFQRRYGCRAMMLETVAAVPGMVGGMLVHCKSLRRFEQSGGWIKALLEEAENERMHLMTFMEVAKPNWYERALVIAVQGIFFNAYFLGYLISPKFAHRMVGYLEEEAIHSYTEFLKELDNGNIENVPAPAIAIDYWRLEADATLRDVVMVVRADEAHHRDVNHYASDIHYQGRELKEAPAPIGYH

SEQ ID NO: 95699 - protein, 324 aa, Arabidopsis thaliana
  peptide (1)..(324): Ceres Seq. ID no. 12730049
MMSRRYGAKLMETAVTHSHLLNPRVPLVTENIRVPAMGVVRVFSKMTFEKKKTTEEKGSSGGKADQGNKGEQLIVSYWGVKPMKITKEDGTEWKWSCFRPWETYKSDLTIDLKKHHVPSTLPDKLAYWTVKSLRWPTDLFFQRRYGCRAMMLETVAAVPGMVGGMLVHCKSLRRFEQSGGWIKALLEEAENERMHLMTFMEVAKPNWYERALVIAVQGIFFNAYFLGYLISPKFAHRMVGYLEEEAIHSYTEFLKELDNGNIENVPAPAIAIDYWRLEADATLRDVVMVVRADEAHHRDVNHYASDIHYQGRELKEAPAPIGYH

SEQ ID NO: 95700 - protein, 323 aa, Arabidopsis thaliana
  peptide (1)..(323): Ceres Seq. ID no. 12730050
MSRRYGAKLMETAVTHSHLLNPRVPLVTENIRVPAMGVVRVFSKMTFEKKKTTEEKGSSGGKADQGNKGEQLIVSYWGVKPMKITKEDGTEWKWSCFRPWETYKSDLTIDLKKHHVPSTLPDKLAYWTVKSLRWPTDLFFQRRYGCRAMMLETVAAVPGMVGGMLVHCKSLRRFEQSGGWIKALLEEAENERMHLMTFMEVAKPNWYERALVIAVQGIFFNAYFLGYLISPKFAHRMVGYLEEEAIHSYTEFLKELDNGNIENVPAPAIAIDYWRLEADATLRDVVMVVRADEAHHRDVNHYASDIHYQGRELKEAPAPIGYH

SEQ ID NO: 95701 - DNA, 1215 bp, Arabidopsis thaliana
  misc_feature (1)..(1215): Ceres Seq. ID no. 12730067
  misc_feature (1)..(1215): Ortholog of  Ceres SEQ ID NO 15177291 as cited in SEQ ID NO 52286
  misc_feature (1)..(1215): Ortholog of  Ceres SEQ ID NO 13595164 as cited in SEQ ID NO 56222
  misc_feature (1)..(1215): Ortholog of  Ceres SEQ ID NO 14315021 as cited in SEQ ID NO 57018
  misc_feature (1)..(1215): Ortholog of  Ceres SEQ ID NO 15177783 as cited in SEQ ID NO 58894
  misc_feature (1)..(1215): Ortholog of  Ceres SEQ ID NO 13591068 as cited in SEQ ID NO 69043
  misc_feature (1)..(1215): Ortholog of  Ceres SEQ ID NO 13623041 as cited in SEQ ID NO 0
tcttccatagccgatcgacctttgttcacaattcccaccgatttttatttgctagatcgatatattttcagtgagcttgaaacatggcttcagtggctcctaaaatcgctaaagatgtaactgaactaatagggaacactccattagtgtatctaaacaaagtagctaaagattgtgttggtcatgttgctgctaagcttgagatgatggaaccatgttctagcgtcaaagacaggattggttatagtatgattgctgatgcagaagctaaaggacttattaaaccgggagagagtgtgttgattgagccaacaagtgggaacactggagttggtttagcatttactgcagctgcaaagggctataagcttgttataacaatgccagcttcaatgagtatagagagaagaatcattctcttagcttttggagctgagttgattcttactgatccggctaaaggtatgaaaggtgctgttgcaaaggcggaggagattttggcgaaaacacctaatggttatatgcttcaacagtttgagaatcctgctaatccaaagatccattatgagactactggacctgagatatggaaaggttctggtggaaaagtggatggctttgtttctggtattggtactggtggtacctgaacaggtgctgggaagtatctcaaggaacagaacacaaacataaagctgtatggtgtcgagcctgttgaaagccctattctgtccggtggaaagccaggtccccacaaaattcaaggtataggtgctggttttattccaggcattttggatgttgatcttatagatgaagttgttcaggtttcaagtgaagaatccattgacatggcaaggcttcttgctagggaagagggtctgttagtgggaatctcatctggagcagcagctactgcagcaatcaaacttgcaaagaggccagaaaatgctgggaagcttatagtggcggtgtttccgagtttcggggaaagatatctatcgactgtactgtttgatgcagcaaggaaagaggcagagactatgacctttgagccctgaatctgttcccctttcttcttggtgatacaaataaatgatctttcttccaacatatatatcttcagattctgtctgtatcttgtcatttgtgagaactcaaaagtagtttgtctgctactatgaacaatccatttctagaaagtttctggttgag

SEQ ID NO: 95702 - protein, 188 aa, Arabidopsis thaliana
  peptide (1)..(188): Ceres Seq. ID no. 12730068
MASVAPKIAKDVTELIGNTPLVYLNKVAKDCVGHVAAKLEMMEPCSSVKDRIGYSMIADAEAKGLIKPGESVLIEPTSGNTGVGLAFTAAAKGYKLVITMPASMSIERRIILLAFGAELILTDPAKGMKGAVAKAEEILAKTPNGYMLQQFENPANPKIHYETTGPEIWKGSGGKVDGFVSGIGTGGT

SEQ ID NO: 95703 - protein, 148 aa, Arabidopsis thaliana
  peptide (1)..(148): Ceres Seq. ID no. 12730069
MMEPCSSVKDRIGYSMIADAEAKGLIKPGESVLIEPTSGNTGVGLAFTAAAKGYKLVITMPASMSIERRIILLAFGAELILTDPAKGMKGAVAKAEEILAKTPNGYMLQQFENPANPKIHYETTGPEIWKGSGGKVDGFVSGIGTGGT

SEQ ID NO: 95704 - protein, 147 aa, Arabidopsis thaliana
  peptide (1)..(147): Ceres Seq. ID no. 12730070
MEPCSSVKDRIGYSMIADAEAKGLIKPGESVLIEPTSGNTGVGLAFTAAAKGYKLVITMPASMSIERRIILLAFGAELILTDPAKGMKGAVAKAEEILAKTPNGYMLQQFENPANPKIHYETTGPEIWKGSGGKVDGFVSGIGTGGT

SEQ ID NO: 95705 - DNA, 1860 bp, Arabidopsis thaliana
  misc_feature (1)..(1860): Ceres Seq. ID no. 12730071
  misc_feature (1)..(1860): Ortholog of  Ceres SEQ ID NO 13648499 as cited in SEQ ID NO 20458
  misc_feature (1)..(1860): Ortholog of  Ceres SEQ ID NO 13657677 as cited in SEQ ID NO 66119
atgatacagagattgattcctctaaatcgaaaagcttcgaactttactcagattcttgagaaaggtacttctttattacactattctagtatcaccgaagcgaagctttcttataaagagagattaaggaatgggattgttgatattaaggttaatgatgctattgatctcttcgaatccatgattcaatctcgtcctttacctactccaatcgatttcaatagattgtgtagtgctgttgctagaacgaaacagtatgatttagtgttaggtttctgcaagggaatggagttgaatgggattgagcatgacatgtatactatgaccattatgatcaattgctattgtagaaaaaagaaacttcttttcgcattttctgttcttgggagagcttggaagcttgggtatgagcctgatacaatcacgttttcgactttggttaacgggttttgcctcgagggtagagtttctgaagcggttgcgttagttgatcggatggtggaaatgaagcaaagaccggatcttgtaaccgttagcactctgatcaatggactttgtctaaagggtagagtgtctgaagctttggttttgattgataggatggttgagtatggttttcaacctgatgaggttacttatggaccggttttgaatagactgtgtaagtcagggaactctgctttggctttggatttgtttagaaagatggaagaaagaaatatcaaagctagtgttgttcagtatagtattgttattgatagtctttgtaaagatgggagctttgacgatgcgcttagccttttcaatgagatggagatgaaagggattaaagctgatgttgttacgtatagttctcttataggaggtctttgtaacgacggtaaatgggatgatggtgcaaagatgttgagggagatgattggaaggaatatcattcccgatgttgtcacatttagtgctttgattgatgtttttgtgaaagaggggaagcttctagaggctaaagagttgtacaatgagatgatcacaagaggtatagctcctgacaccattacatataattcattaattgatgggttttgtaaggagaattgcttacatgaggctaatcagatgtttgatctgatggttagcaaagggtgcgaacctgacatcgtgacttatagtattctcataaatagctactgcaaagctaagagagttgatgatggtatgagactttttcgtgagatttcttcgaaaggattgattcctaatacaatcacttataacactcttgtcctagggttttgtcaatcgggaaaacttaacgccgccaaagaactcttccaagagatggtttctcgtggtgtgccaccaagtgttgtaacttatggtattttgctggatggtttgtgtgacaatggtgaactaaataaagcattggagatatttgagaaaatgcagaagagtaggatgactcttggtattggtatctataatatcatcattcacgggatgtgcaatgctagtaaggtcgatgatgcttggagtttattctgtagcctctctgacaaaggagtgaaacctgatgtcgtgacatacaatgtaatgattggaggactatgtaagaaaggctcgttgtctgaagccgatatgctgtttagaaaaatgaaggaggatgggtgtactccggatgattttacgtacaacattcttatcagggcacatcttggaggtagtggtctaatctcttcagttgaactcatagaagaaatgaaggtgtgtgggttctctgcagattcttccaccataaagatggttattgatatgttatcagatcgtagattggataaaagctttttggatatgctttcttga

SEQ ID NO: 95706 - protein, 619 aa, Arabidopsis thaliana
  peptide (1)..(619): Ceres Seq. ID no. 12730072
MIQRLIPLNRKASNFTQILEKGTSLLHYSSITEAKLSYKERLRNGIVDIKVNDAIDLFESMIQSRPLPTPIDFNRLCSAVARTKQYDLVLGFCKGMELNGIEHDMYTMTIMINCYCRKKKLLFAFSVLGRAWKLGYEPDTITFSTLVNGFCLEGRVSEAVALVDRMVEMKQRPDLVTVSTLINGLCLKGRVSEALVLIDRMVEYGFQPDEVTYGPVLNRLCKSGNSALALDLFRKMEERNIKASVVQYSIVIDSLCKDGSFDDALSLFNEMEMKGIKADVVTYSSLIGGLCNDGKWDDGAKMLREMIGRNIIPDVVTFSALIDVFVKEGKLLEAKELYNEMITRGIAPDTITYNSLIDGFCKENCLHEANQMFDLMVSKGCEPDIVTYSILINSYCKAKRVDDGMRLFREISSKGLIPNTITYNTLVLGFCQSGKLNAAKELFQEMVSRGVPPSVVTYGILLDGLCDNGELNKALEIFEKMQKSRMTLGIGIYNIIIHGMCNASKVDDAWSLFCSLSDKGVKPDVVTYNVMIGGLCKKGSLSEADMLFRKMKEDGCTPDDFTYNILIRAHLGGSGLISSVELIEEMKVCGFSADSSTIKMVIDMLSDRRLDKSFLDMLS

SEQ ID NO: 95707 - protein, 559 aa, Arabidopsis thaliana
  peptide (1)..(559): Ceres Seq. ID no. 12730073
MIQSRPLPTPIDFNRLCSAVARTKQYDLVLGFCKGMELNGIEHDMYTMTIMINCYCRKKKLLFAFSVLGRAWKLGYEPDTITFSTLVNGFCLEGRVSEAVALVDRMVEMKQRPDLVTVSTLINGLCLKGRVSEALVLIDRMVEYGFQPDEVTYGPVLNRLCKSGNSALALDLFRKMEERNIKASVVQYSIVIDSLCKDGSFDDALSLFNEMEMKGIKADVVTYSSLIGGLCNDGKWDDGAKMLREMIGRNIIPDVVTFSALIDVFVKEGKLLEAKELYNEMITRGIAPDTITYNSLIDGFCKENCLHEANQMFDLMVSKGCEPDIVTYSILINSYCKAKRVDDGMRLFREISSKGLIPNTITYNTLVLGFCQSGKLNAAKELFQEMVSRGVPPSVVTYGILLDGLCDNGELNKALEIFEKMQKSRMTLGIGIYNIIIHGMCNASKVDDAWSLFCSLSDKGVKPDVVTYNVMIGGLCKKGSLSEADMLFRKMKEDGCTPDDFTYNILIRAHLGGSGLISSVELIEEMKVCGFSADSSTIKMVIDMLSDRRLDKSFLDMLS

SEQ ID NO: 95708 - protein, 524 aa, Arabidopsis thaliana
  peptide (1)..(524): Ceres Seq. ID no. 12730074
MELNGIEHDMYTMTIMINCYCRKKKLLFAFSVLGRAWKLGYEPDTITFSTLVNGFCLEGRVSEAVALVDRMVEMKQRPDLVTVSTLINGLCLKGRVSEALVLIDRMVEYGFQPDEVTYGPVLNRLCKSGNSALALDLFRKMEERNIKASVVQYSIVIDSLCKDGSFDDALSLFNEMEMKGIKADVVTYSSLIGGLCNDGKWDDGAKMLREMIGRNIIPDVVTFSALIDVFVKEGKLLEAKELYNEMITRGIAPDTITYNSLIDGFCKENCLHEANQMFDLMVSKGCEPDIVTYSILINSYCKAKRVDDGMRLFREISSKGLIPNTITYNTLVLGFCQSGKLNAAKELFQEMVSRGVPPSVVTYGILLDGLCDNGELNKALEIFEKMQKSRMTLGIGIYNIIIHGMCNASKVDDAWSLFCSLSDKGVKPDVVTYNVMIGGLCKKGSLSEADMLFRKMKEDGCTPDDFTYNILIRAHLGGSGLISSVELIEEMKVCGFSADSSTIKMVIDMLSDRRLDKSFLDMLS

SEQ ID NO: 95709 - DNA, 1080 bp, Arabidopsis thaliana
  misc_feature (1)..(1080): Ceres Seq. ID no. 12730079
  misc_feature (1)..(1080): Ortholog of  Ceres SEQ ID NO 14311773 as cited in SEQ ID NO 59245
  misc_feature (1)..(1080): Ortholog of  Ceres SEQ ID NO 15225880 as cited in SEQ ID NO 0
aacagaacattaacgtaacaaaacaaagatgagccaagagcaaccaaggaggccaagagagccagtcaaatacggggacgtttttgaagtctccggtgaactcgctgataagcccatagcacctgaggatgcaaagatgatgcaatccgcggagacacatgtgttcggccatactcagaaaggcggtccagctgcggtcatgcaatctgcagccaccaccaatatacgcggtggctttgtccatccagatgacaaaactgagcttgtcgctgaacgaggcgccacagtggagcaaacggtccctgctgcaactgtcacaaccgaattcgtcggtggacaggtcgttggacaacacgttgaaccgaggcgtgtagtcgctgctgcgcgtacggacgaagaagctttgcaaagtacaataacgattggagaagcactggaagcaactgtgaagacagctggaaacaaacctgtggatcaaagcgacgccgcagcgattcaagcggcagagatgagagcttccggtaccaacgtcattgctctagctggagtcgccgcttcagctcaatctgcagcggatcacaacgctaccgtagatcgtgacgagaggaaaatcaagcttcgtgatgttttgacgggtgcagcagggaagttatcggcagacagagctgtgacgagggaagatgccgagggagtggtgagcgcagagatgaggaataaccctaaattgtgtactcaccctggtggtgtagcggcttctcttaccgtcgctgctaggcttaacgagagagttgatatatgacaagacaaatccggcgagaggatcgatgatctttcttttttttgtttgtttgtttgtttgttcgtctctctttcacaacttaggaaacttgttatgtaaaatcgtctacagcttttggtcctttagccgatatgttagaaaatccggcggggagaggatggtgttcacaagcttgtgacatttaatcgactagcttttttgttcttttttgtatcttactgcttaaaaacttcccaaggatgatgttggaatgaataatggggactttttagtttgaagtt

SEQ ID NO: 95710 - protein, 256 aa, Arabidopsis thaliana
  peptide (1)..(256): Ceres Seq. ID no. 12730080
MSQEQPRRPREPVKYGDVFEVSGELADKPIAPEDAKMMQSAETHVFGHTQKGGPAAVMQSAATTNIRGGFVHPDDKTELVAERGATVEQTVPAATVTTEFVGGQVVGQHVEPRRVVAAARTDEEALQSTITIGEALEATVKTAGNKPVDQSDAAAIQAAEMRASGTNVIALAGVAASAQSAADHNATVDRDERKIKLRDVLTGAAGKLSADRAVTREDAEGVVSAEMRNNPKLCTHPGGVAASLTVAARLNERVDI

SEQ ID NO: 95711 - protein, 220 aa, Arabidopsis thaliana
  peptide (1)..(220): Ceres Seq. ID no. 12730081
MMQSAETHVFGHTQKGGPAAVMQSAATTNIRGGFVHPDDKTELVAERGATVEQTVPAATVTTEFVGGQVVGQHVEPRRVVAAARTDEEALQSTITIGEALEATVKTAGNKPVDQSDAAAIQAAEMRASGTNVIALAGVAASAQSAADHNATVDRDERKIKLRDVLTGAAGKLSADRAVTREDAEGVVSAEMRNNPKLCTHPGGVAASLTVAARLNERVDI

SEQ ID NO: 95712 - protein, 219 aa, Arabidopsis thaliana
  peptide (1)..(219): Ceres Seq. ID no. 12730082
MQSAETHVFGHTQKGGPAAVMQSAATTNIRGGFVHPDDKTELVAERGATVEQTVPAATVTTEFVGGQVVGQHVEPRRVVAAARTDEEALQSTITIGEALEATVKTAGNKPVDQSDAAAIQAAEMRASGTNVIALAGVAASAQSAADHNATVDRDERKIKLRDVLTGAAGKLSADRAVTREDAEGVVSAEMRNNPKLCTHPGGVAASLTVAARLNERVDI

SEQ ID NO: 95713 - DNA, 2089 bp, Arabidopsis thaliana
  misc_feature (1)..(2089): Ceres Seq. ID no. 12730104
  misc_feature (1)..(2089): Ortholog of  Ceres SEQ ID NO 13593889 as cited in SEQ ID NO 53305
  misc_feature (1)..(2089): Ortholog of  Ceres SEQ ID NO 13581959 as cited in SEQ ID NO 56156
actctcagcctctccttcttcgtttcctaaactcatttttcttcgctctctttagattctttttttctcatatctctccttgatcctctgttttttattctgaggttgtttttcggagaaggaatcacctaaaccctttcaaatctcttcttctaccaaatatatttttttggatgaaaaaaacttctaccaaattctcagattttatttccttgagggttttgtgttttttttgcatggtctagttgatttctgaaatttaagtatatcttgtttacgataatatagaaaaaaattattggtgtttttgtgtgtttataatttatcttgggtcaatgataatagtggacgacgagtcggtgtcttagggtttactttttgtaaagaaaattttcttgttgaattattggctttttgtgaattcgattttctcttatttatataaaacattattgaatttcaacgctattttgaaaattttatttttaatattcatgttgtattagaatctggaatgtcagaagaacgtgtgcaggaacaagaacttggggttggtgtaatagtttaaataaattcttacaaagaataaaaaaaaaatcaggttctctgcaccaaatttttaaaatcattatttaacatattttgctaaattctctaaaaacaaatttgataatgatgaaaattttgattagttctgtgttgtgtttggtgattgcttgaattaagtctgattgaattttagggttatttgagttttgtgtgtctttgagattattgttttacaagaaaaaaaagaaaaaaagagagatggaaacaagaaacgagacaaaagcttcaccggaaaacaacctcagaaacagaggagctgatggaaacaatagcaagaaagacatgattttccgagctgataagattgatttgaagaatttggatatccagctagagaaacatctgagtagggtttggtcaagaagcattgagaagcaccctaagcctaaggaggaatgggaaattgaattggctaaattagagatgaggaatgtcattgctcgtggtgcttatggtattgtctacaaaggcatatatgatggtcaagatgttgctgtgaaagtacttgattggggagaagatggttacgcgacaacggctgagacatctgctctacgtgcttcatttcgtcaagaagttgcggtttggcataagcttgaccatcctaatgtcacaaggtttgtgggagcatcaatgggaacagcgaatttgaagataccttcatcagctgagacggagaactcgttgcctcaacgagcttgttgtgtcgttgtggagtatatccctggaggaactcttaagcagtatttgttccgaaacaggcgaaagaaactcgcttttaaagtcgtggttcaactcgctctcgatctctcccgagggttaagttatttgcattcagagaggattgttcatcgcgatgtgaaaacagagaatatgcttttggattatcagaggaatctaaagattgctgattttggggttgctagagttgaagctcagaatccaaaagacatgactggagaaactggaactcttggatacatggctccagaggttcttgatggcaagccatacaacagaagatgtgatgtttacagctttgggatatgcttgtgggagatttattgttgtgatatgccttatcctgatctcagctttgctgatgtttcttctgctgttgttcgtcagaatctgagaccggatattccaagatgttgtccaacagcattggcgaccataatgaagagatgttgggaagctaatccggagaaacgaccagagatggaggaagttgtgagtttgcttgaagctgtcgacaccaccaaaggcggtggaatgatcccggaagatcagagacctggctgtttctgctttgtctctggtcgtggtccctaattttaccccctctctctttttacctttatttatttacttacttaccttcacattgaattttggagcaatgctctgttttttttcttcttctttaatctgtcaagataaaaaaagattttcattattaatatatatacacattatt

SEQ ID NO: 95714 - protein, 378 aa, Arabidopsis thaliana
  peptide (1)..(378): Ceres Seq. ID no. 12730105
METRNETKASPENNLRNRGADGNNSKKDMIFRADKIDLKNLDIQLEKHLSRVWSRSIEKHPKPKEEWEIELAKLEMRNVIARGAYGIVYKGIYDGQDVAVKVLDWGEDGYATTAETSALRASFRQEVAVWHKLDHPNVTRFVGASMGTANLKIPSSAETENSLPQRACCVVVEYIPGGTLKQYLFRNRRKKLAFKVVVQLALDLSRGLSYLHSERIVHRDVKTENMLLDYQRNLKIADFGVARVEAQNPKDMTGETGTLGYMAPEVLDGKPYNRRCDVYSFGICLWEIYCCDMPYPDLSFADVSSAVVRQNLRPDIPRCCPTALATIMKRCWEANPEKRPEMEEVVSLLEAVDTTKGGGMIPEDQRPGCFCFVSGRGP

SEQ ID NO: 95715 - protein, 350 aa, Arabidopsis thaliana
  peptide (1)..(350): Ceres Seq. ID no. 12730106
MIFRADKIDLKNLDIQLEKHLSRVWSRSIEKHPKPKEEWEIELAKLEMRNVIARGAYGIVYKGIYDGQDVAVKVLDWGEDGYATTAETSALRASFRQEVAVWHKLDHPNVTRFVGASMGTANLKIPSSAETENSLPQRACCVVVEYIPGGTLKQYLFRNRRKKLAFKVVVQLALDLSRGLSYLHSERIVHRDVKTENMLLDYQRNLKIADFGVARVEAQNPKDMTGETGTLGYMAPEVLDGKPYNRRCDVYSFGICLWEIYCCDMPYPDLSFADVSSAVVRQNLRPDIPRCCPTALATIMKRCWEANPEKRPEMEEVVSLLEAVDTTKGGGMIPEDQRPGCFCFVSGRGP

SEQ ID NO: 95716 - protein, 303 aa, Arabidopsis thaliana
  peptide (1)..(303): Ceres Seq. ID no. 12730107
MRNVIARGAYGIVYKGIYDGQDVAVKVLDWGEDGYATTAETSALRASFRQEVAVWHKLDHPNVTRFVGASMGTANLKIPSSAETENSLPQRACCVVVEYIPGGTLKQYLFRNRRKKLAFKVVVQLALDLSRGLSYLHSERIVHRDVKTENMLLDYQRNLKIADFGVARVEAQNPKDMTGETGTLGYMAPEVLDGKPYNRRCDVYSFGICLWEIYCCDMPYPDLSFADVSSAVVRQNLRPDIPRCCPTALATIMKRCWEANPEKRPEMEEVVSLLEAVDTTKGGGMIPEDQRPGCFCFVSGRGP

SEQ ID NO: 95717 - DNA, 1538 bp, Arabidopsis thaliana
  misc_feature (1)..(1538): Ceres Seq. ID no. 12730108
  misc_feature (1)..(1538): Ortholog of  Ceres SEQ ID NO 14315455 as cited in SEQ ID NO 56988
  misc_feature (1)..(1538): Ortholog of  Ceres SEQ ID NO 13596921 as cited in SEQ ID NO 62368
acaaaatatctctccctctatctgcaaattttccaaagttgcatcctttcaatttccactcctctctaatataattcacattttcccactattgctgattcatttttttttgtgaattatttcaaacccacataaaaaaatctttgtttaaatttaaaaccatggatccttcatttaggttcattaaagaggagtttcctgctggattcagtgattctccatcaccaccatcttcttcttcatacctttattcatcttccatggctgaagcagccataaatgatccaacaacattgagctatccacaaccattagaaggtctccatgaatcagggccacctccatttttgacaaagacatatgacttggtggaagattcaagaaccaatcatgtcgtgtcttggagcaaatccaataacagcttcattgtctgggatccacaggccttttctgtaactctccttcccagattcttcaagcacaataacttctccagttttgtccgccagctcaacacatatggtttcagaaaggtgaatccggatcggtgggagtttgcaaacgaagggtttcttagagggcaaaagcatctcctcaagaacataaggagaagaaaaacaagtaataatagtaatcaaatgcaacaacctcaaagttctgaacaacaatctctagacaatttttgcatagaagtgggtaggtacggtctagatggagagatggacagcctaaggcgagacaagcaagtgttgatgatggagctagtgagactaagacagcaacaacaaagcaccaaaatgtatctcacattgattgaagagaagctcaagaagaccgagtcaaaacaaaaacaaatgatgagcttccttgcccgcgcaatgcagaatccagattttattcagcagctagtagagcagaaggaaaagaggaaagagatcgaagaggcgatcagcaagaagagacaaagaccgatcgatcaaggaaaaagaaatgtggaagattatggtgatgaaagtggttatgggaatgatgttgcagcctcatcctcagcattgattggtatgagtcaggaatatacatatggaaacatgtctgaattcgagatgtcggagttggacaaacttgctatgcacattcaaggacttggagataattccagtgctagggaagaagtcttgaatgtggaaaaaggaaatgatgaggaagaagtagaagatcaacaacaagggtaccataaggagaacaatgagatttatggtgaaggtttttgggaagatttgttaaatgaaggtcaaaattttgattttgaaggagatcaagaaaatgttgatgtgttaattcagcaacttggttatttgggttctagttcacacactaattaagaagaaattgaaatgatgactactttaagcatttgaatcaacttgtttcctattagtaatttggctttgtttcaatcaagtgagtcgtggactaacttattgaatttgggggttaaatccgtttcttatttttggaaataaaattgctttttgttt

SEQ ID NO: 95718 - protein, 406 aa, Arabidopsis thaliana
  peptide (1)..(406): Ceres Seq. ID no. 12730109
MDPSFRFIKEEFPAGFSDSPSPPSSSSYLYSSSMAEAAINDPTTLSYPQPLEGLHESGPPPFLTKTYDLVEDSRTNHVVSWSKSNNSFIVWDPQAFSVTLLPRFFKHNNFSSFVRQLNTYGFRKVNPDRWEFANEGFLRGQKHLLKNIRRRKTSNNSNQMQQPQSSEQQSLDNFCIEVGRYGLDGEMDSLRRDKQVLMMELVRLRQQQQSTKMYLTLIEEKLKKTESKQKQMMSFLARAMQNPDFIQQLVEQKEKRKEIEEAISKKRQRPIDQGKRNVEDYGDESGYGNDVAASSSALIGMSQEYTYGNMSEFEMSELDKLAMHIQGLGDNSSAREEVLNVEKGNDEEEVEDQQQGYHKENNEIYGEGFWEDLLNEGQNFDFEGDQENVDVLIQQLGYLGSSSHTN

SEQ ID NO: 95719 - protein, 373 aa, Arabidopsis thaliana
  peptide (1)..(373): Ceres Seq. ID no. 12730110
MAEAAINDPTTLSYPQPLEGLHESGPPPFLTKTYDLVEDSRTNHVVSWSKSNNSFIVWDPQAFSVTLLPRFFKHNNFSSFVRQLNTYGFRKVNPDRWEFANEGFLRGQKHLLKNIRRRKTSNNSNQMQQPQSSEQQSLDNFCIEVGRYGLDGEMDSLRRDKQVLMMELVRLRQQQQSTKMYLTLIEEKLKKTESKQKQMMSFLARAMQNPDFIQQLVEQKEKRKEIEEAISKKRQRPIDQGKRNVEDYGDESGYGNDVAASSSALIGMSQEYTYGNMSEFEMSELDKLAMHIQGLGDNSSAREEVLNVEKGNDEEEVEDQQQGYHKENNEIYGEGFWEDLLNEGQNFDFEGDQENVDVLIQQLGYLGSSSHTN

SEQ ID NO: 95720 - protein, 247 aa, Arabidopsis thaliana
  peptide (1)..(247): Ceres Seq. ID no. 12730111
MQQPQSSEQQSLDNFCIEVGRYGLDGEMDSLRRDKQVLMMELVRLRQQQQSTKMYLTLIEEKLKKTESKQKQMMSFLARAMQNPDFIQQLVEQKEKRKEIEEAISKKRQRPIDQGKRNVEDYGDESGYGNDVAASSSALIGMSQEYTYGNMSEFEMSELDKLAMHIQGLGDNSSAREEVLNVEKGNDEEEVEDQQQGYHKENNEIYGEGFWEDLLNEGQNFDFEGDQENVDVLIQQLGYLGSSSHTN

SEQ ID NO: 95721 - DNA, 345 bp, Arabidopsis thaliana
  misc_feature (1)..(345): Ceres Seq. ID no. 12730112
  misc_feature (1)..(345): Ortholog of  Ceres SEQ ID NO 14312699 as cited in SEQ ID NO 0
atgtacaaattttgtttccacaatccttattctactcctgaaactgtctccttttatattcatgttggtcatattcctaatgagcatgacttagccaaagatgaacatttggacccggtaaatgttaagatagctgagttgagagaggctttggaatctgttgttgctgagcagaagtatttgaaagctcgtgacactcgtcaccgtcatacgaatgagagcacgagaaagcgagtgatattctacacagtaggagagtacattttccttgccgcagctagtggacttcaagttctctacatccgcaagctcttcagcaagtcggtagcatacaacagagtttga

SEQ ID NO: 95722 - protein, 114 aa, Arabidopsis thaliana; identical to SEQ ID NO: 48173
  peptide (1)..(114): Ceres Seq. ID no. 12730113

SEQ ID NO: 95723 - DNA, 699 bp, Arabidopsis thaliana
  misc_feature (1)..(699): Ceres Seq. ID no. 12730122
  misc_feature (1)..(699): Ortholog of  Ceres SEQ ID NO 13654980 as cited in SEQ ID NO 63094
  misc_feature (1)..(699): Ortholog of  Ceres SEQ ID NO 12635657 as cited in SEQ ID NO 0
  misc_feature (1)..(699): Ortholog of  Ceres SEQ ID NO 12635879 as cited in SEQ ID NO 0
  misc_feature (1)..(699): Ortholog of  Ceres SEQ ID NO 13599649 as cited in SEQ ID NO 0
atggctaaccctaaagttttctttgatttgaccgtggatggcaaacccgctggtcggatcgtgatagagctcttcgctgacttgactccacggacggcggagaacttcaggggtctgtgtaccggcgagagaggcatcggaaagtgtggtaaaccaatccactacaaaggatcaaccttcgaccatattgttcccgatctcatgtggtgtggaggagatatcatcttcgaaaacgaacccatccacagcgaagaattagacgacgagtactttatcttgaaccacgaagacggtccaggtatcatctccatggccgactccaacggatctcagttccaaatccacatgaaggactatggcttgcaagtggacggtgatcacgttgtgatcggcaaagttgttgaaggattggatcttatgaggaacattgagaaggaggtcataactacgacaacaaggacgccttcaaagcctgtggtgatcgcggactgcggtgagctttcagattataggtcagaaagatgttatcttatgaagaacattgagaaggaggtcataattaaaacagcaaaggataacaagcccgtggtgattgcggactgcggtgggctttcagatgatagatctgaaagatattatcttataaatatagttgttgcttgcatggttttgatgtgtttttggtcttggttcgtttaa

SEQ ID NO: 95724 - protein, 232 aa, Arabidopsis thaliana
  peptide (1)..(232): Ceres Seq. ID no. 12730123
MANPKVFFDLTVDGKPAGRIVIELFADLTPRTAENFRGLCTGERGIGKCGKPIHYKGSTFDHIVPDLMWCGGDIIFENEPIHSEELDDEYFILNHEDGPGIISMADSNGSQFQIHMKDYGLQVDGDHVVIGKVVEGLDLMRNIEKEVITTTTRTPSKPVVIADCGELSDYRSERCYLMKNIEKEVIIKTAKDNKPVVIADCGGLSDDRSERYYLINIVVACMVLMCFWSWFV

SEQ ID NO: 95725 - protein, 165 aa, Arabidopsis thaliana
  peptide (1)..(165): Ceres Seq. ID no. 12730124
MWCGGDIIFENEPIHSEELDDEYFILNHEDGPGIISMADSNGSQFQIHMKDYGLQVDGDHVVIGKVVEGLDLMRNIEKEVITTTTRTPSKPVVIADCGELSDYRSERCYLMKNIEKEVIIKTAKDNKPVVIADCGGLSDDRSERYYLINIVVACMVLMCFWSWFV

SEQ ID NO: 95726 - protein, 129 aa, Arabidopsis thaliana
  peptide (1)..(129): Ceres Seq. ID no. 12730125
MADSNGSQFQIHMKDYGLQVDGDHVVIGKVVEGLDLMRNIEKEVITTTTRTPSKPVVIADCGELSDYRSERCYLMKNIEKEVIIKTAKDNKPVVIADCGGLSDDRSERYYLINIVVACMVLMCFWSWFV

SEQ ID NO: 95727 - DNA, 1470 bp, Arabidopsis thaliana
  misc_feature (1)..(1470): Ceres Seq. ID no. 12730134
  misc_feature (1)..(1470): Ortholog of  Ceres SEQ ID NO 13596509 as cited in SEQ ID NO 62004
  misc_feature (1)..(1470): Ortholog of  Ceres SEQ ID NO 13659971 as cited in SEQ ID NO 67565
  misc_feature (1)..(1470): Ortholog of  Ceres SEQ ID NO 13500385 as cited in SEQ ID NO 67583
gtccctgaaacctctcttcagaaaactcaggcaccattttctccttccgccgccgccatggaatcacttccccagccgcaaaaccaatcatctccggcaacaactccggcgaagatcctccttgggaaatacgaactcggtcgtcgtctcggtagcggaagcttcgcgaaagtccatttagctcgatcaatcgaatccgacgagctcgtcgccgttaaaatcatcgagaagaagaaaacaatcgaatccggtatggaaccaagaataatcagagagatcgatgcgatgcgtcgtcttcgtcatcatccaaacatactcaagatccatgaagttatggcaaccaaatctaagatctatctcgtaatggaactcgcttccggtggtgaacttttctcaaaagtcctccgtcgtggacgtcttcctgaatcaacggcgcgtcgttactttcaacaactcgcctccgctcttcgtttctctcaccaagacggtgtcgctcaccgtgatgtgaaacctcagaatctactcttagatgagcaaggtaacctcaaggtctctgactttggtttatcagctttaccggagcatctacaaaacggattgcttcacacggcgtgtggtactccggcttatacagctccggaggttatttcacggaggggatacgacggagcaaaagctgatgcgtggtcttgtggtgtgattttgtttgttttattggttggcgatgttccatttgatgattcgaatatcgctgcgatgtatcggaagattcatcggagagattatcggtttccgagctggatttcgaaacaagctaaatcgataatctatcagatgttagatccgaatccagtaacgaggatgagtattgaaacagtgatgaaaacgaattggttcaagaagtctctagagacttctgagtttcatcgtaacgtctttgattcggaagtagagatgaaatcgagtgttaattcgattactgcttttgatttgatctcgttatcgtcgggattagatctttctggattgtttgaggctaagaagaagaaggagaggagattcacggcgaaggtttcgggtgttgaagtggaggagaaggcgaagatgattggggagaagttaggttatgtagtgaagaagaagatgatgaagaaggaaggagaagtgaaggttgttggattagggagaggaagaactgtgattgtggtggaagcagtggagttaacggtggatgttgtggtggttgaagtgaaagttgttgaaggtgaagaagatgattcacggtggtctgatttgattactgagcttgaagatatagttctttcatggcacaatgacatcatgtaaatagattgtgactttgtggattttagtctcttttttgttttgtttctgttcagttttgtataatccatgaagaaatcaaaatctcccgcttcattgtcttttggtaaatctcgagagatctat

SEQ ID NO: 95728 - protein, 448 aa, Arabidopsis thaliana
  peptide (1)..(448): Ceres Seq. ID no. 12730135
VPETSLQKTQAPFSPSAAAMESLPQPQNQSSPATTPAKILLGKYELGRRLGSGSFAKVHLARSIESDELVAVKIIEKKKTIESGMEPRIIREIDAMRRLRHHPNILKIHEVMATKSKIYLVMELASGGELFSKVLRRGRLPESTARRYFQQLASALRFSHQDGVAHRDVKPQNLLLDEQGNLKVSDFGLSALPEHLQNGLLHTACGTPAYTAPEVISRRGYDGAKADAWSCGVILFVLLVGDVPFDDSNIAAMYRKIHRRDYRFPSWISKQAKSIIYQMLDPNPVTRMSIETVMKTNWFKKSLETSEFHRNVFDSEVEMKSSVNSITAFDLISLSSGLDLSGLFEAKKKKERRFTAKVSGVEVEEKAKMIGEKLGYVVKKKMMKKEGEVKVVGLGRGRTVIVVEAVELTVDVVVVEVKVVEGEEDDSRWSDLITELEDIVLSWHNDIM

SEQ ID NO: 95729 - protein, 429 aa, Arabidopsis thaliana; identical to SEQ ID NO: 76289
  peptide (1)..(429): Ceres Seq. ID no. 12730136

SEQ ID NO: 95730 - protein, 364 aa, Arabidopsis thaliana; identical to SEQ ID NO: 76290
  peptide (1)..(364): Ceres Seq. ID no. 12730137

SEQ ID NO: 95731 - DNA, 1017 bp, Arabidopsis thaliana
  misc_feature (1)..(1017): Ceres Seq. ID no. 12730142
  misc_feature (1)..(1017): Ortholog of  Ceres SEQ ID NO 15176423 as cited in SEQ ID NO 53228
atggatatctgtatggacaaggagccagatggtgtggtggtctatgcgaacggtgattcgtgtaatccaaaccaagaaaatgtttctgagcctctcttagattcagtatcacgcgatgatgctaatgtacatacagagcttcgatatggggaagagaacatcgaagtaaacgaatatgatgttaaagagtgtactagtgagatccccgttggtaagccgataggagatgattttgagtctaaagatgtcactaagtcaagtttacatgcaaagcatgcttcaaaatcaggtagagggaataacaaaacaaggaacaccgttccacaaccgttttctttagcaactgagaaacgtgcttcatctacacgttcgtttactagtgaatctctcgaatcagctggcttgaaaaagtttccggatggacatagtaaagtacaaagtcaggcaacaaaggtacctaggaaaccattgcagccaaaaaacaagaagctttcagatgaggaagattcttgctctgttgcttcatatgccacgtcgggtgcaaagtctgctaaatcaagaactgttgtcaccgcagctccttcgttccgatccactgagcgtgccgagaagaggaaggagttctatacaaaactggaggagaaacaccaagccatggaggccgagaaaacgcaaagtgaagcaaggaacaaggaagcaaccgaagcagctttaagacaattaagaaaaagtttgaggtttaaagcaaacccaatgccaaaattttatcatgaagggcctcccccaaaggttgaacttaagaagcctcttccaactcgagcaaagtcgccaaaactagggcggaggaacccgaaagaaggaaacagagcaaaaggagcttcgaggcggcatgaaactcgaaagactctagtgatctctaaagaagaccatgatgatgaaaccacacggaatgctgaccagataaaccataaagaaatgaaccgaaatttggaaccagagactgcttttgcctgctaa

SEQ ID NO: 95732 - protein, 338 aa, Arabidopsis thaliana
  peptide (1)..(338): Ceres Seq. ID no. 12730143
MDICMDKEPDGVVVYANGDSCNPNQENVSEPLLDSVSRDDANVHTELRYGEENIEVNEYDVKECTSEIPVGKPIGDDFESKDVTKSSLHAKHASKSGRGNNKTRNTVPQPFSLATEKRASSTRSFTSESLESAGLKKFPDGHSKVQSQATKVPRKPLQPKNKKLSDEEDSCSVASYATSGAKSAKSRTVVTAAPSFRSTERAEKRKEFYTKLEEKHQAMEAEKTQSEARNKEATEAALRQLRKSLRFKANPMPKFYHEGPPPKVELKKPLPTRAKSPKLGRRNPKEGNRAKGASRRHETRKTLVISKEDHDDETTRNADQINHKEMNRNLEPETAFAC

SEQ ID NO: 95733 - protein, 334 aa, Arabidopsis thaliana
  peptide (1)..(334): Ceres Seq. ID no. 12730144
MDKEPDGVVVYANGDSCNPNQENVSEPLLDSVSRDDANVHTELRYGEENIEVNEYDVKECTSEIPVGKPIGDDFESKDVTKSSLHAKHASKSGRGNNKTRNTVPQPFSLATEKRASSTRSFTSESLESAGLKKFPDGHSKVQSQATKVPRKPLQPKNKKLSDEEDSCSVASYATSGAKSAKSRTVVTAAPSFRSTERAEKRKEFYTKLEEKHQAMEAEKTQSEARNKEATEAALRQLRKSLRFKANPMPKFYHEGPPPKVELKKPLPTRAKSPKLGRRNPKEGNRAKGASRRHETRKTLVISKEDHDDETTRNADQINHKEMNRNLEPETAFAC

SEQ ID NO: 95734 - DNA, 1569 bp, Arabidopsis thaliana
  misc_feature (1)..(1569): Ceres Seq. ID no. 12730159
  misc_feature (1)..(1569): Ortholog of  Ceres SEQ ID NO 15168429 as cited in SEQ ID NO 57818
  misc_feature (1)..(1569): Ortholog of  Ceres SEQ ID NO 15176685 as cited in SEQ ID NO 58334
atgagaaaccaagtaagttctaatctcaagcacgctcttcttcttgaatcttcttccactaagaaaacccctaaaccagtctctcttcctaaacaaacaattggaatcttatctttcgaagtagctaacgttatgtctaaaaccattcaccttcaccgttctctgtccgatacagagatctctaagcttaaagccgaggtttttcactcggaaggagttagaaagcttgtatcttccgatgagaatcatcttttagatctctctgtctctgagaagcttgatgatttgagccgtgtagctagtgttgtgtctaggttaggtaagaaatgtaacgaacctgctttacaaggatttgagcatgtttatgaagatatagtgaatggtgcgattgattttaggaagttagggttcttggttaaagatatggaatctatggttaagaagatggagagatttgtgaatgctacttgtagtttgtattgtgaaatggaagtgatgaatgagcttgaacaagctatagtgaagcttcagagaagtcagcagcatcaagagagtgttaaagcttttgaacagaagcttatgtggcagagacaggacgtgaagagtcttagagatggttcgttgtggaaccaaacttatgataaggttgttgagatgttggctaggactgtttgtactatttatggtaggattgaaactgtttttggtgggttgggtttgagagggaaaaaggatgtgactttgaagagagatcgtagcaagaatgaagcgagtaaggctgttaactcaaggtctgttgcgggttttaaggattcgaggagaagcgaagcggatgagtttacgcgtgcaggggatttcaatttcccttgtgggactaatcctggtaggatgttcatggaatgtcttgctatgaataggactattggtgatgatgatgatgatgatgatgaagatgggggtcggattacatttcctttgagtacagctaggatgattcggagtaataagtttggttttaagagcaggttaactcaacatgcttcagcttcaactattggaggatctgctttatctttgcactatgcaaatgttgtgattgtggtagaaaagcttcttaagtaccctcatctaataggcgaagaagcaagagatgatctttaccaaatgttaccaacgagtttgaagacaacgcttaaggctagtctaagatcatacttgaagaacatttcgatctacgacgctcctctagctcacgactggaaagaaaccatagacggtatactttcttggcttgctcctttagctcacaacatgatccggtggcagagcgaacgcaacttcgagcagcagaatcagattgtgaagcgaactaacgttcttctacttcagactctttactttgctgatagagagaagacagaagctgcgatttgtaagcttcttgtcgggttaaactacatttgccattacgaacaacaacaaaacgcgttgttggattgcgcgagtagctttgattatgaagattgttttgagtggcagagccaatgccgtgcagcttacttggactaa

SEQ ID NO: 95735 - protein, 522 aa, Arabidopsis thaliana; identical to SEQ ID NO: 78960
  peptide (1)..(522): Ceres Seq. ID no. 12730160

SEQ ID NO: 95736 - protein, 478 aa, Arabidopsis thaliana; identical to SEQ ID NO: 78961
  peptide (1)..(478): Ceres Seq. ID no. 12730161

SEQ ID NO: 95737 - protein, 381 aa, Arabidopsis thaliana
  peptide (1)..(381): Ceres Seq. ID no. 12730162
MESMVKKMERFVNATCSLYCEMEVMNELEQAIVKLQRSQQHQESVKAFEQKLMWQRQDVKSLRDGSLWNQTYDKVVEMLARTVCTIYGRIETVFGGLGLRGKKDVTLKRDRSKNEASKAVNSRSVAGFKDSRRSEADEFTRAGDFNFPCGTNPGRMFMECLAMNRTIGDDDDDDDEDGGRITFPLSTARMIRSNKFGFKSRLTQHASASTIGGSALSLHYANVVIVVEKLLKYPHLIGEEARDDLYQMLPTSLKTTLKASLRSYLKNISIYDAPLAHDWKETIDGILSWLAPLAHNMIRWQSERNFEQQNQIVKRTNVLLLQTLYFADREKTEAAICKLLVGLNYICHYEQQQNALLDCASSFDYEDCFEWQSQCRAAYLD

SEQ ID NO: 95738 - DNA, 2148 bp, Arabidopsis thaliana
  misc_feature (1)..(2148): Ceres Seq. ID no. 12730172
  misc_feature (1)..(2148): Ortholog of  Ceres SEQ ID NO 12586556 as cited in SEQ ID NO 64667
  misc_feature (1)..(2148): Ortholog of  Ceres SEQ ID NO 13660894 as cited in SEQ ID NO 67475
atgagttcatcaaaagccctaatcaaaaccctgattaagaatccaactcgaatcaaatccaaatctcaagcgaagcagcttcacgcacaattcatcagaactcaatcactctctcatacatcagcttcaatcgtaatctcaatctacacaaaccttaaacttttgcacgaagctttgcttcttttcaaaacccttaagtctcctcctgttctagcatggaagtcagtaatcagatgcttcaccgaccagtctctattctccaaggcgttagcttcgtttgtggaaatgcgagcttctgggagatgcccagatcacaatgtgtttccttctgttttgaaatcgtgtacgatgatgatggatttgagatttggtgagtctgttcatgggtttattgttaggcttggtatggattgtgatttgtatactggtaatgcgcttatgaatatgtatgctaagcttcttggtatgggttctaagattagtgtaggtaatgtgttcgatgaaatgcctcaaagaacgtccaattctggagacgaagatgtaaaggctgaaacttgcattatgccttttggaatagacagtgtgaggagggtttttgaagtgatgcctagaaaggatgttgtgtcgtataatactatcattgcagggtatgcacagagtggaatgtatgaagatgctttgagaatggttagggagatgggaactactgacttaaagcctgattcttttactttgtctagtgtgcttccgatattttctgagtatgtggatgttattaaggggaaagagattcatgggtatgtgattaggaaagggattgatagtgatgtatatattgggagtagtttggttgatatgtatgcgaaaagtgctcggattgaagactctgaaagagtgttttctcgcttgtattgtcgggatggtatctcgtggaactcgcttgtagctgggtatgtacagaatggtagatacaatgaggctctgagattgttcaggcaaatggtgaccgcaaaggttaagccaggggctgtggcgttctcaagtgtgattcctgcttgtgctcacctagccaccttgcaccttgggaaacaacttcacggatatgtattaaggggtggctttggcagtaacatattcatagctagtgcacttgttgatatgtactcgaaatgtgggaatattaaggctgctaggaagatttttgacaggatgaatgtactcgatgaagtatcatggacggctattataatggggcatgcgttacatggtcatgggcatgaagcagtttcgttgtttgaggagatgaaacgacaaggagtgaaaccgaatcaagtggcatttgttgctgtactaacggcttgtagtcatgtggggttggtagatgaggcatggggatatttcaacagcatgactaaggtttacggtttaaaccaggagttagaacattatgcagctgtagcggatcttctaggccgtgcagggaagctggaagaagcatacaatttcatttcaaagatgtgtgttgaaccaactggtagtgtctggtctaccttattgtcttcttgcagcgttcacaagaatcttgagttggctgagaaggtagcggagaagatattcactgtcgattctgaaaacatgggagcttatgttttgatgtgcaatatgtatgcgtctaatggaagatggaaagaaatggcgaaactaagattgcgtatgaggaagaaaggattgcggaaaaagccagcttgtagttggatcgaaatgaaaaacaagactcatggatttgtttcaggagatagatcgcatccgagtatggacaagatcaacgagtttcttaaagctgtaatggaacagatggagaaagaagggtatgttgcagacacaagcggcgtgcttcacgatgtagacgaagagcataagagagagcttttgttcggacacagtgagagattggctgttgcctttggtatcatcaacacagaacctggcacgacaattagagtcactaagaatataaggatatgcacggattgtcatgtcgcaatcaagtttatctcgaagatcacggaaagagagattatcgttagggataatagcagattccaccatttcaaccgtggaaactgttcttgtggagattattggtaa

SEQ ID NO: 95739 - protein, 715 aa, Arabidopsis thaliana
  peptide (1)..(715): Ceres Seq. ID no. 12730173
MSSSKALIKTLIKNPTRIKSKSQAKQLHAQFIRTQSLSHTSASIVISIYTNLKLLHEALLLFKTLKSPPVLAWKSVIRCFTDQSLFSKALASFVEMRASGRCPDHNVFPSVLKSCTMMMDLRFGESVHGFIVRLGMDCDLYTGNALMNMYAKLLGMGSKISVGNVFDEMPQRTSNSGDEDVKAETCIMPFGIDSVRRVFEVMPRKDVVSYNTIIAGYAQSGMYEDALRMVREMGTTDLKPDSFTLSSVLPIFSEYVDVIKGKEIHGYVIRKGIDSDVYIGSSLVDMYAKSARIEDSERVFSRLYCRDGISWNSLVAGYVQNGRYNEALRLFRQMVTAKVKPGAVAFSSVIPACAHLATLHLGKQLHGYVLRGGFGSNIFIASALVDMYSKCGNIKAARKIFDRMNVLDEVSWTAIIMGHALHGHGHEAVSLFEEMKRQGVKPNQVAFVAVLTACSHVGLVDEAWGYFNSMTKVYGLNQELEHYAAVADLLGRAGKLEEAYNFISKMCVEPTGSVWSTLLSSCSVHKNLELAEKVAEKIFTVDSENMGAYVLMCNMYASNGRWKEMAKLRLRMRKKGLRKKPACSWIEMKNKTHGFVSGDRSHPSMDKINEFLKAVMEQMEKEGYVADTSGVLHDVDEEHKRELLFGHSERLAVAFGIINTEPGTTIRVTKNIRICTDCHVAIKFISKITEREIIVRDNSRFHHFNRGNCSCGDYW

SEQ ID NO: 95740 - protein, 620 aa, Arabidopsis thaliana
  peptide (1)..(620): Ceres Seq. ID no. 12730174
MRASGRCPDHNVFPSVLKSCTMMMDLRFGESVHGFIVRLGMDCDLYTGNALMNMYAKLLGMGSKISVGNVFDEMPQRTSNSGDEDVKAETCIMPFGIDSVRRVFEVMPRKDVVSYNTIIAGYAQSGMYEDALRMVREMGTTDLKPDSFTLSSVLPIFSEYVDVIKGKEIHGYVIRKGIDSDVYIGSSLVDMYAKSARIEDSERVFSRLYCRDGISWNSLVAGYVQNGRYNEALRLFRQMVTAKVKPGAVAFSSVIPACAHLATLHLGKQLHGYVLRGGFGSNIFIASALVDMYSKCGNIKAARKIFDRMNVLDEVSWTAIIMGHALHGHGHEAVSLFEEMKRQGVKPNQVAFVAVLTACSHVGLVDEAWGYFNSMTKVYGLNQELEHYAAVADLLGRAGKLEEAYNFISKMCVEPTGSVWSTLLSSCSVHKNLELAEKVAEKIFTVDSENMGAYVLMCNMYASNGRWKEMAKLRLRMRKKGLRKKPACSWIEMKNKTHGFVSGDRSHPSMDKINEFLKAVMEQMEKEGYVADTSGVLHDVDEEHKRELLFGHSERLAVAFGIINTEPGTTIRVTKNIRICTDCHVAIKFISKITEREIIVRDNSRFHHFNRGNCSCGDYW

SEQ ID NO: 95741 - protein, 599 aa, Arabidopsis thaliana
  peptide (1)..(599): Ceres Seq. ID no. 12730175
MMMDLRFGESVHGFIVRLGMDCDLYTGNALMNMYAKLLGMGSKISVGNVFDEMPQRTSNSGDEDVKAETCIMPFGIDSVRRVFEVMPRKDVVSYNTIIAGYAQSGMYEDALRMVREMGTTDLKPDSFTLSSVLPIFSEYVDVIKGKEIHGYVIRKGIDSDVYIGSSLVDMYAKSARIEDSERVFSRLYCRDGISWNSLVAGYVQNGRYNEALRLFRQMVTAKVKPGAVAFSSVIPACAHLATLHLGKQLHGYVLRGGFGSNIFIASALVDMYSKCGNIKAARKIFDRMNVLDEVSWTAIIMGHALHGHGHEAVSLFEEMKRQGVKPNQVAFVAVLTACSHVGLVDEAWGYFNSMTKVYGLNQELEHYAAVADLLGRAGKLEEAYNFISKMCVEPTGSVWSTLLSSCSVHKNLELAEKVAEKIFTVDSENMGAYVLMCNMYASNGRWKEMAKLRLRMRKKGLRKKPACSWIEMKNKTHGFVSGDRSHPSMDKINEFLKAVMEQMEKEGYVADTSGVLHDVDEEHKRELLFGHSERLAVAFGIINTEPGTTIRVTKNIRICTDCHVAIKFISKITEREIIVRDNSRFHHFNRGNCSCGDYW

SEQ ID NO: 95742 - DNA, 1740 bp, Arabidopsis thaliana
  misc_feature (1)..(1740): Ceres Seq. ID no. 12730176
  misc_feature (1)..(1740): Ortholog of  Ceres SEQ ID NO 13595900 as cited in SEQ ID NO 69289
aaataaataacatccgtcaaaaccatctgtctctgttttctcattcatctcctctacttgtttagtcggtcatcaaactatctcttcaagtttatcctcagaaatatacaaactcctcagaaaattctttcgtttggtttgcttcgttctacaattttgtattgatgagaatgttatattgagtcattaaccgtttgataaatcgtatttggctctgtaagtagtatttattggtattgaaacgatggatcatgtaatcggtggcaagttcaagttaggtaggaagattggtagtggatcattcggtgaactttatattgggattaatgttcaaactggagaagaagttgctcttaagctggaacctgtgaagacaaagcatcctcagctccattatgaatcaaaagtatacatgcttcttcaaggagggacgggtgttccgcatatcaaatggttcggtgttgagggtaactacaattgtatggctattgaccttcttggtccaagcttggaagacttgttcaactattgcactcggagtttttctttgaaaactgttctaatgcttgctgatcagttaataaacagagttgagtacatgcactctcgaggatttcttcaccgtgatattaaaccggataactttttgatgggtctcggtcgcaaagcaaaccaagtgtacattattgattatgggcttgctaaaaagtatagagatcttcagacacacaagcatataccttacagggaaaataagaatctgactggaactgctaggtatgcaagtgtcaacacacaccttggcattgagcaaagtagacgagatgatctggagtctcttggttatgttctgatgtattttatacgaggaagtttaccatggcaaggtctaaaagctggtactaagaaacagaaatacgagaagataagtgaaaagaagatgcttactcccgtagaggttctttgcaagtcatatccatccgagttcacatcatatttccattactgccgttcattgaggtttgaggataaaccagattattcatatctgaaaagacttttcagggacctttttattcgggaaggttatcagtttgactatgtgtttgattggacaatcttgaaatatcctcagagtggctctatttcaaaaccaaggccaaatcctaaaccagctctagaccctccaggaccatctgcagaacgaaatgaaaagcctatagtggggcaggatctacgagaaagattctcaggtgcagttgaagcattcgctagacgaaatgtaccgagtcatggcattcgcccgaagcacattttttctgatgatgcttccaaagaagtgcaagtgtctgaaaaaacccgaaatgagattgctacaaagatggcagtgatgtctagcagccaacctggctcatcaggtgagctgagtgagaaccgctcaagtaaacttttttcaagcagtgcccaaaagattcaaccggtgcaagaaactaagttatctgcaaggcttgggcgtgatgacggcctgagaagcttcgatatgcttactatcggttccggaaagcggaaatgagtcactcaagaaagcttgcggatcggagtttggaagaatctgaaaatgtgtaaacaatgtaaaactgtctcccactttatgtgtttatagttcttcatagaattttataaagtggtatatgtaacttgtaacacaagtactttgtttatattagttcaaatttggtc

SEQ ID NO: 95743 - protein, 442 aa, Arabidopsis thaliana
  peptide (1)..(442): Ceres Seq. ID no. 12730177
MDHVIGGKFKLGRKIGSGSFGELYIGINVQTGEEVALKLEPVKTKHPQLHYESKVYMLLQGGTGVPHIKWFGVEGNYNCMAIDLLGPSLEDLFNYCTRSFSLKTVLMLADQLINRVEYMHSRGFLHRDIKPDNFLMGLGRKANQVYIIDYGLAKKYRDLQTHKHIPYRENKNLTGTARYASVNTHLGIEQSRRDDLESLGYVLMYFIRGSLPWQGLKAGTKKQKYEKISEKKMLTPVEVLCKSYPSEFTSYFHYCRSLRFEDKPDYSYLKRLFRDLFIREGYQFDYVFDWTILKYPQSGSISKPRPNPKPALDPPGPSAERNEKPIVGQDLRERFSGAVEAFARRNVPSHGIRPKHIFSDDASKEVQVSEKTRNEIATKMAVMSSSQPGSSGELSENRSSKLFSSSAQKIQPVQETKLSARLGRDDGLRSFDMLTIGSGKRK

SEQ ID NO: 95744 - protein, 386 aa, Arabidopsis thaliana
  peptide (1)..(386): Ceres Seq. ID no. 12730178
MLLQGGTGVPHIKWFGVEGNYNCMAIDLLGPSLEDLFNYCTRSFSLKTVLMLADQLINRVEYMHSRGFLHRDIKPDNFLMGLGRKANQVYIIDYGLAKKYRDLQTHKHIPYRENKNLTGTARYASVNTHLGIEQSRRDDLESLGYVLMYFIRGSLPWQGLKAGTKKQKYEKISEKKMLTPVEVLCKSYPSEFTSYFHYCRSLRFEDKPDYSYLKRLFRDLFIREGYQFDYVFDWTILKYPQSGSISKPRPNPKPALDPPGPSAERNEKPIVGQDLRERFSGAVEAFARRNVPSHGIRPKHIFSDDASKEVQVSEKTRNEIATKMAVMSSSQPGSSGELSENRSSKLFSSSAQKIQPVQETKLSARLGRDDGLRSFDMLTIGSGKRK

SEQ ID NO: 95745 - protein, 363 aa, Arabidopsis thaliana
  peptide (1)..(363): Ceres Seq. ID no. 12730179
MAIDLLGPSLEDLFNYCTRSFSLKTVLMLADQLINRVEYMHSRGFLHRDIKPDNFLMGLGRKANQVYIIDYGLAKKYRDLQTHKHIPYRENKNLTGTARYASVNTHLGIEQSRRDDLESLGYVLMYFIRGSLPWQGLKAGTKKQKYEKISEKKMLTPVEVLCKSYPSEFTSYFHYCRSLRFEDKPDYSYLKRLFRDLFIREGYQFDYVFDWTILKYPQSGSISKPRPNPKPALDPPGPSAERNEKPIVGQDLRERFSGAVEAFARRNVPSHGIRPKHIFSDDASKEVQVSEKTRNEIATKMAVMSSSQPGSSGELSENRSSKLFSSSAQKIQPVQETKLSARLGRDDGLRSFDMLTIGSGKRK

SEQ ID NO: 95746 - DNA, 1574 bp, Arabidopsis thaliana
  misc_feature (1)..(1574): Ceres Seq. ID no. 12730201
  misc_feature (1)..(1574): Ortholog of  Ceres SEQ ID NO 15172174 as cited in SEQ ID NO 60481
  misc_feature (1)..(1574): Ortholog of  Ceres SEQ ID NO 13660287 as cited in SEQ ID NO 67316
gtctagcttctcctactcttcgccagatccaaattccttgaagatacaatggctgatcccacgtccaaagatgaccatgatggtgaaggaggaagagacaaatcatcaacttttgttcaaaaacttattgacgttgaagaagcaaagactcaaatcatttactctctaccaatgatattcaccaatcttttctattattgtatccctttaacctctgtgatgttcgcttctcaactcggccaactcgagctcgccggtgctaccctagccaattcttgggctaccgtcaccggttttgccttcatgacagggttaagtggagcacttgagacattgtgtggacaaggctttggtgcaaaaagctatagaatgttggggattcatctacaatcatcttgcattgtttcattagtcttcaccattctcatcaccatcttatggttcttcacggaatcggttttcttacttcttagacaagatcctagcatctcaaaacaagctgcactctacatgaagtacctagctcccggtttactcgcttacgggttcttacaaaacattttgagattttgccaaacacaatgcatcgttactccgctagttttattctcgtttcttcccttggtgattaatatcggtactacatatgctctggtgcatttagctgggcttggattcatcggtgctccaatagctacatctatttcattgtggatagctttcgtttctctcgggttttatgtgatttgttcggacaagtttaaggaaacatggaccggattttcgatggaatcatttcatcatgtagtactaaacttgacattaagcatcccttctgctgctatggtatgtttggaatattgggcgttcgagattctagtgttcttagcaggattgatgcgaaatccggaaatcaccacttctttggtagctatatgcgtcaacacggaatcaataagttacatgttaacatgcggacttagtgcagctacaagtacgcgtgtgtccaacgaacttggagcaggaaatgtaaaaggcgcaaagaaggcgacttcggtctccgttaagttgtctttagttctagctctcggtgtagtcattgctatacttgtaggtcatgatgcctgggttggtttattcagcaatagccatgtgattaaagagggatttgcatcactaaggtttttccttgctgcatctataacacttgattcaatccaaggtgttttatcaggagttgcgagaggatgcggatggcagcggttagccacggttataaatttgggaacattctacttaatcggaatgcctatttcagtcctttgtggtttcaagttgaagcttcatgccaagggtttatggatcggtctgatatgtgggatgttttgccagtccgcatctcttttgcttatgacaattttccggaagtggacaaagctgactgctgccactgtctgaaacctatagttcaattttccgattattataggaagaagattgttgttgtggacgagatcaatgtaaagattgtgtccaagaaaagacattattaagtgaacttttaggaattattg

SEQ ID NO: 95747 - protein, 469 aa, Arabidopsis thaliana
  peptide (1)..(469): Ceres Seq. ID no. 12730202
MADPTSKDDHDGEGGRDKSSTFVQKLIDVEEAKTQIIYSLPMIFTNLFYYCIPLTSVMFASQLGQLELAGATLANSWATVTGFAFMTGLSGALETLCGQGFGAKSYRMLGIHLQSSCIVSLVFTILITILWFFTESVFLLLRQDPSISKQAALYMKYLAPGLLAYGFLQNILRFCQTQCIVTPLVLFSFLPLVINIGTTYALVHLAGLGFIGAPIATSISLWIAFVSLGFYVICSDKFKETWTGFSMESFHHVVLNLTLSIPSAAMVCLEYWAFEILVFLAGLMRNPEITTSLVAICVNTESISYMLTCGLSAATSTRVSNELGAGNVKGAKKATSVSVKLSLVLALGVVIAILVGHDAWVGLFSNSHVIKEGFASLRFFLAASITLDSIQGVLSGVARGCGWQRLATVINLGTFYLIGMPISVLCGFKLKLHAKGLWIGLICGMFCQSASLLLMTIFRKWTKLTAATV

SEQ ID NO: 95748 - protein, 428 aa, Arabidopsis thaliana
  peptide (1)..(428): Ceres Seq. ID no. 12730203
MIFTNLFYYCIPLTSVMFASQLGQLELAGATLANSWATVTGFAFMTGLSGALETLCGQGFGAKSYRMLGIHLQSSCIVSLVFTILITILWFFTESVFLLLRQDPSISKQAALYMKYLAPGLLAYGFLQNILRFCQTQCIVTPLVLFSFLPLVINIGTTYALVHLAGLGFIGAPIATSISLWIAFVSLGFYVICSDKFKETWTGFSMESFHHVVLNLTLSIPSAAMVCLEYWAFEILVFLAGLMRNPEITTSLVAICVNTESISYMLTCGLSAATSTRVSNELGAGNVKGAKKATSVSVKLSLVLALGVVIAILVGHDAWVGLFSNSHVIKEGFASLRFFLAASITLDSIQGVLSGVARGCGWQRLATVINLGTFYLIGMPISVLCGFKLKLHAKGLWIGLICGMFCQSASLLLMTIFRKWTKLTAATV

SEQ ID NO: 95749 - protein, 412 aa, Arabidopsis thaliana
  peptide (1)..(412): Ceres Seq. ID no. 12730204
MFASQLGQLELAGATLANSWATVTGFAFMTGLSGALETLCGQGFGAKSYRMLGIHLQSSCIVSLVFTILITILWFFTESVFLLLRQDPSISKQAALYMKYLAPGLLAYGFLQNILRFCQTQCIVTPLVLFSFLPLVINIGTTYALVHLAGLGFIGAPIATSISLWIAFVSLGFYVICSDKFKETWTGFSMESFHHVVLNLTLSIPSAAMVCLEYWAFEILVFLAGLMRNPEITTSLVAICVNTESISYMLTCGLSAATSTRVSNELGAGNVKGAKKATSVSVKLSLVLALGVVIAILVGHDAWVGLFSNSHVIKEGFASLRFFLAASITLDSIQGVLSGVARGCGWQRLATVINLGTFYLIGMPISVLCGFKLKLHAKGLWIGLICGMFCQSASLLLMTIFRKWTKLTAATV

SEQ ID NO: 95750 - DNA, 950 bp, Arabidopsis thaliana
  misc_feature (1)..(950): Ceres Seq. ID no. 12730229
  misc_feature (1)..(950): Ortholog of  Ceres SEQ ID NO 13596509 as cited in SEQ ID NO 62004
atgaccagagaattcgaactggaaaacaactaccagctttgcgacgagatcggcagaggtagattcggaacaatcactcgctgtttctcacccgcgactaaagaattctacgcctgcaaaaccattgacaagcgcgtgctcatcgacgcattagatcgcgagtgtatagagacggagccgaggatcatggcgatgttaccgccgcatccgaatatcatcaggatcttcgatctctacgaaacagaggattctcttgcgatcgtcatggaattagtcgatccgccgatgacgatttacgatcggttaatctccgccggggggaggttatcagaatcagaatccgcctcatacgcgaaacagatcctcagtgcgcttgctcattgtcaccggtgcgacgtcgttcatcgggatgtgaaacctgacaacgtcttagtcgatctcgtaagcggcggtgttaagctctgtgatttcggatcagcggtgtggttaggcggagaaacggcggagggagttgtgggaacaccgtattacgtggcgccggaggtagtgatggggaggaagtacgacgagaaggttgatatatggagcgctggtgtagtgatatacacgatgctagctggagaaccgccgtttaacggtgagacggcggaagatatatttgaatcgatattgagagggaatttgaggtttccgccgaagaagtttgggtctgtatcatcggaagcgaaggatttgttgaggaaaatgatatgtcgtgatgtttctcggcgattttctgcagaggatgctcttcgacattcatggatgatgaacgttggaaacctccaaagcaattagtcgaagcttttcagatatgtgattagagagtgtaattagagaagtcgtaatatagatgtgagtgtgtaattgtttgattcgaatagtcaaacgtagttgtgtgtttcagcaat

SEQ ID NO: 95751 - protein, 278 aa, Arabidopsis thaliana
  peptide (1)..(278): Ceres Seq. ID no. 12730230
MTREFELENNYQLCDEIGRGRFGTITRCFSPATKEFYACKTIDKRVLIDALDRECIETEPRIMAMLPPHPNIIRIFDLYETEDSLAIVMELVDPPMTIYDRLISAGGRLSESESASYAKQILSALAHCHRCDVVHRDVKPDNVLVDLVSGGVKLCDFGSAVWLGGETAEGVVGTPYYVAPEVVMGRKYDEKVDIWSAGVVIYTMLAGEPPFNGETAEDIFESILRGNLRFPPKKFGSVSSEAKDLLRKMICRDVSRRFSAEDALRHSWMMNVGNLQSN

SEQ ID NO: 95752 - protein, 216 aa, Arabidopsis thaliana
  peptide (1)..(216): Ceres Seq. ID no. 12730231
MAMLPPHPNIIRIFDLYETEDSLAIVMELVDPPMTIYDRLISAGGRLSESESASYAKQILSALAHCHRCDVVHRDVKPDNVLVDLVSGGVKLCDFGSAVWLGGETAEGVVGTPYYVAPEVVMGRKYDEKVDIWSAGVVIYTMLAGEPPFNGETAEDIFESILRGNLRFPPKKFGSVSSEAKDLLRKMICRDVSRRFSAEDALRHSWMMNVGNLQSN

SEQ ID NO: 95753 - protein, 214 aa, Arabidopsis thaliana
  peptide (1)..(214): Ceres Seq. ID no. 12730232
MLPPHPNIIRIFDLYETEDSLAIVMELVDPPMTIYDRLISAGGRLSESESASYAKQILSALAHCHRCDVVHRDVKPDNVLVDLVSGGVKLCDFGSAVWLGGETAEGVVGTPYYVAPEVVMGRKYDEKVDIWSAGVVIYTMLAGEPPFNGETAEDIFESILRGNLRFPPKKFGSVSSEAKDLLRKMICRDVSRRFSAEDALRHSWMMNVGNLQSN

SEQ ID NO: 95754 - DNA, 2553 bp, Arabidopsis thaliana
  misc_feature (1)..(2553): Ceres Seq. ID no. 12730245
  misc_feature (1)..(2553): Ortholog of  Ceres SEQ ID NO 14310362 as cited in SEQ ID NO 54251
  misc_feature (1)..(2553): Ortholog of  Ceres SEQ ID NO 12583314 as cited in SEQ ID NO 56435
  misc_feature (1)..(2553): Ortholog of  Ceres SEQ ID NO 13654989 as cited in SEQ ID NO 63117
  misc_feature (1)..(2553): Ortholog of  Ceres SEQ ID NO 13584744 as cited in SEQ ID NO 69137
atgagcgggaaaactcggattctctttttcctcacatgtctctcctttctattggtttttccaactagatctaacggacaagatttagctctgagctgcgggacatcagaagcttctgctgaccaagataagaaaaaatgggaaccagatacaaagtttttaaagactggaaactcaattcacgcaacggctacatatcaagacccttcacttctctcaacagttccttatatgacagccagaatctttacagctccagcaacttatgaaatcccgattaaaggagataaaagacatttgcttcggttatatttctacccatcaacatacaccggtctcaacatttccaactcgtatttcactgtggaagctaacgatgttaccttactgagcaatttcagcgccgcgattacgtgtcaagctttgactcaagcttatctggttaaagaatactctcttgcacccactgacaaagatgttttgagcatcaagtttaccccttcagataaataccgagacgcatttgcctttataaacggtatcgaggtgattcagatgccggaattgtttgacacggcggctcttgttggtttcacagaccaaacaatggatgccaagactgcgaatcttcagtcaatgtttagacttaatgttggtggtcaggacatccctggaagccaagactccggtgggttgacaagaacttggtataatgatgcaccttacatctttagtgcgggtcttggtgttacacttcaagcaagcaacaattttaggatcaactaccagaacatgccggtgtctatagctccagccgatatatacaaaaccgcaagatctcaaggcccaaacggagatatcaacctcaaatccaatcttacatggatgttccaaatcgataagaacttcacctacattttgagactccatttctgcgaattccagctttccaagatcaaccagaaggttttcaacatttacatcaataacagaacagcgcaggcagatactactcctgcagatataatagggtggacaggagagaaaggaatcccgatgtacaaagactacgcgatatatgttgatgccaacaacggaggcgaagagattacacttcagatgactccatcaacttttggtcaaccggaatattatgattcatctcttaacgggttagagattttcaagatggacaccatgaaaaatcttgcgggtccaaaccccgagccatcgcctatgcaagctgaggaagaggttaaaaaagaattcaagaacgaaaagagacacgctttcatcattggttcggccggaggagttttagcggttttaatcggtgccttgtgtttcacggcctacaagaagaaacaaggatatcaaggaggcgactctcacacatcaagttggcttcctatatatggaaactctaccacatcaggaaccaaatcaaccatctcagggaagagcaacaatggaagtcacctatccaatctcgcagcaggtttatgccgtagattctctttaccagaaatcaaacacggaacacaaaacttcgatgattccaacgtcattggagttggagggtttggtaaagtctacaaaggagttatagacggcacaactaaagtagcggtaaaaaaatcaaacccaaattcagaacaaggactcaacgaattcgagacagaaatcgaactcctctcaagactaagacacaaacacttagtctccttgataggatactgcgacgagggaggagaaatgtgtctcgtatacgattacatggcatttggaacactccgtgagcatctatacaacacaaagaaaccacaattaacttggaaacgaaggctagagatagctattggagcagcaagaggattacattaccttcacacaggagcaaagtacacgattatacacagagacgttaaaacaactaacatcctcgtagatgagaactgggtagccaaagtttcagactttgggttatccaaaactggacctaacatgaatggaggccatgtaacaaccgtcgtcaaaggaagcttcggttatttagatcctgaatacttcagaagacaacaactgactgagaaatcagacgtttactcattcggagttgttctgttcgaaatcttatgcgcaagaccagcgttaaacccgagtttgcctaaggaacaagtgagtctcggagactgggcaatgaattgcaaacgaaaagggaatttagaggatataatcgatccgaatctgaaagggaagatcaatgcagagtgtttgaagaaatttgcagacacggcggagaagtgtcttaacgatagtggattagaacggccgacaatgggagatgttttgtggaatctcgaattcgcacttcagcttcaagagactgctgacgggactcgtcatcggactccgaataatggaggaagctctgaggatctcggtagaggaggcatggcggttaacgtcgccggtagagatgatgtgagtgatctctcctcagaggacaataccgaaatattctctcagattgtaaatcccaaaggacgataa

SEQ ID NO: 95755 - protein, 850 aa, Arabidopsis thaliana
  peptide (1)..(850): Ceres Seq. ID no. 12730246
MSGKTRILFFLTCLSFLLVFPTRSNGQDLALSCGTSEASADQDKKKWEPDTKFLKTGNSIHATATYQDPSLLSTVPYMTARIFTAPATYEIPIKGDKRHLLRLYFYPSTYTGLNISNSYFTVEANDVTLLSNFSAAITCQALTQAYLVKEYSLAPTDKDVLSIKFTPSDKYRDAFAFINGIEVIQMPELFDTAALVGFTDQTMDAKTANLQSMFRLNVGGQDIPGSQDSGGLTRTWYNDAPYIFSAGLGVTLQASNNFRINYQNMPVSIAPADIYKTARSQGPNGDINLKSNLTWMFQIDKNFTYILRLHFCEFQLSKINQKVFNIYINNRTAQADTTPADIIGWTGEKGIPMYKDYAIYVDANNGGEEITLQMTPSTFGQPEYYDSSLNGLEIFKMDTMKNLAGPNPEPSPMQAEEEVKKEFKNEKRHAFIIGSAGGVLAVLIGALCFTAYKKKQGYQGGDSHTSSWLPIYGNSTTSGTKSTISGKSNNGSHLSNLAAGLCRRFSLPEIKHGTQNFDDSNVIGVGGFGKVYKGVIDGTTKVAVKKSNPNSEQGLNEFETEIELLSRLRHKHLVSLIGYCDEGGEMCLVYDYMAFGTLREHLYNTKKPQLTWKRRLEIAIGAARGLHYLHTGAKYTIIHRDVKTTNILVDENWVAKVSDFGLSKTGPNMNGGHVTTVVKGSFGYLDPEYFRRQQLTEKSDVYSFGVVLFEILCARPALNPSLPKEQVSLGDWAMNCKRKGNLEDIIDPNLKGKINAECLKKFADTAEKCLNDSGLERPTMGDVLWNLEFALQLQETADGTRHRTPNNGGSSEDLGRGGMAVNVAGRDDVSDLSSEDNTEIFSQIVNPKGR

SEQ ID NO: 95756 - protein, 773 aa, Arabidopsis thaliana
  peptide (1)..(773): Ceres Seq. ID no. 12730247
MTARIFTAPATYEIPIKGDKRHLLRLYFYPSTYTGLNISNSYFTVEANDVTLLSNFSAAITCQALTQAYLVKEYSLAPTDKDVLSIKFTPSDKYRDAFAFINGIEVIQMPELFDTAALVGFTDQTMDAKTANLQSMFRLNVGGQDIPGSQDSGGLTRTWYNDAPYIFSAGLGVTLQASNNFRINYQNMPVSIAPADIYKTARSQGPNGDINLKSNLTWMFQIDKNFTYILRLHFCEFQLSKINQKVFNIYINNRTAQADTTPADIIGWTGEKGIPMYKDYAIYVDANNGGEEITLQMTPSTFGQPEYYDSSLNGLEIFKMDTMKNLAGPNPEPSPMQAEEEVKKEFKNEKRHAFIIGSAGGVLAVLIGALCFTAYKKKQGYQGGDSHTSSWLPIYGNSTTSGTKSTISGKSNNGSHLSNLAAGLCRRFSLPEIKHGTQNFDDSNVIGVGGFGKVYKGVIDGTTKVAVKKSNPNSEQGLNEFETEIELLSRLRHKHLVSLIGYCDEGGEMCLVYDYMAFGTLREHLYNTKKPQLTWKRRLEIAIGAARGLHYLHTGAKYTIIHRDVKTTNILVDENWVAKVSDFGLSKTGPNMNGGHVTTVVKGSFGYLDPEYFRRQQLTEKSDVYSFGVVLFEILCARPALNPSLPKEQVSLGDWAMNCKRKGNLEDIIDPNLKGKINAECLKKFADTAEKCLNDSGLERPTMGDVLWNLEFALQLQETADGTRHRTPNNGGSSEDLGRGGMAVNVAGRDDVSDLSSEDNTEIFSQIVNPKGR

SEQ ID NO: 95757 - protein, 665 aa, Arabidopsis thaliana
  peptide (1)..(665): Ceres Seq. ID no. 12730248
MPELFDTAALVGFTDQTMDAKTANLQSMFRLNVGGQDIPGSQDSGGLTRTWYNDAPYIFSAGLGVTLQASNNFRINYQNMPVSIAPADIYKTARSQGPNGDINLKSNLTWMFQIDKNFTYILRLHFCEFQLSKINQKVFNIYINNRTAQADTTPADIIGWTGEKGIPMYKDYAIYVDANNGGEEITLQMTPSTFGQPEYYDSSLNGLEIFKMDTMKNLAGPNPEPSPMQAEEEVKKEFKNEKRHAFIIGSAGGVLAVLIGALCFTAYKKKQGYQGGDSHTSSWLPIYGNSTTSGTKSTISGKSNNGSHLSNLAAGLCRRFSLPEIKHGTQNFDDSNVIGVGGFGKVYKGVIDGTTKVAVKKSNPNSEQGLNEFETEIELLSRLRHKHLVSLIGYCDEGGEMCLVYDYMAFGTLREHLYNTKKPQLTWKRRLEIAIGAARGLHYLHTGAKYTIIHRDVKTTNILVDENWVAKVSDFGLSKTGPNMNGGHVTTVVKGSFGYLDPEYFRRQQLTEKSDVYSFGVVLFEILCARPALNPSLPKEQVSLGDWAMNCKRKGNLEDIIDPNLKGKINAECLKKFADTAEKCLNDSGLERPTMGDVLWNLEFALQLQETADGTRHRTPNNGGSSEDLGRGGMAVNVAGRDDVSDLSSEDNTEIFSQIVNPKGR

SEQ ID NO: 95758 - DNA, 2303 bp, Arabidopsis thaliana
  misc_feature (1)..(2303): Ceres Seq. ID no. 12730257
  misc_feature (1)..(2303): Ortholog of  Ceres SEQ ID NO 13657677 as cited in SEQ ID NO 66119
gagattacaataaaacgagtggtgttgctctgttctgttcttcccacttctactccaaaaaatcctaacttttcgcattatcttcggttttgcgtttcgattttttgtctgaaaatcccaattcgacactctgtttctgcccacaaaactatcttccatgaaaaatcgaaactttgtctacaaataatgactccgttatcctctgaactcgttggtttcactatccctttctactccaaaactcagaaaccctattcaaattcttctcacggactcctactatctcacaatcgaagctccctcttaaccttctcaaactctaaccctaacaacgacaatggtagatccttttcatcttcaggagcaagaaaccttcaaaccactaccacaacagacgcaacactccccacagaacgaagacaacaacattcacaatctctcggatttagagatacacagatgctcaaaatcttccatcgatcatgccgttcagggaattacatcgaatctctacacttactcgagaccatggtacgcaaaggttacaatcctgatgtgatactctgcactaagctcattaaagggttcttcactctaagaaacatccctaaagctgttagggttatggagattctcgagaaattcggacagcctgatgtgtttgcttacaacgctctgattaatgggttttgtaagatgaatcgaatcgatgatgctacgagagttcttgataggatgagaagtaaagatttttcaccagataccgtgacttacaacataatgattggtagtttgtgtagtagaggtaaacttgatcttgctttgaaggttttaaatcagttgttaagtgataattgccaacctactgtcattacttacacgattttgatcgaagctacgatgctcgaaggcggagttgatgaagcgttgaagcttatggatgagatgttgtctagagggttaaaacctgatatgtttacttataacacaatcattagaggaatgtgtaaagaagggatggtggaccgcgcgtttgagatggttcggaatttggaattgaaaggttgtgagcctgatgtgatctcttataacatcttgcttcgtgctcttttgaatcaagggaaatgggaagaaggtgagaagctaatgactaagatgttttcagagaagtgtgatcctaatgttgtgacttatagcattttgattactactctatgtcgcgatggaaagatcgaagaagcgatgaatcttcttaagcttatgaaggaaaaagggttaactcctgatgcttatagctatgatcctttgatagctgcgttttgtagagaaggtaggttagatgttgctattgagttcttggaaactatgatctctgacggatgtttaccggacatagttaactacaacacggttttagctacgttgtgtaagaacgggaaagcagaccaagcgttggagatttttgggaaactaggagaagttggctgctcaccgaactctagttcttacaacacgatgtttagcgcgttatggagcagtggagataaaatcagagcgttacatatgatattagagatgatgagtaacgggatagatcctgatgagatcacatataactcgatgatatcgtgtctgtgcagagaaggaatggtagatgaagcttttgagttattggttgatatgaggagctgtgagtttcatccatcggttgttacatacaacattgttcttttgggattctgcaaagctcataggatcgaggacgcgatcaatgttttggaatcaatggtgggaaatggatgtaggcctaatgaaactacttatactgtgctcattgaagggattgggtttgctggatatagagcagaagcaatggagttagcaaatgatttggttcgcatcgatgccatttcggagtactcgttcaagaggttgcataggactttccctttacttaatgttttacagagatcttctcagacatttggttattaagtgaaagtcgagaacctagataactgatccaggttttcaagaaagggtgttcttaaaatacgatcacgtagttctcaaggtaccaatggaaagtgtaaggaaacctcacctgtgcaacaccaagatattgacagtccatagctgcaactgctacctgctgctcatacttggtcccggaagacgttttgccctctagttttatataccaaacataatgtgcaagcagctctttcattgtgtttctacgattcgtgtaaagttaaacacctattatctaagataattagaacaaatcgaaccaaattggc

SEQ ID NO: 95759 - protein, 664 aa, Arabidopsis thaliana
  peptide (1)..(664): Ceres Seq. ID no. 12730258
EITIKRVVLLCSVLPTSTPKNPNFSHYLRFCVSIFCLKIPIRHSVSAHKTIFHEKSKLCLQIMTPLSSELVGFTIPFYSKTQKPYSNSSHGLLLSHNRSSLLTFSNSNPNNDNGRSFSSSGARNLQTTTTTDATLPTERRQQHSQSLGFRDTQMLKIFHRSCRSGNYIESLHLLETMVRKGYNPDVILCTKLIKGFFTLRNIPKAVRVMEILEKFGQPDVFAYNALINGFCKMNRIDDATRVLDRMRSKDFSPDTVTYNIMIGSLCSRGKLDLALKVLNQLLSDNCQPTVITYTILIEATMLEGGVDEALKLMDEMLSRGLKPDMFTYNTIIRGMCKEGMVDRAFEMVRNLELKGCEPDVISYNILLRALLNQGKWEEGEKLMTKMFSEKCDPNVVTYSILITTLCRDGKIEEAMNLLKLMKEKGLTPDAYSYDPLIAAFCREGRLDVAIEFLETMISDGCLPDIVNYNTVLATLCKNGKADQALEIFGKLGEVGCSPNSSSYNTMFSALWSSGDKIRALHMILEMMSNGIDPDEITYNSMISCLCREGMVDEAFELLVDMRSCEFHPSVVTYNIVLLGFCKAHRIEDAINVLESMVGNGCRPNETTYTVLIEGIGFAGYRAEAMELANDLVRIDAISEYSFKRLHRTFPLLNVLQRSSQTFGY

SEQ ID NO: 95760 - protein, 602 aa, Arabidopsis thaliana
  peptide (1)..(602): Ceres Seq. ID no. 12730259
MTPLSSELVGFTIPFYSKTQKPYSNSSHGLLLSHNRSSLLTFSNSNPNNDNGRSFSSSGARNLQTTTTTDATLPTERRQQHSQSLGFRDTQMLKIFHRSCRSGNYIESLHLLETMVRKGYNPDVILCTKLIKGFFTLRNIPKAVRVMEILEKFGQPDVFAYNALINGFCKMNRIDDATRVLDRMRSKDFSPDTVTYNIMIGSLCSRGKLDLALKVLNQLLSDNCQPTVITYTILIEATMLEGGVDEALKLMDEMLSRGLKPDMFTYNTIIRGMCKEGMVDRAFEMVRNLELKGCEPDVISYNILLRALLNQGKWEEGEKLMTKMFSEKCDPNVVTYSILITTLCRDGKIEEAMNLLKLMKEKGLTPDAYSYDPLIAAFCREGRLDVAIEFLETMISDGCLPDIVNYNTVLATLCKNGKADQALEIFGKLGEVGCSPNSSSYNTMFSALWSSGDKIRALHMILEMMSNGIDPDEITYNSMISCLCREGMVDEAFELLVDMRSCEFHPSVVTYNIVLLGFCKAHRIEDAINVLESMVGNGCRPNETTYTVLIEGIGFAGYRAEAMELANDLVRIDAISEYSFKRLHRTFPLLNVLQRSSQTFGY

SEQ ID NO: 95761 - protein, 511 aa, Arabidopsis thaliana
  peptide (1)..(511): Ceres Seq. ID no. 12730260
MLKIFHRSCRSGNYIESLHLLETMVRKGYNPDVILCTKLIKGFFTLRNIPKAVRVMEILEKFGQPDVFAYNALINGFCKMNRIDDATRVLDRMRSKDFSPDTVTYNIMIGSLCSRGKLDLALKVLNQLLSDNCQPTVITYTILIEATMLEGGVDEALKLMDEMLSRGLKPDMFTYNTIIRGMCKEGMVDRAFEMVRNLELKGCEPDVISYNILLRALLNQGKWEEGEKLMTKMFSEKCDPNVVTYSILITTLCRDGKIEEAMNLLKLMKEKGLTPDAYSYDPLIAAFCREGRLDVAIEFLETMISDGCLPDIVNYNTVLATLCKNGKADQALEIFGKLGEVGCSPNSSSYNTMFSALWSSGDKIRALHMILEMMSNGIDPDEITYNSMISCLCREGMVDEAFELLVDMRSCEFHPSVVTYNIVLLGFCKAHRIEDAINVLESMVGNGCRPNETTYTVLIEGIGFAGYRAEAMELANDLVRIDAISEYSFKRLHRTFPLLNVLQRSSQTFGY

SEQ ID NO: 95762 - DNA, 567 bp, Arabidopsis thaliana
  misc_feature (1)..(567): Ceres Seq. ID no. 12730261
  misc_feature (1)..(567): Ortholog of  Ceres SEQ ID NO 13582073 as cited in SEQ ID NO 56218
atggcggatccgatgaaccatagcaccgggcatcaacaacagcagaagtaccgtcagtacaatccttaccaacaagtcaatcttccgtaccgtaagctctacgaactcccaacttctcctgagtttctcttcgaagaagaagctacgaaaaaacgcttaacatggggagagaacctcaccttcttcaccggttggggttattgcactggatctgttctcggagccttcaagggtacaattgcggggatgcgagccgccgaacgaggcgaatccctaaagatccgaactaatcggattttgaactccggtggactcgttgcaagacgcggcgggaattgcttaggatccgtagggttgatgtttgctgctatggagagcggtgttacgtatatgagagacggagacgacggttcgttgacaactgtgatcgctggtttagccactggtgtgctttacagagctgcttctggacctagatccgctgtggttgccggagctgtcggaggagttgcggctttggctgcagttgctggaagacgcatcgtcaagcgattcgttccaatctaa

SEQ ID NO: 95763 - protein, 188 aa, Arabidopsis thaliana
  peptide (1)..(188): Ceres Seq. ID no. 12730262
MADPMNHSTGHQQQQKYRQYNPYQQVNLPYRKLYELPTSPEFLFEEEATKKRLTWGENLTFFTGWGYCTGSVLGAFKGTIAGMRAAERGESLKIRTNRILNSGGLVARRGGNCLGSVGLMFAAMESGVTYMRDGDDGSLTTVIAGLATGVLYRAASGPRSAVVAGAVGGVAALAAVAGRRIVKRFVPI

SEQ ID NO: 95764 - protein, 184 aa, Arabidopsis thaliana
  peptide (1)..(184): Ceres Seq. ID no. 12730263
MNHSTGHQQQQKYRQYNPYQQVNLPYRKLYELPTSPEFLFEEEATKKRLTWGENLTFFTGWGYCTGSVLGAFKGTIAGMRAAERGESLKIRTNRILNSGGLVARRGGNCLGSVGLMFAAMESGVTYMRDGDDGSLTTVIAGLATGVLYRAASGPRSAVVAGAVGGVAALAAVAGRRIVKRFVPI

SEQ ID NO: 95765 - protein, 106 aa, Arabidopsis thaliana
  peptide (1)..(106): Ceres Seq. ID no. 12730264
MRAAERGESLKIRTNRILNSGGLVARRGGNCLGSVGLMFAAMESGVTYMRDGDDGSLTTVIAGLATGVLYRAASGPRSAVVAGAVGGVAALAAVAGRRIVKRFVPI

SEQ ID NO: 95766 - DNA, 2418 bp, Arabidopsis thaliana
  misc_feature (1)..(2418): Ceres Seq. ID no. 12730300
  misc_feature (1)..(2418): Ortholog of  Ceres SEQ ID NO 13532807 as cited in SEQ ID NO 53012
  misc_feature (1)..(2418): Ortholog of  Ceres SEQ ID NO 13663060 as cited in SEQ ID NO 60964
  misc_feature (1)..(2418): Ortholog of  Ceres SEQ ID NO 13598532 as cited in SEQ ID NO 65204
  misc_feature (1)..(2418): Ortholog of  Ceres SEQ ID NO 13656849 as cited in SEQ ID NO 65764
  misc_feature (1)..(2418): Ortholog of  Ceres SEQ ID NO 13656501 as cited in SEQ ID NO 69206
acgactctgttgtatatgtgtatgtatcaccttgccttttctccaaagccctaattgatttttctttcttctttttttgtgtatgctttaaaggtttcatttttaaaatcttcttggactccatttcttttccttttcctttatctttttgcctctctttgtggagtttttgaaatcatccctcatttcattcctattttcgttgtctctttgagtttgagtcagctttgtgttgtgtctaaattctaaacaagtttcagatctttaccttcctttgacttgtctcctgtcttaaaactagggtttaattttctttctctgttcaagtctcagatttgaccagcttggtccagaatttcgcttctcctcgatcataaatcaaagttgattcaaagaggtttgattgagtcagagatctctcttttagaaacatgttgagcaaatgaaggtttgtttgatgagatgggttgtgtattgggtcgacccggatcatcaggatcagtttctgggtctagagacgaagttagtactaggattgagtctaatcgacatcaagttaacaatgtgtctgtgaccaaaaccgaaacaacagagagcactagtgctgttgttgttgcttctgcttctaatggtgaggaagttaggaatcatgaagatgttgtggatcagaagaaagagaatggctttgttgtgactgaggccaaggagaggaaatcgaaaggcgaaagaaaaaggtctaagcctcctgacccgagacggagcaacccgccaaagaatttgctcggtgagcaagttgctgctggatggccctcgtggttgtctgaagtttgtggggaagcgttaagcggatggcttccaagaaaagcggattcctttgagaagattgataagattggatcaggaacgtatagtaatgtgtacaaggcgaaagattcgctgacaggaaacattgtggctttaaagaaagtgcggtgtgatgttaatgaacgggagagtttaaaatttatggctagagagattctgattttgaggagattggatcatcctaatgtcattaaattggaaggtttggttacttcgaggatgtcgagtagtttatacttggttttccgttatatggatcatgatttagctggtctcgccgctagcccggagataaaattcactgagcaacaggttaaatgctatatgaagcaactactttcagggctcgagcattgccataaccgaggagttctacaccgtgatattaaaggatcaaaccttcttatagatgacggtggagttcttagaataggtgatttcgggcttgcaacgttttttgatgcgagtaagaggcaagagatgacgaatcgggttgttactttatggtacagatcaccagagcttcttcatggtgttgttgagtacagtgtcggagttgatttgtggagtgctggttgcattttagctgagttattagctggtagagcgataatgccaggtcgtaacgaggtcgagcagttgcataggatatataagttatgtggatcgccttcagaagaatattggaagaagattagacttccttctactcataagcatgctcatcacaagcctttaccacagtataagagaagaataagagaggtttacaaagatttctctcctgaggcgctttctctactcgatacgcttctagcgctcgatccagctgaacgccagacagctacagatgtgttgatgagtgatttcttcacgacggagccattggcatgtcaaccttctgatctcccgaaatatcctccaagtaaagagattgatgccaagagacgagacgaagagtatcggagacaaagagaagcgcgcaaggcccaaggagagagcggaagaagaatgagaccccgagaacgagccccaagagcaatgccggctcctgaagccaacgccgagaaccagtctaacattgataggatgcgtatgatcacacacgcgaatgcaaagagcaagagcgagaagtttcctccaccgcatcaagacgggtcactcggttttcaggtgggatcttcaaggcgactggatccatcagagataccgtatagcacaaactcattcacatcatcatactccaaagagccatttcaaacttggtcaggccctttggctcccattggagcacctgactcaaccacaaggagaagaaacgatattaacaaagagagaagaatggcttctaaggtcaaaggcaaaagaatcgttgtttgagataataattattattcatctccaaatttcaaaagtttcctttttgatagattgagaaaaaaacaaaattccaaattttatctttttggtgggttatatgttctttatttggttgttatgtgtattgtacaagagaattgacaaaacacagaaatgagaggaattaatttacat

SEQ ID NO: 95767 - protein, 593 aa, Arabidopsis thaliana
  peptide (1)..(593): Ceres Seq. ID no. 12730301
MGCVLGRPGSSGSVSGSRDEVSTRIESNRHQVNNVSVTKTETTESTSAVVVASASNGEEVRNHEDVVDQKKENGFVVTEAKERKSKGERKRSKPPDPRRSNPPKNLLGEQVAAGWPSWLSEVCGEALSGWLPRKADSFEKIDKIGSGTYSNVYKAKDSLTGNIVALKKVRCDVNERESLKFMAREILILRRLDHPNVIKLEGLVTSRMSSSLYLVFRYMDHDLAGLAASPEIKFTEQQVKCYMKQLLSGLEHCHNRGVLHRDIKGSNLLIDDGGVLRIGDFGLATFFDASKRQEMTNRVVTLWYRSPELLHGVVEYSVGVDLWSAGCILAELLAGRAIMPGRNEVEQLHRIYKLCGSPSEEYWKKIRLPSTHKHAHHKPLPQYKRRIREVYKDFSPEALSLLDTLLALDPAERQTATDVLMSDFFTTEPLACQPSDLPKYPPSKEIDAKRRDEEYRRQREARKAQGESGRRMRPRERAPRAMPAPEANAENQSNIDRMRMITHANAKSKSEKFPPPHQDGSLGFQVGSSRRLDPSEIPYSTNSFTSSYSKEPFQTWSGPLAPIGAPDSTTRRRNDINKERRMASKVKGKRIVV

SEQ ID NO: 95768 - protein, 412 aa, Arabidopsis thaliana
  peptide (1)..(412): Ceres Seq. ID no. 12730302
MAREILILRRLDHPNVIKLEGLVTSRMSSSLYLVFRYMDHDLAGLAASPEIKFTEQQVKCYMKQLLSGLEHCHNRGVLHRDIKGSNLLIDDGGVLRIGDFGLATFFDASKRQEMTNRVVTLWYRSPELLHGVVEYSVGVDLWSAGCILAELLAGRAIMPGRNEVEQLHRIYKLCGSPSEEYWKKIRLPSTHKHAHHKPLPQYKRRIREVYKDFSPEALSLLDTLLALDPAERQTATDVLMSDFFTTEPLACQPSDLPKYPPSKEIDAKRRDEEYRRQREARKAQGESGRRMRPRERAPRAMPAPEANAENQSNIDRMRMITHANAKSKSEKFPPPHQDGSLGFQVGSSRRLDPSEIPYSTNSFTSSYSKEPFQTWSGPLAPIGAPDSTTRRRNDINKERRMASKVKGKRIVV

SEQ ID NO: 95769 - protein, 386 aa, Arabidopsis thaliana
  peptide (1)..(386): Ceres Seq. ID no. 12730303
MSSSLYLVFRYMDHDLAGLAASPEIKFTEQQVKCYMKQLLSGLEHCHNRGVLHRDIKGSNLLIDDGGVLRIGDFGLATFFDASKRQEMTNRVVTLWYRSPELLHGVVEYSVGVDLWSAGCILAELLAGRAIMPGRNEVEQLHRIYKLCGSPSEEYWKKIRLPSTHKHAHHKPLPQYKRRIREVYKDFSPEALSLLDTLLALDPAERQTATDVLMSDFFTTEPLACQPSDLPKYPPSKEIDAKRRDEEYRRQREARKAQGESGRRMRPRERAPRAMPAPEANAENQSNIDRMRMITHANAKSKSEKFPPPHQDGSLGFQVGSSRRLDPSEIPYSTNSFTSSYSKEPFQTWSGPLAPIGAPDSTTRRRNDINKERRMASKVKGKRIVV

SEQ ID NO: 95770 - DNA, 2041 bp, Arabidopsis thaliana
  misc_feature (1)..(2041): Ceres Seq. ID no. 12730311
  misc_feature (1)..(2041): Ortholog of  Ceres SEQ ID NO 13657138 as cited in SEQ ID NO 65923
  misc_feature (1)..(2041): Ortholog of  Ceres SEQ ID NO 13584744 as cited in SEQ ID NO 69137
aacttcaaaacttctttctatttttatttatttttggtttaaatgttaacttctttctatttcctttctatgatcctcttctctatttttaggttttcaggtttctgagaaaatcttaaaagtgtcctaccaacactctttcatggcggtagaccaaagcaaagaagcttctcccgtgtgttgtgctcttccaatgtaatcattcaatcaaatcacttttttctctgtttgttcttatatttgatttgagtttttttttggtagacatgatattaatgtctagaagtttatcttctgttctgttatgattttcattgatacttaacgaacgtttaagcagaattaacgaactttccctgaattttcaccgattttctcttaatttcccgcaaaatttacataagaacgacatgtttagtctgttcttttcttttgaatctcccgaggcaggtacaactctaaatattcaagttatgtcactgaagaagatccaaacgacataaatcatacgtcaaaacataaaagaaccaacgcgtttcttatgaattctgcttcagctcatgatctaagattactagaggtagataaagagaagcaagaccccaaatcaccaagaggagccctcgaagcctgcttaactcgttgctcaatctcttccgcttcatcttcatctgacgatcctcctccaaacagagaagctatcgacaatgcagatgcagacacagacgtacagtgcaagaatcacagagcatcttctaattggggaaaattcttcaagctatggaaacgcagatccatgaaacgcctctcttcctttcctccattaagtggcgccgccccaccgatcatcaaacaaaacaaaagtgcagatccaaacatgaatggcatggtccttcacgatatctacgatttccaatcatctctccaaaacttctcaatatctgacatcgaaattgcaactgacaatttcagtccagaaaacattatcggtagaggcggttacgccgatgtataccagggaattctaccggaaggaaagctaatcgctgtgaaacgtttgacaaaaggcacaccggacgagcaaacagctgagtttctatcggaacttgggattattgctcatgttgatcatcctaacactgccaaattcatcggttgttgcatcgagggtggaatgcatctcgtgttccggctatctcctcttggaagcttaggctctctcctccatggaccatcaaaatataagctgacttggagcagacgttacaatgtagcgttaggaacagcagatggactagtgtatcttcatgagggttgtcaaagacgaatcattcatcgagacatcaaagctgataatattcttctcaccgaagattttcaaccgcagatttgcgacttcgggttagccaaatggcttcccaagcaattgacacaccataacgtatccaaatttgagggaacattcgggtactttgcacctgaatatttcatgcacggaatcgtggacgagaagactgatgttttcgcttttggagttctcctcttggagctcataaccggacatcctgcccttgacgagtctcagcagagccttgtcttatgggctaagccgttgctagagagaaaagctataaaagaattggtggatccatctcttggagatgagtataaccgagaagagcttatccggttaacttccacggcttctttatgcatcgatcaatcttctcttctacgaccccggatgagccaggttgtggaattattactaggccacgaagatgtcgtaatgactccaagagaagcgaagataaagatgatgcaacgaacgtattccgaagaattattagatagtgtagaatataactccactaagtacttgggagatcttgatcgcattcgagaggttgctttagcctcttgaaatcgatccaaattattattatgtaaaactattttggtttctttcattggtgaatgtaaatcgttggaaaaaattaccaaaaaaaactattatgtgatcaaaatagctgaaatttgt

SEQ ID NO: 95771 - protein, 460 aa, Arabidopsis thaliana
  peptide (1)..(460): Ceres Seq. ID no. 12730312
MNSASAHDLRLLEVDKEKQDPKSPRGALEACLTRCSISSASSSSDDPPPNREAIDNADADTDVQCKNHRASSNWGKFFKLWKRRSMKRLSSFPPLSGAAPPIIKQNKSADPNMNGMVLHDIYDFQSSLQNFSISDIEIATDNFSPENIIGRGGYADVYQGILPEGKLIAVKRLTKGTPDEQTAEFLSELGIIAHVDHPNTAKFIGCCIEGGMHLVFRLSPLGSLGSLLHGPSKYKLTWSRRYNVALGTADGLVYLHEGCQRRIIHRDIKADNILLTEDFQPQICDFGLAKWLPKQLTHHNVSKFEGTFGYFAPEYFMHGIVDEKTDVFAFGVLLLELITGHPALDESQQSLVLWAKPLLERKAIKELVDPSLGDEYNREELIRLTSTASLCIDQSSLLRPRMSQVVELLLGHEDVVMTPREAKIKMMQRTYSEELLDSVEYNSTKYLGDLDRIREVALAS

SEQ ID NO: 95772 - protein, 375 aa, Arabidopsis thaliana
  peptide (1)..(375): Ceres Seq. ID no. 12730313
MKRLSSFPPLSGAAPPIIKQNKSADPNMNGMVLHDIYDFQSSLQNFSISDIEIATDNFSPENIIGRGGYADVYQGILPEGKLIAVKRLTKGTPDEQTAEFLSELGIIAHVDHPNTAKFIGCCIEGGMHLVFRLSPLGSLGSLLHGPSKYKLTWSRRYNVALGTADGLVYLHEGCQRRIIHRDIKADNILLTEDFQPQICDFGLAKWLPKQLTHHNVSKFEGTFGYFAPEYFMHGIVDEKTDVFAFGVLLLELITGHPALDESQQSLVLWAKPLLERKAIKELVDPSLGDEYNREELIRLTSTASLCIDQSSLLRPRMSQVVELLLGHEDVVMTPREAKIKMMQRTYSEELLDSVEYNSTKYLGDLDRIREVALAS

SEQ ID NO: 95773 - protein, 348 aa, Arabidopsis thaliana
  peptide (1)..(348): Ceres Seq. ID no. 12730314
MNGMVLHDIYDFQSSLQNFSISDIEIATDNFSPENIIGRGGYADVYQGILPEGKLIAVKRLTKGTPDEQTAEFLSELGIIAHVDHPNTAKFIGCCIEGGMHLVFRLSPLGSLGSLLHGPSKYKLTWSRRYNVALGTADGLVYLHEGCQRRIIHRDIKADNILLTEDFQPQICDFGLAKWLPKQLTHHNVSKFEGTFGYFAPEYFMHGIVDEKTDVFAFGVLLLELITGHPALDESQQSLVLWAKPLLERKAIKELVDPSLGDEYNREELIRLTSTASLCIDQSSLLRPRMSQVVELLLGHEDVVMTPREAKIKMMQRTYSEELLDSVEYNSTKYLGDLDRIREVALAS

SEQ ID NO: 95774 - DNA, 1086 bp, Arabidopsis thaliana
  misc_feature (1)..(1086): Ceres Seq. ID no. 12730327
  misc_feature (1)..(1086): Ortholog of  Ceres SEQ ID NO 13600580 as cited in SEQ ID NO 1382
tttcccggaaattttcgaatactctgaaaggaaaataggaaaatggcaagtgggtttccgccgcagaagcaagagacacaaccagggatacaacatgtcatggaaccaactcccgagttctctagttctaactataaaccttccaacaaacttcatggaaaagtggcactcgtgacaggaggagactcagggataggtaaagcagtgtgtcactgctatgcacttgaaggagcgagcgtggctttcacgtacgttaaaggtagagaggacaaagacgcagaagaaacgctgcgtttgcttcacgaggttaagacaagggaagctaaagagccgatcatgatcgctactgatttagggtttgaagagaattgcaagagggtcgttgaggaagttgtgaactcctttggacgcatcgatgtgcttgtgaattgtgcagctgagcagcatgaggtttccattgaggatatcgatgaggctaggcttgagagagtgttccgtaccaacatcttctcgcagtttttcttggttaaatatgcgttaaagcacatgaaggaagggagcagcatcatcaatacgacgtcggttgttgcatacgcaggaaactcaagcttactagagtacacagctacgaaaggagccatcgtttctttcacacgtgggttagctcttcagcttgcaccaaagggcattcgtgtgaacggtgtcgctcctggtccggtctggactccactgatacccgcatcgttctctgaagaagcgatcaaacagtttgggtcagagacaccgatgaaaagagcggctcagcctgtggaagtggctccttcctacgttttcttggcttgtaaccattgctcatcttactacaccggccaaatcctccatccaaacggtggtcttatcgtgaacgcttgagcttgcaataagtgcttatgtacatgactctgtttaggaagttcttacaaagagagtatatccagtagtatagtcgtgtgatgtaataaggtgatatgttgttttgtcgtttttttaaaagaagaataatatgaagaaaacaaaagagaacagaataaaatggtatggttggtt

SEQ ID NO: 95775 - protein, 289 aa, Arabidopsis thaliana
  peptide (1)..(289): Ceres Seq. ID no. 12730328
MASGFPPQKQETQPGIQHVMEPTPEFSSSNYKPSNKLHGKVALVTGGDSGIGKAVCHCYALEGASVAFTYVKGREDKDAEETLRLLHEVKTREAKEPIMIATDLGFEENCKRVVEEVVNSFGRIDVLVNCAAEQHEVSIEDIDEARLERVFRTNIFSQFFLVKYALKHMKEGSSIINTTSVVAYAGNSSLLEYTATKGAIVSFTRGLALQLAPKGIRVNGVAPGPVWTPLIPASFSEEAIKQFGSETPMKRAAQPVEVAPSYVFLACNHCSSYYTGQILHPNGGLIVNA

SEQ ID NO: 95776 - protein, 270 aa, Arabidopsis thaliana
  peptide (1)..(270): Ceres Seq. ID no. 12730329
MEPTPEFSSSNYKPSNKLHGKVALVTGGDSGIGKAVCHCYALEGASVAFTYVKGREDKDAEETLRLLHEVKTREAKEPIMIATDLGFEENCKRVVEEVVNSFGRIDVLVNCAAEQHEVSIEDIDEARLERVFRTNIFSQFFLVKYALKHMKEGSSIINTTSVVAYAGNSSLLEYTATKGAIVSFTRGLALQLAPKGIRVNGVAPGPVWTPLIPASFSEEAIKQFGSETPMKRAAQPVEVAPSYVFLACNHCSSYYTGQILHPNGGLIVNA

SEQ ID NO: 95777 - protein, 191 aa, Arabidopsis thaliana
  peptide (1)..(191): Ceres Seq. ID no. 12730330
MIATDLGFEENCKRVVEEVVNSFGRIDVLVNCAAEQHEVSIEDIDEARLERVFRTNIFSQFFLVKYALKHMKEGSSIINTTSVVAYAGNSSLLEYTATKGAIVSFTRGLALQLAPKGIRVNGVAPGPVWTPLIPASFSEEAIKQFGSETPMKRAAQPVEVAPSYVFLACNHCSSYYTGQILHPNGGLIVNA

SEQ ID NO: 95778 - DNA, 3396 bp, Arabidopsis thaliana
  misc_feature (1)..(3396): Ceres Seq. ID no. 12730343
  misc_feature (1)..(3396): Ortholog of  Ceres SEQ ID NO 14307510 as cited in SEQ ID NO 54687
atggcaccagttaggaagtcgaggagtgtgaacaagcgtttcaccaatgaaacttccccaagaaaagatgctgggaaatcgaaaaaaaataagctacgtaagaagaaattgtctgacaagctgggacctcagtggaccagattagaacttgagcgtttctatgatgcttaccgcaagcacggacaagagtggagaagggtggctgctgcaattcggaatagcaggtctgttgacatggtggaagctctatttaatatgaatcgggcgtatttatctctccccgagggaactgcctctgtagctggccttattgcgatgatgacagatcattacagtgtcatggaagggagtggcagtgaaggagaaggccatgatgcttcagaagtaccaaggaaacaacaaaagcgcaaacgtgctaaacctcaacgtagcgattctccagaggaagtggatatacaacagtcaattggttcaccagatggatgcctcacgtttttgaagcaagcacgagctaatgttcatgtaggaactcagcgacatgccactggaaaacgtacaccacgggttcctgtacaaacttcatttatgagggatgatagagaaggctctactccaccaaataaaagagccaggaagcaattcgatgccaatgatgatgtagcacattttttagcgttagcattaacagatgcatcgagaaggggagggtctccaaaagtttctgaatcaccaaatagaagaacagaacttagcgatagctcaccgataaagagctgggggaaaatgtcgcgaaccagaaaatctcagtctaagcactgtggcagctccattttcgaggagtggatggaaagtagccgagaaaggaaacttgactctgataaagatactaccttgttgatggatatggaaagggctggcgaaatggaggctccgcggaaggggaaaagagtctacaagaaaagagtgaaagtcgaagaagcagaatgtaatgattctgatgacaatggagaagcatgcagtgccacacaagggctcagaagtaaatcacaaagacgaaaggctgctattgaagcctcaagagagaaatactcaccgcgcagcccaaagaaaagagatgacaaacatacttccggagcttttgatgccctgcaagcattggccgaattgtcagcttcaatgcttccagcaaatttgatggagtcagaattatctgctcagttgaaggaagaaagaacagaatacgacatggacgagaaatctagcacaccagaagctacttccacaagcagtcatggggaaaaagcaaatgtagagccagatgatagtctccttcatgcaatttcttctgttgagaatgctaacaagagaaagtcaaaaccttcaaggctggtatccactgattgtgatgatgttcccacagggaagctacaaccacaaactagtggcagtttaagaaaacgtaaaccaaaggtactaggggatgaagctccagcagagtttagtcagaacaaatccataaacaagaaggaattgcctcaagatgagaataatatgaagtctttggttaaaacaaaacgcgctggtcaagttccggctcagtcaaaacagatgaaaactgttaaggcgttggaggaatctgctataacaagtgataagaaaagacctgggatggatatagtagcgtcacctaaacaagtttctgactcgggtccaaccagtttatcgcagaaacctccaaacaggcgaaagaagagtctgcagaaaagcttacaagaaaaggctaaatcttctgaaaccactcataaagctgcacgtagttccagatctctttcagaacaagagttgttgttaaaggataagcttgctacttctctgtcgtttccctttgcacgtcgaaggtgcatatttgaatggttttatagtgctatcgaccatccctggttttcaaagatggagtttgtcgattacctaaatcacgtggggcttggtcacattccaagacttactcgtcttgaatggagcgtcattaaaagttctcttggtagaccacgaagattctctgagagatttttacatgaagagcgggagaaacttaaacagtaccgcgaatctgtgcgaaagcattatacagagcttcgaacgggtgctagggaggggcttcctacagatttggctcggccattagcagttgggaacagagtcattgccatccatcccaaaacacgggagattcatgatggaaaaattctcactgttgatcataacaaatgcaatgttctcttcgatgacttgggcgttgagttggttatggacattgattgcatgcctttaaatccactggaatacatgccagagggtctaaggaggcaaattgataagtgcttgtctatgaagaaagaagcacagctaagcgggaatacaaaccttggtgtgtctgtgctattccctccttgcggacttgaaaatgtcagcttttccatgaatcctcctctgaatcagggtgatatgattgctcccattctgcatggtaaagtatcaagcaacactagtagtccacggcagactaatcattcatatatcacaacttataacaaagcaaaagaagctgagattcaacgggcacaagcgctacagcatgctttagatgaaaaggaaatggagccagagatgctagaaattgtcaagggttcaaaaacaagagcgcaagcaatggtggatgcagctataaaggctgcatcatctgtgaaggaaggggaagatgtgaacacaatgatccaagaagccttagagttggttggcaaaaatcagctattacgcagctctatggtcaaacatcacgagcatgtaaatggcagtatagagcatcatcacaacccatctccttcaaatggatcagagcctgtggctaacaacgatttaaactcacaagatggttcagagaaaaacgctcaaatgccttcagagcttatcacctcctgtgttgccacttggctcatgattcagatgtgcacggagagacagtaccctccagctgatgtcgcacagcttatagacgcagcagtcacaagcttgcagccacgatgcccacagaacctaccgatctacagagaaatccaaacgtgcatgggacggatcaagactcaaatcatgtcccttgtaccaacttgaaaagctaactcatttgggttggttttgttttgaatcttcgttaggtaagtctagtctcctttttactagagtagatgatgacatcttcacctgagaaaatggtgttataagttcacgaattcaagatagcttgaccagaggtattgtagttgctgaacaagcttttggcttattcaggggcttttggtagtgaaccattggttctgcaacgtaaaatgatgtttatgc

SEQ ID NO: 95779 - protein, 1055 aa, Arabidopsis thaliana
  peptide (1)..(1055): Ceres Seq. ID no. 12730344
MAPVRKSRSVNKRFTNETSPRKDAGKSKKNKLRKKKLSDKLGPQWTRLELERFYDAYRKHGQEWRRVAAAIRNSRSVDMVEALFNMNRAYLSLPEGTASVAGLIAMMTDHYSVMEGSGSEGEGHDASEVPRKQQKRKRAKPQRSDSPEEVDIQQSIGSPDGCLTFLKQARANVHVGTQRHATGKRTPRVPVQTSFMRDDREGSTPPNKRARKQFDANDDVAHFLALALTDASRRGGSPKVSESPNRRTELSDSSPIKSWGKMSRTRKSQSKHCGSSIFEEWMESSRERKLDSDKDTTLLMDMERAGEMEAPRKGKRVYKKRVKVEEAECNDSDDNGEACSATQGLRSKSQRRKAAIEASREKYSPRSPKKRDDKHTSGAFDALQALAELSASMLPANLMESELSAQLKEERTEYDMDEKSSTPEATSTSSHGEKANVEPDDSLLHAISSVENANKRKSKPSRLVSTDCDDVPTGKLQPQTSGSLRKRKPKVLGDEAPAEFSQNKSINKKELPQDENNMKSLVKTKRAGQVPAQSKQMKTVKALEESAITSDKKRPGMDIVASPKQVSDSGPTSLSQKPPNRRKKSLQKSLQEKAKSSETTHKAARSSRSLSEQELLLKDKLATSLSFPFARRRCIFEWFYSAIDHPWFSKMEFVDYLNHVGLGHIPRLTRLEWSVIKSSLGRPRRFSERFLHEEREKLKQYRESVRKHYTELRTGAREGLPTDLARPLAVGNRVIAIHPKTREIHDGKILTVDHNKCNVLFDDLGVELVMDIDCMPLNPLEYMPEGLRRQIDKCLSMKKEAQLSGNTNLGVSVLFPPCGLENVSFSMNPPLNQGDMIAPILHGKVSSNTSSPRQTNHSYITTYNKAKEAEIQRAQALQHALDEKEMEPEMLEIVKGSKTRAQAMVDAAIKAASSVKEGEDVNTMIQEALELVGKNQLLRSSMVKHHEHVNGSIEHHHNPSPSNGSEPVANNDLNSQDGSEKNAQMPSELITSCVATWLMIQMCTERQYPPADVAQLIDAAVTSLQPRCPQNLPIYREIQTCMGRIKTQIMSLVPT

SEQ ID NO: 95780 - protein, 977 aa, Arabidopsis thaliana
  peptide (1)..(977): Ceres Seq. ID no. 12730345
MVEALFNMNRAYLSLPEGTASVAGLIAMMTDHYSVMEGSGSEGEGHDASEVPRKQQKRKRAKPQRSDSPEEVDIQQSIGSPDGCLTFLKQARANVHVGTQRHATGKRTPRVPVQTSFMRDDREGSTPPNKRARKQFDANDDVAHFLALALTDASRRGGSPKVSESPNRRTELSDSSPIKSWGKMSRTRKSQSKHCGSSIFEEWMESSRERKLDSDKDTTLLMDMERAGEMEAPRKGKRVYKKRVKVEEAECNDSDDNGEACSATQGLRSKSQRRKAAIEASREKYSPRSPKKRDDKHTSGAFDALQALAELSASMLPANLMESELSAQLKEERTEYDMDEKSSTPEATSTSSHGEKANVEPDDSLLHAISSVENANKRKSKPSRLVSTDCDDVPTGKLQPQTSGSLRKRKPKVLGDEAPAEFSQNKSINKKELPQDENNMKSLVKTKRAGQVPAQSKQMKTVKALEESAITSDKKRPGMDIVASPKQVSDSGPTSLSQKPPNRRKKSLQKSLQEKAKSSETTHKAARSSRSLSEQELLLKDKLATSLSFPFARRRCIFEWFYSAIDHPWFSKMEFVDYLNHVGLGHIPRLTRLEWSVIKSSLGRPRRFSERFLHEEREKLKQYRESVRKHYTELRTGAREGLPTDLARPLAVGNRVIAIHPKTREIHDGKILTVDHNKCNVLFDDLGVELVMDIDCMPLNPLEYMPEGLRRQIDKCLSMKKEAQLSGNTNLGVSVLFPPCGLENVSFSMNPPLNQGDMIAPILHGKVSSNTSSPRQTNHSYITTYNKAKEAEIQRAQALQHALDEKEMEPEMLEIVKGSKTRAQAMVDAAIKAASSVKEGEDVNTMIQEALELVGKNQLLRSSMVKHHEHVNGSIEHHHNPSPSNGSEPVANNDLNSQDGSEKNAQMPSELITSCVATWLMIQMCTERQYPPADVAQLIDAAVTSLQPRCPQNLPIYREIQTCMGRIKTQIMSLVPT

SEQ ID NO: 95781 - protein, 970 aa, Arabidopsis thaliana
  peptide (1)..(970): Ceres Seq. ID no. 12730346
MNRAYLSLPEGTASVAGLIAMMTDHYSVMEGSGSEGEGHDASEVPRKQQKRKRAKPQRSDSPEEVDIQQSIGSPDGCLTFLKQARANVHVGTQRHATGKRTPRVPVQTSFMRDDREGSTPPNKRARKQFDANDDVAHFLALALTDASRRGGSPKVSESPNRRTELSDSSPIKSWGKMSRTRKSQSKHCGSSIFEEWMESSRERKLDSDKDTTLLMDMERAGEMEAPRKGKRVYKKRVKVEEAECNDSDDNGEACSATQGLRSKSQRRKAAIEASREKYSPRSPKKRDDKHTSGAFDALQALAELSASMLPANLMESELSAQLKEERTEYDMDEKSSTPEATSTSSHGEKANVEPDDSLLHAISSVENANKRKSKPSRLVSTDCDDVPTGKLQPQTSGSLRKRKPKVLGDEAPAEFSQNKSINKKELPQDENNMKSLVKTKRAGQVPAQSKQMKTVKALEESAITSDKKRPGMDIVASPKQVSDSGPTSLSQKPPNRRKKSLQKSLQEKAKSSETTHKAARSSRSLSEQELLLKDKLATSLSFPFARRRCIFEWFYSAIDHPWFSKMEFVDYLNHVGLGHIPRLTRLEWSVIKSSLGRPRRFSERFLHEEREKLKQYRESVRKHYTELRTGAREGLPTDLARPLAVGNRVIAIHPKTREIHDGKILTVDHNKCNVLFDDLGVELVMDIDCMPLNPLEYMPEGLRRQIDKCLSMKKEAQLSGNTNLGVSVLFPPCGLENVSFSMNPPLNQGDMIAPILHGKVSSNTSSPRQTNHSYITTYNKAKEAEIQRAQALQHALDEKEMEPEMLEIVKGSKTRAQAMVDAAIKAASSVKEGEDVNTMIQEALELVGKNQLLRSSMVKHHEHVNGSIEHHHNPSPSNGSEPVANNDLNSQDGSEKNAQMPSELITSCVATWLMIQMCTERQYPPADVAQLIDAAVTSLQPRCPQNLPIYREIQTCMGRIKTQIMSLVPT

SEQ ID NO: 95782 - DNA, 1709 bp, Arabidopsis thaliana
  misc_feature (1)..(1709): Ceres Seq. ID no. 12730351
  misc_feature (1)..(1709): Ortholog of  Ceres SEQ ID NO 13597407 as cited in SEQ ID NO 64106
attatactagctagctagtctatatatcatagggaagagaaagaaaaaacattctacttcacgcaaatattttatctctttgtttcttgttcttaattagggtttgattgaagaaaatggaaggagagaataatatggagaaaggattgttattggcaaaaaaggaagacagtgcaaatacaactccacttcttatcttctccaccttcatcattgtctctgcctccttcacctttggcgctgccataggttatactgcagatacaatgtcctccattatgtcagacttggatctttctctcgcacaattttcgctgtttggttcgttgtcgacgtttggaggaatgatcggtgcaatattcagcgccaaagctgcaagtgccttcggtcataaaatgacgttgtgggtggctgatttattctgcataactggttggcttgcaatttcactagccaaggatattatttggcttgacatggggcgatttttggtgggaattggagttggtctcattagctacgtggttcctgtatatattgcagaaataacacccaagcacgtaagaggggcttttacatttagcaatcagcttttgcaaaactgtggagttgcagtcgtatattactttggaaatttcttgtcatggagaactttagccataataggtagtattccatgttggatacaagttattggtttgttcttcatacctgagtctccaagatggctggcgaaaaaaggtcgtgataaagaatgtgaagaagttcttcaaaagttaagaggaagaaaatacgatattgtgcctgaagcttgcgaaatcaagatttcagttgaagcttcgaagaaaaattcgaatatcaacattcgtagtcttttcgaaaagagatatgctcatcaacttacaatcggcattggtttgatgcttctgcaacagttatgtggaactgcaggaataagttcttacggaagcactctatttaaacttgccgggtttcctgctcggattgggatgatggtgttatctcttatcgtcgtaccaaaatctttaatgggtctaatcctcgtggatcgatggggaagacgcccacttcttatgacttcagcgttggggttgtgtttaagctgtatcacattggcagtagcgtttggagttaaagatgtcccgggaattggaaaaattactccaattttctgtttcattggaatattgtcgtttacgatgatgttcgcaattggaatgggagcgttaccatggattataatgtctgagatatttccaatggatataaaggtattagctgggagtttagtgaccatagcaaattggttcactggttggatcgccaactatgctttcaattttatgttggtttggagcccaagcgggacttttataatatccgctataatctgtggagcaacaattgtattcacatggtgcttggtgccggagactcgaagattaacgttagaagaaatccaactgtcgtttgtcaatgtttagggttcatcggaagcattcatatatacatcataaaggttgatatactacatcatttgctacatataattcggcttcgatcgtatccataaattatttgattaattcaatataattaactaaagtttccattgtttagttgaactcattgaagattagtttatttgtatacatatatatatatatatactattgtttttcttcggt

SEQ ID NO: 95783 - protein, 462 aa, Arabidopsis thaliana
  peptide (1)..(462): Ceres Seq. ID no. 12730352
MEGENNMEKGLLLAKKEDSANTTPLLIFSTFIIVSASFTFGAAIGYTADTMSSIMSDLDLSLAQFSLFGSLSTFGGMIGAIFSAKAASAFGHKMTLWVADLFCITGWLAISLAKDIIWLDMGRFLVGIGVGLISYVVPVYIAEITPKHVRGAFTFSNQLLQNCGVAVVYYFGNFLSWRTLAIIGSIPCWIQVIGLFFIPESPRWLAKKGRDKECEEVLQKLRGRKYDIVPEACEIKISVEASKKNSNINIRSLFEKRYAHQLTIGIGLMLLQQLCGTAGISSYGSTLFKLAGFPARIGMMVLSLIVVPKSLMGLILVDRWGRRPLLMTSALGLCLSCITLAVAFGVKDVPGIGKITPIFCFIGILSFTMMFAIGMGALPWIIMSEIFPMDIKVLAGSLVTIANWFTGWIANYAFNFMLVWSPSGTFIISAIICGATIVFTWCLVPETRRLTLEEIQLSFVNV

SEQ ID NO: 95784 - protein, 456 aa, Arabidopsis thaliana
  peptide (1)..(456): Ceres Seq. ID no. 12730353
MEKGLLLAKKEDSANTTPLLIFSTFIIVSASFTFGAAIGYTADTMSSIMSDLDLSLAQFSLFGSLSTFGGMIGAIFSAKAASAFGHKMTLWVADLFCITGWLAISLAKDIIWLDMGRFLVGIGVGLISYVVPVYIAEITPKHVRGAFTFSNQLLQNCGVAVVYYFGNFLSWRTLAIIGSIPCWIQVIGLFFIPESPRWLAKKGRDKECEEVLQKLRGRKYDIVPEACEIKISVEASKKNSNINIRSLFEKRYAHQLTIGIGLMLLQQLCGTAGISSYGSTLFKLAGFPARIGMMVLSLIVVPKSLMGLILVDRWGRRPLLMTSALGLCLSCITLAVAFGVKDVPGIGKITPIFCFIGILSFTMMFAIGMGALPWIIMSEIFPMDIKVLAGSLVTIANWFTGWIANYAFNFMLVWSPSGTFIISAIICGATIVFTWCLVPETRRLTLEEIQLSFVNV

SEQ ID NO: 95785 - protein, 412 aa, Arabidopsis thaliana
  peptide (1)..(412): Ceres Seq. ID no. 12730354
MSSIMSDLDLSLAQFSLFGSLSTFGGMIGAIFSAKAASAFGHKMTLWVADLFCITGWLAISLAKDIIWLDMGRFLVGIGVGLISYVVPVYIAEITPKHVRGAFTFSNQLLQNCGVAVVYYFGNFLSWRTLAIIGSIPCWIQVIGLFFIPESPRWLAKKGRDKECEEVLQKLRGRKYDIVPEACEIKISVEASKKNSNINIRSLFEKRYAHQLTIGIGLMLLQQLCGTAGISSYGSTLFKLAGFPARIGMMVLSLIVVPKSLMGLILVDRWGRRPLLMTSALGLCLSCITLAVAFGVKDVPGIGKITPIFCFIGILSFTMMFAIGMGALPWIIMSEIFPMDIKVLAGSLVTIANWFTGWIANYAFNFMLVWSPSGTFIISAIICGATIVFTWCLVPETRRLTLEEIQLSFVNV

SEQ ID NO: 95786 - DNA, 1632 bp, Arabidopsis thaliana
  misc_feature (1)..(1632): Ceres Seq. ID no. 12730382
  misc_feature (1)..(1632): Ortholog of  Ceres SEQ ID NO 13594037 as cited in SEQ ID NO 55666
  misc_feature (1)..(1632): Ortholog of  Ceres SEQ ID NO 13657707 as cited in SEQ ID NO 66407
atggggattaccaccgctcttctcttagttatgcttatgtccgttcacacttcctcgtatgaaaccacaattttaaaaccatacaaagaagataactttcggtctcttgtcgcgaaagcatgccaatttatcgatgctcacgagttgtgcgtctctaacatctggacacacgtcaaggaatcgggtcacgggttaaacccgcattcggttttacgtgctgcggtaaaggaagcacatgacaaagccaagttagcaatggaaagaatcccaacggtaatgatgttatctatccgttcgcgtgagcaagttgccatagaggattgcaaagagcttgtaggcttctcggtaacagagctagcatggtcgatgctggagatgaacaaactccatggaggaggaggaatagatctagacgatggctctcacgatgctgctgcagcaggaggcaatcttaaaacctggcttagcgcggccatgagtaaccaagacacgtgtctagaagggtttgaaggaacagagaggaagtacgaggaattgatcaaaggtagcttaagacaagtcactcagcttgtgagcaatgtcttagacatgtacacgcagctcaatgccttgcctttcaaggcatctaggaacgagagcgtcatcgcaagtcctgagtggctcacggagaccgacgagagcctcatgatgcgtcatgaccccagtgtcatgcatccaaacacggttgtggcgatagatggaaaagggaagtatcggacaattaatgaggccatcaacgaggctcctaatcatagcacaaagcgatatgttatatatgttaagaaaggtgtgtataaagaaaatattgatttgaagaagaagaagacgaacattatgcttgttggtgacggaataggacagacgattattaccggtgaccggaatttcatgcagggtcttacgacattccgaactgcaaccgttgctgtttccggaagaggattcattgcaaaggacataacattcagaaacacggctggtccgcaaaaccgtcaagctgtcgcattgagggttgattctgaccaatccgccttctatcgatgtagcgtggaaggttatcaagacactctttacgcccattccctccgtcagttctatagagattgtgaaatttatggtacgattgatttcatattcggaaacggcgccgcggttttacaaaactgtaaaatctacactcgggtcccgctaccgctccagaaggtaacgataaccgcgcaaggaagaaaaagtccaaatcaaaatacagggttcgtaatccagaacagttacgtgctggctacacaacctacttatcttggccggccatggaaactttactcaagaacggtttacatgaacacttacatgagccagttggtccaacccagaggatggcttgagtggtttggtaattttgctttggacactttgtggtatggagaatacaataatattgggccaggttggcgatcatcaggtcgggttaaatggcctggttatcatatcatggacaaacggactgcattatcgttcaccgttggatcgttcattgacggtaggagatggcttccggcaacaggtgtcacattcaccgctggtctagctaactaa

SEQ ID NO: 95787 - protein, 543 aa, Arabidopsis thaliana
  peptide (1)..(543): Ceres Seq. ID no. 12730383
MGITTALLLVMLMSVHTSSYETTILKPYKEDNFRSLVAKACQFIDAHELCVSNIWTHVKESGHGLNPHSVLRAAVKEAHDKAKLAMERIPTVMMLSIRSREQVAIEDCKELVGFSVTELAWSMLEMNKLHGGGGIDLDDGSHDAAAAGGNLKTWLSAAMSNQDTCLEGFEGTERKYEELIKGSLRQVTQLVSNVLDMYTQLNALPFKASRNESVIASPEWLTETDESLMMRHDPSVMHPNTVVAIDGKGKYRTINEAINEAPNHSTKRYVIYVKKGVYKENIDLKKKKTNIMLVGDGIGQTIITGDRNFMQGLTTFRTATVAVSGRGFIAKDITFRNTAGPQNRQAVALRVDSDQSAFYRCSVEGYQDTLYAHSLRQFYRDCEIYGTIDFIFGNGAAVLQNCKIYTRVPLPLQKVTITAQGRKSPNQNTGFVIQNSYVLATQPTYLGRPWKLYSRTVYMNTYMSQLVQPRGWLEWFGNFALDTLWYGEYNNIGPGWRSSGRVKWPGYHIMDKRTALSFTVGSFIDGRRWLPATGVTFTAGLAN

SEQ ID NO: 95788 - protein, 533 aa, Arabidopsis thaliana
  peptide (1)..(533): Ceres Seq. ID no. 12730384
MLMSVHTSSYETTILKPYKEDNFRSLVAKACQFIDAHELCVSNIWTHVKESGHGLNPHSVLRAAVKEAHDKAKLAMERIPTVMMLSIRSREQVAIEDCKELVGFSVTELAWSMLEMNKLHGGGGIDLDDGSHDAAAAGGNLKTWLSAAMSNQDTCLEGFEGTERKYEELIKGSLRQVTQLVSNVLDMYTQLNALPFKASRNESVIASPEWLTETDESLMMRHDPSVMHPNTVVAIDGKGKYRTINEAINEAPNHSTKRYVIYVKKGVYKENIDLKKKKTNIMLVGDGIGQTIITGDRNFMQGLTTFRTATVAVSGRGFIAKDITFRNTAGPQNRQAVALRVDSDQSAFYRCSVEGYQDTLYAHSLRQFYRDCEIYGTIDFIFGNGAAVLQNCKIYTRVPLPLQKVTITAQGRKSPNQNTGFVIQNSYVLATQPTYLGRPWKLYSRTVYMNTYMSQLVQPRGWLEWFGNFALDTLWYGEYNNIGPGWRSSGRVKWPGYHIMDKRTALSFTVGSFIDGRRWLPATGVTFTAGLAN

SEQ ID NO: 95789 - protein, 531 aa, Arabidopsis thaliana
  peptide (1)..(531): Ceres Seq. ID no. 12730385
MSVHTSSYETTILKPYKEDNFRSLVAKACQFIDAHELCVSNIWTHVKESGHGLNPHSVLRAAVKEAHDKAKLAMERIPTVMMLSIRSREQVAIEDCKELVGFSVTELAWSMLEMNKLHGGGGIDLDDGSHDAAAAGGNLKTWLSAAMSNQDTCLEGFEGTERKYEELIKGSLRQVTQLVSNVLDMYTQLNALPFKASRNESVIASPEWLTETDESLMMRHDPSVMHPNTVVAIDGKGKYRTINEAINEAPNHSTKRYVIYVKKGVYKENIDLKKKKTNIMLVGDGIGQTIITGDRNFMQGLTTFRTATVAVSGRGFIAKDITFRNTAGPQNRQAVALRVDSDQSAFYRCSVEGYQDTLYAHSLRQFYRDCEIYGTIDFIFGNGAAVLQNCKIYTRVPLPLQKVTITAQGRKSPNQNTGFVIQNSYVLATQPTYLGRPWKLYSRTVYMNTYMSQLVQPRGWLEWFGNFALDTLWYGEYNNIGPGWRSSGRVKWPGYHIMDKRTALSFTVGSFIDGRRWLPATGVTFTAGLAN

SEQ ID NO: 95790 - DNA, 1587 bp, Arabidopsis thaliana
  misc_feature (1)..(1587): Ceres Seq. ID no. 12730419
  misc_feature (1)..(1587): Ortholog of  Ceres SEQ ID NO 12597287 as cited in SEQ ID NO 63982
atgaagggaggagagacaatgtcagtacggaggagcgggtacaaggcggtggttgacggagttggtggacggcggcgaagagaggacgacatggttgagatccgcaaagctaagagagaagagagcttgcttaagaagcgtcgcgaggctcttcctcattctccttccgccgattctcttgaccagaagttgataagctgtatttggtctgacgagagggatctgttgattgaggctactacacagatcagaacgttactttgtggtgaaatgtttaacgtacgtgttgaagaagttatacaggccggtttggttccacgctttgtggagttcctaacatgggatgactccccccagcttcagtttgaagcggcttgggctttaacaaatattgcatctggaacatctgagaatactgaagtggtgattgatcatggagctgttgcaatactagtgagacttctcaactcgccatatgatgtggtccgtgagcaggttgtttgggcattaggaaatatttctggagactctccgagatgccgtgatatagtccttggacatgcagctctaccttctctgctgttgcagttaaaccatggagccaaactttctatgcttgtaaacgccgcttggactttatctaatctttgcagaggaaagcctcagcctccatttgatcaggtgagtgctgcattaccagctcttgcacaactcattcggttagacgacaaggaactcttggcttacacgtgttgggcgctggtgtatctttctgatggttcaaatgaaaaaatacaagccgtgattgaagccaatgtttgtgcgcgacttattggtctttcgatccaccgttcgccttcagttatcactcccgctcttcgcaccattggaaatattgtaactggaaacgatagtcaaactcagcatataattgatcttcaagcgctcccatgcttggtaaatcttctaaggggatcctataacaagaccatcaggaaagaagcttgttggacagtctctaatatcacagctggttgtcagtcacagattcaggctgtgtttgatgctgatatatgtcctgcacttgttaatctgctccaaaactctgagggcgacgttaagaaggaagctgcctgggctatctgcaacgccatagctggaggctcttacaagcaaatcatgtttctagtaaagcaagaatgcatcaaaccgttgtgcgatcttcttacatgctcagatactcaactcgtcatggtttgtttagaagcactcaaaaaaatattaaaggtgggagaagttttcagctcaagacacgctgaaggtatttaccaatgtcctcaaacaaatgtaaacccacatgctcagctaatagaagaggcagagggactggagaaaatcgagggcctgcaatctcatgagaacaatgacatctacgaaactgcggtgaagattcttgaaacatactggatggaagaagaagaagaagaagatcaagaacaacaagacatgatatatttcccagttgacaactttgcaaacatgccaacatcctcaggcactctcagtgagatgcactgcggaccttaa

SEQ ID NO: 95791 - protein, 528 aa, Arabidopsis thaliana
  peptide (1)..(528): Ceres Seq. ID no. 12730420
MKGGETMSVRRSGYKAVVDGVGGRRRREDDMVEIRKAKREESLLKKRREALPHSPSADSLDQKLISCIWSDERDLLIEATTQIRTLLCGEMFNVRVEEVIQAGLVPRFVEFLTWDDSPQLQFEAAWALTNIASGTSENTEVVIDHGAVAILVRLLNSPYDVVREQVVWALGNISGDSPRCRDIVLGHAALPSLLLQLNHGAKLSMLVNAAWTLSNLCRGKPQPPFDQVSAALPALAQLIRLDDKELLAYTCWALVYLSDGSNEKIQAVIEANVCARLIGLSIHRSPSVITPALRTIGNIVTGNDSQTQHIIDLQALPCLVNLLRGSYNKTIRKEACWTVSNITAGCQSQIQAVFDADICPALVNLLQNSEGDVKKEAAWAICNAIAGGSYKQIMFLVKQECIKPLCDLLTCSDTQLVMVCLEALKKILKVGEVFSSRHAEGIYQCPQTNVNPHAQLIEEAEGLEKIEGLQSHENNDIYETAVKILETYWMEEEEEEDQEQQDMIYFPVDNFANMPTSSGTLSEMHCGP

SEQ ID NO: 95792 - protein, 522 aa, Arabidopsis thaliana
  peptide (1)..(522): Ceres Seq. ID no. 12730421
MSVRRSGYKAVVDGVGGRRRREDDMVEIRKAKREESLLKKRREALPHSPSADSLDQKLISCIWSDERDLLIEATTQIRTLLCGEMFNVRVEEVIQAGLVPRFVEFLTWDDSPQLQFEAAWALTNIASGTSENTEVVIDHGAVAILVRLLNSPYDVVREQVVWALGNISGDSPRCRDIVLGHAALPSLLLQLNHGAKLSMLVNAAWTLSNLCRGKPQPPFDQVSAALPALAQLIRLDDKELLAYTCWALVYLSDGSNEKIQAVIEANVCARLIGLSIHRSPSVITPALRTIGNIVTGNDSQTQHIIDLQALPCLVNLLRGSYNKTIRKEACWTVSNITAGCQSQIQAVFDADICPALVNLLQNSEGDVKKEAAWAICNAIAGGSYKQIMFLVKQECIKPLCDLLTCSDTQLVMVCLEALKKILKVGEVFSSRHAEGIYQCPQTNVNPHAQLIEEAEGLEKIEGLQSHENNDIYETAVKILETYWMEEEEEEDQEQQDMIYFPVDNFANMPTSSGTLSEMHCGP

SEQ ID NO: 95793 - protein, 498 aa, Arabidopsis thaliana
  peptide (1)..(498): Ceres Seq. ID no. 12730422
MVEIRKAKREESLLKKRREALPHSPSADSLDQKLISCIWSDERDLLIEATTQIRTLLCGEMFNVRVEEVIQAGLVPRFVEFLTWDDSPQLQFEAAWALTNIASGTSENTEVVIDHGAVAILVRLLNSPYDVVREQVVWALGNISGDSPRCRDIVLGHAALPSLLLQLNHGAKLSMLVNAAWTLSNLCRGKPQPPFDQVSAALPALAQLIRLDDKELLAYTCWALVYLSDGSNEKIQAVIEANVCARLIGLSIHRSPSVITPALRTIGNIVTGNDSQTQHIIDLQALPCLVNLLRGSYNKTIRKEACWTVSNITAGCQSQIQAVFDADICPALVNLLQNSEGDVKKEAAWAICNAIAGGSYKQIMFLVKQECIKPLCDLLTCSDTQLVMVCLEALKKILKVGEVFSSRHAEGIYQCPQTNVNPHAQLIEEAEGLEKIEGLQSHENNDIYETAVKILETYWMEEEEEEDQEQQDMIYFPVDNFANMPTSSGTLSEMHCGP

SEQ ID NO: 95794 - DNA, 2240 bp, Arabidopsis thaliana
  misc_feature (1)..(2240): Ceres Seq. ID no. 12730455
  misc_feature (1)..(2240): Ortholog of  Ceres SEQ ID NO 13596198 as cited in SEQ ID NO 68488
aagcttttaattttgaaaaacagatcgagtttctctttccctcctcgaaatttcctaaatccacacatcacgaagccgaagcagccatgagtaatcttcactgatctctctacacattcaccgtcggcttctcaaatgcaggatattctcggatcggttcgccgatccttggttttccggtcgtctttggccggagacgatggtactagcggcggaggtcttagcggattcgtcgggaagattaactctagtatccgtagctctcgaattgggctcttttctaagccgcctccaggccttcctgctcctagaaaagaagaagcgccgtcgattcggtggaggaaaggggaattaatcggttgcggtgcttttggaagagtttacatgggaatgaacctcgattccggcgagcttcttgcaattaaacaggttttaatcgctccaagcagtgcttcaaaggagaagactcagggtcacatccgagagcttgaggaagaagtacaacttcttaagaatctttcacatccgaacatcgttagatacttgggtactgtaagagagagtgattcgttgaatattttgatggagtttgttcctggtggatcaatatcatctttgttggagaagtttggatcttttcctgagcctgtgattattatgtacacaaagcaacttctgcttggtctggaatatcttcacaacaatgggatcatgcatcgagatattaagggggcaaatattttggtcgataacaaaggttgcatcagactcgcagattttggtgcttccaagaaagttgtagagctagctactgtaaatggtgccaaatctatgaaggggacgccttattggatggctcctgaagtcattctccagactggtcatagcttctctgctgatatatggagtgttgggtgcactgtgattgagatggctacggggaagcctccctggagcgagcagtatcagcagtttgctgctgtccttcatattggtagaacaaaagctcatcctccaattccagaagacctctcaccagaggctaaagactttctaatgaaatgcttacacaaagaaccaagcttgagactctctgcaaccgaattgcttcagcacccgtttgtcactggaaagcgccaggaaccttatccagcttaccgtaattctcttacggaatgtggaaacccaataactactcaaggaatgaatgttcggagttcaataaattcgttgatcaggaggtcgacatgttcaggcttgaaggatgtctgtgaactgggaagcttgaggagttccattatatacccacagaagtcaaataactcaggatttggttggcgagatggagactctgatgacctttgtcagaccgatatggatgatctctgcaacattgaatcagtcagaaacaatgttttgtcacagtccaccgatttaaacaagagttttaatcccatgtgtgattccacggataactggtcttgcaagtttgatgaaagcccaaaagtgatgaaaagcaaatctaacctgctttcttaccaagcttctcaactccaaactggagttccatgtgatgaggaaaccagcttaacatttgctggtggctcttccgttgcagaggatgattataaaggcacagagttgaaaataaaatcatttttggatgagaaggctcaggatttgaaaaggttgcagacccctctgcttgaagaattccacaatgctatgaatccaggaataccccaaggtgcacttggagacaccaatatctacaatttaccaaacttaccaagtataagcaagacacctaaacgacttccgagtagacgactctcagcaatcagtgatgctatgcccagcccactcaaaagctccaaacgtacactgaacacaagcagagtgatgcagtcaggaactgaaccaactcaagtcaacgagtcgaccaagaagggagtaaataatagccgttgtttctcagagatacgtcggaagtgggaagaagaactctatgaagagcttgagaggcatcgagagaatctgcgacacgctggtgcaggagggaagactccattatcaggccacaaaggatagtgaacggctaaagagaaactgtatgtttctttcttatgtttcaaaattacttcttcgtatttttttttgttggtggggtaatttcatgactagtatgatatatgtagatagttcttcaacggttcatagtattattatttattattatt

SEQ ID NO: 95795 - protein, 651 aa, Arabidopsis thaliana
  peptide (1)..(651): Ceres Seq. ID no. 12730456
MQDILGSVRRSLVFRSSLAGDDGTSGGGLSGFVGKINSSIRSSRIGLFSKPPPGLPAPRKEEAPSIRWRKGELIGCGAFGRVYMGMNLDSGELLAIKQVLIAPSSASKEKTQGHIRELEEEVQLLKNLSHPNIVRYLGTVRESDSLNILMEFVPGGSISSLLEKFGSFPEPVIIMYTKQLLLGLEYLHNNGIMHRDIKGANILVDNKGCIRLADFGASKKVVELATVNGAKSMKGTPYWMAPEVILQTGHSFSADIWSVGCTVIEMATGKPPWSEQYQQFAAVLHIGRTKAHPPIPEDLSPEAKDFLMKCLHKEPSLRLSATELLQHPFVTGKRQEPYPAYRNSLTECGNPITTQGMNVRSSINSLIRRSTCSGLKDVCELGSLRSSIIYPQKSNNSGFGWRDGDSDDLCQTDMDDLCNIESVRNNVLSQSTDLNKSFNPMCDSTDNWSCKFDESPKVMKSKSNLLSYQASQLQTGVPCDEETSLTFAGGSSVAEDDYKGTELKIKSFLDEKAQDLKRLQTPLLEEFHNAMNPGIPQGALGDTNIYNLPNLPSISKTPKRLPSRRLSAISDAMPSPLKSSKRTLNTSRVMQSGTEPTQVNESTKKGVNNSRCFSEIRRKWEEELYEELERHRENLRHAGAGGKTPLSGHKG

SEQ ID NO: 95796 - protein, 568 aa, Arabidopsis thaliana
  peptide (1)..(568): Ceres Seq. ID no. 12730457
MGMNLDSGELLAIKQVLIAPSSASKEKTQGHIRELEEEVQLLKNLSHPNIVRYLGTVRESDSLNILMEFVPGGSISSLLEKFGSFPEPVIIMYTKQLLLGLEYLHNNGIMHRDIKGANILVDNKGCIRLADFGASKKVVELATVNGAKSMKGTPYWMAPEVILQTGHSFSADIWSVGCTVIEMATGKPPWSEQYQQFAAVLHIGRTKAHPPIPEDLSPEAKDFLMKCLHKEPSLRLSATELLQHPFVTGKRQEPYPAYRNSLTECGNPITTQGMNVRSSINSLIRRSTCSGLKDVCELGSLRSSIIYPQKSNNSGFGWRDGDSDDLCQTDMDDLCNIESVRNNVLSQSTDLNKSFNPMCDSTDNWSCKFDESPKVMKSKSNLLSYQASQLQTGVPCDEETSLTFAGGSSVAEDDYKGTELKIKSFLDEKAQDLKRLQTPLLEEFHNAMNPGIPQGALGDTNIYNLPNLPSISKTPKRLPSRRLSAISDAMPSPLKSSKRTLNTSRVMQSGTEPTQVNESTKKGVNNSRCFSEIRRKWEEELYEELERHRENLRHAGAGGKTPLSGHKG

SEQ ID NO: 95797 - protein, 566 aa, Arabidopsis thaliana
  peptide (1)..(566): Ceres Seq. ID no. 12730458
MNLDSGELLAIKQVLIAPSSASKEKTQGHIRELEEEVQLLKNLSHPNIVRYLGTVRESDSLNILMEFVPGGSISSLLEKFGSFPEPVIIMYTKQLLLGLEYLHNNGIMHRDIKGANILVDNKGCIRLADFGASKKVVELATVNGAKSMKGTPYWMAPEVILQTGHSFSADIWSVGCTVIEMATGKPPWSEQYQQFAAVLHIGRTKAHPPIPEDLSPEAKDFLMKCLHKEPSLRLSATELLQHPFVTGKRQEPYPAYRNSLTECGNPITTQGMNVRSSINSLIRRSTCSGLKDVCELGSLRSSIIYPQKSNNSGFGWRDGDSDDLCQTDMDDLCNIESVRNNVLSQSTDLNKSFNPMCDSTDNWSCKFDESPKVMKSKSNLLSYQASQLQTGVPCDEETSLTFAGGSSVAEDDYKGTELKIKSFLDEKAQDLKRLQTPLLEEFHNAMNPGIPQGALGDTNIYNLPNLPSISKTPKRLPSRRLSAISDAMPSPLKSSKRTLNTSRVMQSGTEPTQVNESTKKGVNNSRCFSEIRRKWEEELYEELERHRENLRHAGAGGKTPLSGHKG

SEQ ID NO: 95798 - DNA, 2219 bp, Arabidopsis thaliana
  misc_feature (1)..(2219): Ceres Seq. ID no. 12730462
  misc_feature (1)..(2219): Ortholog of  Ceres SEQ ID NO 13659033 as cited in SEQ ID NO 66372
  misc_feature (1)..(2219): Ortholog of  Ceres SEQ ID NO 13655724 as cited in SEQ ID NO 68973
  misc_feature (1)..(2219): Ortholog of  Ceres SEQ ID NO 12625899 as cited in SEQ ID NO 69079
aaaaaccccacgattctcaaccaatagccactcctgcatctatctctctccttgtgaatgtgaacacaaaaggacaagaagagaaagttgagagttttcttttgattttcgcttgtctggattcgaaccgaatcgccattgttgttgttaccaatattcttctctcttcgtcttcttttgtctgaaaaaaatccaaacattatttcagtttctccattggaaaagcgcaacaaaacatccatccacgagtgtttcctcgtttccttgacacatgtttttcgcatcattcattcattcttcatcattttaaactaaaagaaacgaaactgacctaccaagcaaagttcctctacttgcttcatcttcattcgtcatgatttccctctttttttactttaccaatttcttgaattcttaaacccaaagacaaagcctttcgatttcctatagatactttcagatgtctaagaactcaaacgttgaagagaatggaggagcaaagccaatctgtgaagctttgaggagattcaaaaggtcgaggcttgtgttcgagccgtctttaggagtgttggggtttttcttggttggggtctgtttggtttgcagttttttcttctttgattacagaagcgttgctaaaagctatggcctttcggataaatctgagagattcgtttggctcaagtttgacaatatcagcagcagcagcagtagtagtagtaatagttcaaagagagttgggtttctggaagagagtggaagtgggtgtgatgtgttcgatggagattgggtttgggacgagtcttatccattgtatcaatccaaagattgcagatttctcgatgaagggtttaggtgtagtgactttggaaggtctgatttgttctatactcagtggcgttggcaacctagacactgtaatttgcccagatttgatgcaaaactgatgctggagaaactccgggacaagcggcttgtgtttgttggcgattcaataggaagaaaccagtgggagtctctactttgtctactatcttctgcagtcaagaacgagagcttgatttatgaaataaatggaagtccgatcacaaagcacaaagggttcttggtgttcaaatttgaggagtacaattgcacagtggagtactacagatctccatttttggttcctcaaagcagaccaccgattggatcacctggaaaggtcaagacaagtttgaaactggacactatggattggacttcaagcaaatggagagatgctgacgttttagtgctcaatactggacactggtggaacgaggggaaaactactagaacgggatgttactttcaagaaggagaagaagtaaaattgaagatgaatgtagatgatgcttataagcgagctctgaataccgttgtgaaatggatacataccgagctcgattcaaacaaaactcaagtcttctttcgcactttcgcccccgtgcatttcaggtttgtacggtattactcttgataaagactcaatcgtttgtaatattcagttgcttgattaggtttaggtcttatgatgtagaatgttctgcatttagtttcaatatatcttcgtcgttgtatgtatgaaacaggggaggagattggaaaacaggaggaacatgtcatatggagacattaccagagattggaacctcattggcttcatcagagacctgggaacagttaaagatcctcagagatgtgttgtcacataactcaaacagatcagagactgttaaagtgaaactgttgaacataacggcaatggctgctcaaagaaaagatggtcacccatcactctactatctcggtccgcatggtcctgcaccgcttcatcgccaagactgtagccactggtgccttcccggtgttcctgacacgtggaacgagctcttctatgcattatttatgaaacaagaagctccttcttcttctaaaagagttgaagaagcgaacagtacaggaaatgttacaatgtcgtgatgcctggacaggacaaggaaaccacaacaagctcttgtttcttaaagctgttggcgtttttcttaagatgccaagcttaaagatcaaaaagggttctggattttttgattgggtgattagattaattgggtgggggaatatatgtaattaggttggtaatcttaatctctggttgtaaagataaaaaaaaatcttaaaattatttttcgatgatt

SEQ ID NO: 95799 - protein, 346 aa, Arabidopsis thaliana
  peptide (1)..(346): Ceres Seq. ID no. 12730463
MSKNSNVEENGGAKPICEALRRFKRSRLVFEPSLGVLGFFLVGVCLVCSFFFFDYRSVAKSYGLSDKSERFVWLKFDNISSSSSSSSNSSKRVGFLEESGSGCDVFDGDWVWDESYPLYQSKDCRFLDEGFRCSDFGRSDLFYTQWRWQPRHCNLPRFDAKLMLEKLRDKRLVFVGDSIGRNQWESLLCLLSSAVKNESLIYEINGSPITKHKGFLVFKFEEYNCTVEYYRSPFLVPQSRPPIGSPGKVKTSLKLDTMDWTSSKWRDADVLVLNTGHWWNEGKTTRTGCYFQEGEEVKLKMNVDDAYKRALNTVVKWIHTELDSNKTQVFFRTFAPVHFRFVRYYS

SEQ ID NO: 95800 - protein, 184 aa, Arabidopsis thaliana
  peptide (1)..(184): Ceres Seq. ID no. 12730464
MLEKLRDKRLVFVGDSIGRNQWESLLCLLSSAVKNESLIYEINGSPITKHKGFLVFKFEEYNCTVEYYRSPFLVPQSRPPIGSPGKVKTSLKLDTMDWTSSKWRDADVLVLNTGHWWNEGKTTRTGCYFQEGEEVKLKMNVDDAYKRALNTVVKWIHTELDSNKTQVFFRTFAPVHFRFVRYYS

SEQ ID NO: 95801 - DNA, 827 bp, Arabidopsis thaliana
  misc_feature (1)..(827): Ceres Seq. ID no. 12730465
  misc_feature (1)..(827): Ortholog of  Ceres SEQ ID NO 13584275 as cited in SEQ ID NO 63905
atgtctcacatcgctgttgaaaggaatcgaagaaggcaaatgaacgagcatcttaaatcccttcgttctttgactccttgtttctacatcaaaaggggagatcaagcttcgatcatcggaggagtgatagagttcatcaaagagttgcagcaattggttcaagttcttgagtccaagaaacgtcgaaagaccctaaaccgaccatctttcccttatgatcaccagacaatcgagccatccagtttaggagccgccactacccgagtaccgtttagtcgaatcgaaaatgtgatgaccacaagtactttcaaggaagtaggagcatgctgtaactcccctcatgctaacgtagaagcaaagatttcaggttctaatgttgtattgagagttgtctctaggcgaatcgtggggcagctcgtaaagatcatctctgtcttagagaagctatcttttcaagttcttcacctcaatattagtagcatggaggagactgtcttatactttttcgttgttaagataggattggagtgtcacttaagcttggaggagctaactcttgaagttcagaaaagctttgtgtctgatgaagtgatcgtctctaccaattaaaaacaaaattctacatgtactagagcgtgtatcgttttttgggattaataatcatataatcgttacatgagccttgatactttgctagaaataagctcctctaaacaaaaccttctttttaaaaaaacacacttatgttttacttagtttgttgttgtatccgaagttgatcaacgttgtaatttcccacaataaatcatgacaccccttatatgcgg

SEQ ID NO: 95802 - protein, 202 aa, Arabidopsis thaliana
  peptide (1)..(202): Ceres Seq. ID no. 12730466
MSHIAVERNRRRQMNEHLKSLRSLTPCFYIKRGDQASIIGGVIEFIKELQQLVQVLESKKRRKTLNRPSFPYDHQTIEPSSLGAATTRVPFSRIENVMTTSTFKEVGACCNSPHANVEAKISGSNVVLRVVSRRIVGQLVKIISVLEKLSFQVLHLNISSMEETVLYFFVVKIGLECHLSLEELTLEVQKSFVSDEVIVSTN

SEQ ID NO: 95803 - protein, 189 aa, Arabidopsis thaliana
  peptide (1)..(189): Ceres Seq. ID no. 12730467
MNEHLKSLRSLTPCFYIKRGDQASIIGGVIEFIKELQQLVQVLESKKRRKTLNRPSFPYDHQTIEPSSLGAATTRVPFSRIENVMTTSTFKEVGACCNSPHANVEAKISGSNVVLRVVSRRIVGQLVKIISVLEKLSFQVLHLNISSMEETVLYFFVVKIGLECHLSLEELTLEVQKSFVSDEVIVSTN

SEQ ID NO: 95804 - protein, 105 aa, Arabidopsis thaliana
  peptide (1)..(105): Ceres Seq. ID no. 12730468
MTTSTFKEVGACCNSPHANVEAKISGSNVVLRVVSRRIVGQLVKIISVLEKLSFQVLHLNISSMEETVLYFFVVKIGLECHLSLEELTLEVQKSFVSDEVIVSTN

SEQ ID NO: 95805 - DNA, 882 bp, Arabidopsis thaliana
  misc_feature (1)..(882): Ceres Seq. ID no. 12730484
  misc_feature (1)..(882): Ortholog of  Ceres SEQ ID NO 14316532 as cited in SEQ ID NO 57093
atggttatggttagagataatcaattccttaacctcaaactgtctcctatacaagctcctactactatccccccttgccgcttccccatcatacccgctacaaaagtctctgcaacagtttcttcctgcgcaagcaacactttttctgtagctaatttggacagaatcagtgttcttggcagtggaaacggaggaaccgtattcaaagttaaggacaagacaacctcagagatctacgcgttgaagaaagtgaaagaaaactgggattctacttccctccgtgagatcgaaatccttcgcatggtcaactctccttacgtcgcaaagtgtcacgacatcttccagaatccttccggagaagtatctattctaatggattacatggatcttggctcgctcgagtctctacgcggggttacagaaaaacaactcgctttgatgtctcgtcaagttttggaaggaaaaaattacttgcacgagcacaagatcgttcatagagacatcaagccagcgaatctgctacgtagctcaaaagaagaagtcaagatcgcagactttggagtgagcaagatcgtggtcaggtctttaaacaagtgcaactcgttcgtaggcacgttcgcatacatgagtcctgaaagactcgatagtgaagctgatggtgttacagaagaagacaaatcaaacgtttacgccggagatatatggagttttgggcttacgatgctcgagatcttggtgggttactacccgatgctaccagaccaagccgcgatagtatgtgcagtttgttttggagaaccaccaaaagcccccgaagaatgctctgacgatttgaagagtttcatggactgctgtttacgcaagaaagcaagcgagagatag

SEQ ID NO: 95806 - protein, 293 aa, Arabidopsis thaliana
  peptide (1)..(293): Ceres Seq. ID no. 12730485
MVMVRDNQFLNLKLSPIQAPTTIPPCRFPIIPATKVSATVSSCASNTFSVANLDRISVLGSGNGGTVFKVKDKTTSEIYALKKVKENWDSTSLREIEILRMVNSPYVAKCHDIFQNPSGEVSILMDYMDLGSLESLRGVTEKQLALMSRQVLEGKNYLHEHKIVHRDIKPANLLRSSKEEVKIADFGVSKIVVRSLNKCNSFVGTFAYMSPERLDSEADGVTEEDKSNVYAGDIWSFGLTMLEILVGYYPMLPDQAAIVCAVCFGEPPKAPEECSDDLKSFMDCCLRKKASER

SEQ ID NO: 95807 - protein, 291 aa, Arabidopsis thaliana
  peptide (1)..(291): Ceres Seq. ID no. 12730486
MVRDNQFLNLKLSPIQAPTTIPPCRFPIIPATKVSATVSSCASNTFSVANLDRISVLGSGNGGTVFKVKDKTTSEIYALKKVKENWDSTSLREIEILRMVNSPYVAKCHDIFQNPSGEVSILMDYMDLGSLESLRGVTEKQLALMSRQVLEGKNYLHEHKIVHRDIKPANLLRSSKEEVKIADFGVSKIVVRSLNKCNSFVGTFAYMSPERLDSEADGVTEEDKSNVYAGDIWSFGLTMLEILVGYYPMLPDQAAIVCAVCFGEPPKAPEECSDDLKSFMDCCLRKKASER

SEQ ID NO: 95808 - protein, 193 aa, Arabidopsis thaliana
  peptide (1)..(193): Ceres Seq. ID no. 12730487
MVNSPYVAKCHDIFQNPSGEVSILMDYMDLGSLESLRGVTEKQLALMSRQVLEGKNYLHEHKIVHRDIKPANLLRSSKEEVKIADFGVSKIVVRSLNKCNSFVGTFAYMSPERLDSEADGVTEEDKSNVYAGDIWSFGLTMLEILVGYYPMLPDQAAIVCAVCFGEPPKAPEECSDDLKSFMDCCLRKKASER

SEQ ID NO: 95809 - DNA, 1143 bp, Arabidopsis thaliana
  misc_feature (1)..(1143): Ceres Seq. ID no. 12730500
  misc_feature (1)..(1143): Ortholog of  Ceres SEQ ID NO 15169199 as cited in SEQ ID NO 55297
  misc_feature (1)..(1143): Ortholog of  Ceres SEQ ID NO 15175690 as cited in SEQ ID NO 55466
  misc_feature (1)..(1143): Ortholog of  Ceres SEQ ID NO 15171197 as cited in SEQ ID NO 56892
atgacgttccgaagtttactccaggaaatgcggtctaggccacaccgtgtagttcacgccgccgcctcaaccgctaatagttcagaccctttcagctggtcggagctcccggaggagctgcttagagaaatcctgattagggttgagactgttgacggcggcgattggccgtcgcggcgaaacgtggtggcttgtgccggcgtttgtcgtagctggaggattctcaccaaggagattgtagctgttcctgaattctcctctaaattgactttccctatctccctcaagcagtctggtccaagagattctctagttcaatgctttataaaacgtaatcgaaatactcaatcgtatcatctctatctcggattaactacctctttgacggataacgggaagtttcttcttgctgcttctaagctgaagcgcgcaacttgcactgattacatcatctctttgcgttcagacgatatctcaaagagaagcaacgcgtatcttgggagaatgagatcgaacttccttggaacaaaattcacggtctttgatggtagtcagaccggagcagcgaagatgcagaagagccgctcttctaatttcatcaaagtttcacctagagttcctcagggaagttaccccatcgctcacatttcatacgagttaaacgtcttaggctctcggggaccgagaagaatgcgttgcatcatggatacaatacctatgagcatcgtggagtcgcgaggagtagtagcttcaacatccataagctctttttccagtcggtcatcaccagtctttaggtctcactcaaaaccattgcgcagtaatagtgcatcatgtagcgactcaggcaacaacctgggagatccaccattggtgctgagcaacaaagctccacggtggcatgagcagttacgttgctggtgcttaaatttccatggtcgagtcacagtggcttcggttaagaactttcagcttgtggcagttagtgactgtgaagcagggcagacatctgagaggatcatactccagtttgggaaagttgggaaggacatgtttaccatggattatggatatccgatttctgcgtttcaagcgtttgctatctgcctgagcagttttgaaaccagaattgcctgtgaataa

SEQ ID NO: 95810 - protein, 380 aa, Arabidopsis thaliana
  peptide (1)..(380): Ceres Seq. ID no. 12730501
MTFRSLLQEMRSRPHRVVHAAASTANSSDPFSWSELPEELLREILIRVETVDGGDWPSRRNVVACAGVCRSWRILTKEIVAVPEFSSKLTFPISLKQSGPRDSLVQCFIKRNRNTQSYHLYLGLTTSLTDNGKFLLAASKLKRATCTDYIISLRSDDISKRSNAYLGRMRSNFLGTKFTVFDGSQTGAAKMQKSRSSNFIKVSPRVPQGSYPIAHISYELNVLGSRGPRRMRCIMDTIPMSIVESRGVVASTSISSFSSRSSPVFRSHSKPLRSNSASCSDSGNNLGDPPLVLSNKAPRWHEQLRCWCLNFHGRVTVASVKNFQLVAVSDCEAGQTSERIILQFGKVGKDMFTMDYGYPISAFQAFAICLSSFETRIACE

SEQ ID NO: 95811 - protein, 371 aa, Arabidopsis thaliana
  peptide (1)..(371): Ceres Seq. ID no. 12730502
MRSRPHRVVHAAASTANSSDPFSWSELPEELLREILIRVETVDGGDWPSRRNVVACAGVCRSWRILTKEIVAVPEFSSKLTFPISLKQSGPRDSLVQCFIKRNRNTQSYHLYLGLTTSLTDNGKFLLAASKLKRATCTDYIISLRSDDISKRSNAYLGRMRSNFLGTKFTVFDGSQTGAAKMQKSRSSNFIKVSPRVPQGSYPIAHISYELNVLGSRGPRRMRCIMDTIPMSIVESRGVVASTSISSFSSRSSPVFRSHSKPLRSNSASCSDSGNNLGDPPLVLSNKAPRWHEQLRCWCLNFHGRVTVASVKNFQLVAVSDCEAGQTSERIILQFGKVGKDMFTMDYGYPISAFQAFAICLSSFETRIACE

SEQ ID NO: 95812 - protein, 212 aa, Arabidopsis thaliana
  peptide (1)..(212): Ceres Seq. ID no. 12730503
MRSNFLGTKFTVFDGSQTGAAKMQKSRSSNFIKVSPRVPQGSYPIAHISYELNVLGSRGPRRMRCIMDTIPMSIVESRGVVASTSISSFSSRSSPVFRSHSKPLRSNSASCSDSGNNLGDPPLVLSNKAPRWHEQLRCWCLNFHGRVTVASVKNFQLVAVSDCEAGQTSERIILQFGKVGKDMFTMDYGYPISAFQAFAICLSSFETRIACE

SEQ ID NO: 95813 - DNA, 1083 bp, Arabidopsis thaliana
  misc_feature (1)..(1083): Ceres Seq. ID no. 12730512
  misc_feature (1)..(1083): Ortholog of  Ceres SEQ ID NO 13595351 as cited in SEQ ID NO 55934
  misc_feature (1)..(1083): Ortholog of  Ceres SEQ ID NO 13639645 as cited in SEQ ID NO 57488
atggggaaaggagtagtatcagagaaggtgaagctcgtggtggcattgatcacacttcagttttgtttcgcaggcttccacattgtctcaagagttgctcttaacattggtgtcagcaaagttgtgtaccctgtttataggaatctccttgcccttctcctcataggtcccttcgcttacttcttcgaaaaaaaagaaagacctccacttacaatctctttactggctcagttcttcttcttggcactcataggcatcacagcgaaccaaggattctacctattaggactttactatgcaactccaacttttgcttccgcaatgcagaactctgttcctgccatcactttcatcatggcttgtgccttaaggctagagcacatagacctggtcaggaaacatggtgtggcaaaagtattgggaactcttgtgagcatcggtggagccaccgtgatcacattgtacagaggatttccgatatttgaccagggccttaacatgcaaaaggaagaggtggtcggatctgacaactcgcacagcttgacactcggatggttataccttatgggacattgtctgtcatgggctggttggatggttcttcaagctcctgttctaaagcaatacccggcgaagctcactttaacatccttcacatgtttctttggtctgattcagtttctggttattgctctctttgtggaaactgatctaaataattggatcatcgtctcttgggaagagctcttcaccatcctatacgccggaataatagcgtcagggttggtggtttatcttcaaacatggtgtatctacaaaagcggtccagtttttgtcgctgttttccagcctctccagacacttcttgttgctgcgatggcgtttcttattcttggtgatcagttatactcgggagggattgttggtgcagtgtttataatgctagggctctacttagttctttggggcaaaaacgaagaaagaaaactggctcttgaagagagtcaacaagatccagagtcactgaccaaacatctacttgaggcacaacacaagaagagtaattctgaatctgaagtgtaa

SEQ ID NO: 95814 - protein, 360 aa, Arabidopsis thaliana
  peptide (1)..(360): Ceres Seq. ID no. 12730513
MGKGVVSEKVKLVVALITLQFCFAGFHIVSRVALNIGVSKVVYPVYRNLLALLLIGPFAYFFEKKERPPLTISLLAQFFFLALIGITANQGFYLLGLYYATPTFASAMQNSVPAITFIMACALRLEHIDLVRKHGVAKVLGTLVSIGGATVITLYRGFPIFDQGLNMQKEEVVGSDNSHSLTLGWLYLMGHCLSWAGWMVLQAPVLKQYPAKLTLTSFTCFFGLIQFLVIALFVETDLNNWIIVSWEELFTILYAGIIASGLVVYLQTWCIYKSGPVFVAVFQPLQTLLVAAMAFLILGDQLYSGGIVGAVFIMLGLYLVLWGKNEERKLALEESQQDPESLTKHLLEAQHKKSNSESEV

SEQ ID NO: 95815 - protein, 253 aa, Arabidopsis thaliana
  peptide (1)..(253): Ceres Seq. ID no. 12730514
MQNSVPAITFIMACALRLEHIDLVRKHGVAKVLGTLVSIGGATVITLYRGFPIFDQGLNMQKEEVVGSDNSHSLTLGWLYLMGHCLSWAGWMVLQAPVLKQYPAKLTLTSFTCFFGLIQFLVIALFVETDLNNWIIVSWEELFTILYAGIIASGLVVYLQTWCIYKSGPVFVAVFQPLQTLLVAAMAFLILGDQLYSGGIVGAVFIMLGLYLVLWGKNEERKLALEESQQDPESLTKHLLEAQHKKSNSESEV

SEQ ID NO: 95816 - protein, 242 aa, Arabidopsis thaliana
  peptide (1)..(242): Ceres Seq. ID no. 12730515
MACALRLEHIDLVRKHGVAKVLGTLVSIGGATVITLYRGFPIFDQGLNMQKEEVVGSDNSHSLTLGWLYLMGHCLSWAGWMVLQAPVLKQYPAKLTLTSFTCFFGLIQFLVIALFVETDLNNWIIVSWEELFTILYAGIIASGLVVYLQTWCIYKSGPVFVAVFQPLQTLLVAAMAFLILGDQLYSGGIVGAVFIMLGLYLVLWGKNEERKLALEESQQDPESLTKHLLEAQHKKSNSESEV

SEQ ID NO: 95817 - DNA, 4229 bp, Arabidopsis thaliana
  misc_feature (1)..(4229): Ceres Seq. ID no. 12730516
  misc_feature (1)..(4229): Ortholog of  Ceres SEQ ID NO 14316302 as cited in SEQ ID NO 55232
  misc_feature (1)..(4229): Ortholog of  Ceres SEQ ID NO 13659710 as cited in SEQ ID NO 60808
aacagttttttttaaatattttccagataaacattaataaaacgataaaaggcaaaaaataaaaaagaaaagaaagcaaaagcaaaatcaaaatcgatatatcagacaacgcctcgacctttctttctttttttccttctcatcgtctccgttgaacaacaccacacaaacaccagaagaacaccagataattcccatggtgaaccgagctcagatttgaaaattgaaggtcgtagacgaatcataaggaaagagagaagtggtttgagatttcttttttgacggacgaaaacggagataagctttgggggaaatggcgacgccgttaccagattttgagacggcgagaggcggcggagcagtggcgtcttcttcaaccacggttcttccgagttctgtgtcttcttcttcttcttcatctcgtccgttgcctgtggcgaattcgttctcggatgacgcggaagagatttctccgatcctgattttcttgttctttcataaggcagtatgtagtgagcttgaagctcttcatagattggctcttgagtttgctactggtcaccatgtcgatctccggctgcttcgtgaacggtaccggttcttgagatccatctataagcatcactgcaatgccgaagacgaggtgatattttcagctcttgacatacgtgtgaagaatgtagcgcaaacatattctcttgaacacaagggggaaagcaatcttttcgatcatctctttgagctgctgaattctgccacggaaactgatgaaagttaccgaagggagttggctcgttctaccggagcacttcagacttctgttagccagcacttggcgaaagaacagaaacaggtgttccccttacttattgagaaattcaagtatgaggagcaagcttacatagtctggcggtttctctgcagtattcctgtgaatatgcttgctgtgttcttgccatggatttcttcttccatttcagtagatgaaagcaaggagatgcaaacgtgcttaaagaagatagttccaggcgagaagctccttcagcaggttattttcacctggctgggagggaaaagcaataccgtggcttcgtgtcgcattgaagattctatgttccagtgctgtctagattcttctagcagcatgcttccttgtaaagcaagtagagaacagtgcgcatgtgagggttccaagattgggaagagaaagtacccagagcttactaactttggctcatctgatactctgcacccagttgatgagataaagctctggcacaagtcaatcaacaaggagatgaaagaaatagccgatgaggctaggaagattcagctgtctggagatttttcggatttatcggcatttgatgaacgcttacaatatattgctgaagtgtgcatcttccatagtcttgcagaggacaagatcatatttccagctgtagatggagagttttcattttctgaagagcacgatgaagaagaaaatcagtttaacgagtttcgatgcttaattgaaaatatcaagagtgctggagcctcttctacttccgctgccgaattttacactaagctgtgctcacatgctgatcaaataatggaaactattcaaagacacttccataacgaggaaattcaggtgctaccccttgcacgaaagaacttcagcttcaaaagacaacaagaacttctctaccaaagcctgtgtataatgccattgagactaattgaacgagttttgccatggttgacggcatctttaacagaagatgaagctaagaattttctgaagaacttgcaagctggagcacctaaatcggatgttgctctcgttactcttttctctggttgggcttgcaaaggacgcaaagccggggaatgcttgtctccaaacgggaatggtttatgccctgtgaaaacactaagcaacattaaagaagtcaaccttcagtcatgtaatgcttgtgcgtctgttccatgcacgagtaggagtacaaaatcgtgttgccagcatcaagataaaaggccagctaagcgaactgctgtattgtcttgtgaaaaaaaaaccacccctcactcgacagaagttgcaaatgggtgcaagccatctggaaatggtaggtcatgctgtgttccggatctcggagttaacaataattgtctggaacttggttctcttccagcagctaaagctatgagatcttcttcgctaaactctgctgcacccgctcttaattccagcctctttatttgggaaatggatagtaacagctttggtactggacatgctgagcggccagttgctacaatattcaagtttcacaaggccataagcaaagatctagagtttcttgatgttgaatctggaaagctcattgattgcgatggaacatttattcgtcaatttatcggtcgatttcacctactctggggtttctacaaggctcatagtaatgcagaagatgacatcctatttccagctctagaatcgaaggagacacttcacaatgtcagtcactcttacacgctcgaccataaacaggaggagaagttgtttggagatatttatagtgtccttaccgaactttcaattcttcatgagaagttacagagtgattctatgatggaggacatagctcaaactgacactgttcggacggatatcgataacggtgactgcaacaagaaatacaatgaactggctacaaagctacaggggatgtgcaaatccattaaaatcactttggatcagcacattttcttggaggaactggagctttggcctctatttgacaaacacttctccattcaagagcaagacaagattgtgggtcgtataatcggaacaacgggtgctgaagttcttcaatctatgttaccatgggtgacgtctgccctttctgaagatgagcaaaacagaatgatggatacctggaagcaggcaaccaagaacacaatgttcgatgaatggcttaatgaatgctggaaaggatcacccgactcatcctcaacagaaacatccaaacctagtccacagaaagataatgatcatcaagaaatcttggaccaaagtggtgaactatttaagccagggtggaaagatattttccgcatgaaccagaatgaactagaggctgaaatcaggaaggtctatcaggactcaacacttgatccgaggagaaaagattatctcgtacagaattggaggaccagtcgatggattgcggctcagcaaaagttacctaaggaagcagaaactgcagtaaatggtgatgttgaacttggatgttccccgtcttttcgggatcccgagaagcagatatatggatgcgagcattacaagcgtaactgcaagcttcgagctgcttgttgtgatcagttgttcacttgtaggttttgccatgacaaagtaagcgaccactccatggatagaaaattggtgacggaaatgctctgtatgcggtgcctcaaggtgcaacctgttggtcccatctgcacaacaccttcatgcgacggattcccaatggcaaagcactattgcagtatttgcaaactttttgatgatgaaagggccgtttaccactgtccattctgcaacctttgccgggtcggggaaggactaggaatcgattttttccattgcatgacatgtaactgttgcctagggatgaaattagtaaaccacaagtgcctcgagaagagcctcgagacaaattgccccatctgctgcgaatttcttttcacatcgagtgaagcagttagagccttaccatgtggtcactacatgcactcagcttgcttccaggcttacacttgcagtcactacacatgtccaatctgtggaaaatcattaggagatatggctgtttattttggtatgcttgatgcactgttagctgcagaagaacttccagaggaatacaaaaatcgctgtcaggacattctatgtaatgattgtgaacgcaaaggaactacacggttccattggttgtaccataaatgtggtagctgtggttcttacaatacccgggtgatcaagtccgaaacaatccccccggactgctcaacctcatcctgaaaacaccaagaggtttcactcacttgttactctctttttttctttccttttttcgggttttaccctctgtttcgcacaacaatgtgaagaagcccgttgatagattttttttttgtatagtctctgagatattaagattttgaagagtctt

SEQ ID NO: 95818 - protein, 1254 aa, Arabidopsis thaliana
  peptide (1)..(1254): Ceres Seq. ID no. 12730517
MATPLPDFETARGGGAVASSSTTVLPSSVSSSSSSSRPLPVANSFSDDAEEISPILIFLFFHKAVCSELEALHRLALEFATGHHVDLRLLRERYRFLRSIYKHHCNAEDEVIFSALDIRVKNVAQTYSLEHKGESNLFDHLFELLNSATETDESYRRELARSTGALQTSVSQHLAKEQKQVFPLLIEKFKYEEQAYIVWRFLCSIPVNMLAVFLPWISSSISVDESKEMQTCLKKIVPGEKLLQQVIFTWLGGKSNTVASCRIEDSMFQCCLDSSSSMLPCKASREQCACEGSKIGKRKYPELTNFGSSDTLHPVDEIKLWHKSINKEMKEIADEARKIQLSGDFSDLSAFDERLQYIAEVCIFHSLAEDKIIFPAVDGEFSFSEEHDEEENQFNEFRCLIENIKSAGASSTSAAEFYTKLCSHADQIMETIQRHFHNEEIQVLPLARKNFSFKRQQELLYQSLCIMPLRLIERVLPWLTASLTEDEAKNFLKNLQAGAPKSDVALVTLFSGWACKGRKAGECLSPNGNGLCPVKTLSNIKEVNLQSCNACASVPCTSRSTKSCCQHQDKRPAKRTAVLSCEKKTTPHSTEVANGCKPSGNGRSCCVPDLGVNNNCLELGSLPAAKAMRSSSLNSAAPALNSSLFIWEMDSNSFGTGHAERPVATIFKFHKAISKDLEFLDVESGKLIDCDGTFIRQFIGRFHLLWGFYKAHSNAEDDILFPALESKETLHNVSHSYTLDHKQEEKLFGDIYSVLTELSILHEKLQSDSMMEDIAQTDTVRTDIDNGDCNKKYNELATKLQGMCKSIKITLDQHIFLEELELWPLFDKHFSIQEQDKIVGRIIGTTGAEVLQSMLPWVTSALSEDEQNRMMDTWKQATKNTMFDEWLNECWKGSPDSSSTETSKPSPQKDNDHQEILDQSGELFKPGWKDIFRMNQNELEAEIRKVYQDSTLDPRRKDYLVQNWRTSRWIAAQQKLPKEAETAVNGDVELGCSPSFRDPEKQIYGCEHYKRNCKLRAACCDQLFTCRFCHDKVSDHSMDRKLVTEMLCMRCLKVQPVGPICTTPSCDGFPMAKHYCSICKLFDDERAVYHCPFCNLCRVGEGLGIDFFHCMTCNCCLGMKLVNHKCLEKSLETNCPICCEFLFTSSEAVRALPCGHYMHSACFQAYTCSHYTCPICGKSLGDMAVYFGMLDALLAAEELPEEYKNRCQDILCNDCERKGTTRFHWLYHKCGSCGSYNTRVIKSETIPPDCSTSS

SEQ ID NO: 95819 - protein, 1046 aa, Arabidopsis thaliana
  peptide (1)..(1046): Ceres Seq. ID no. 12730518
MLAVFLPWISSSISVDESKEMQTCLKKIVPGEKLLQQVIFTWLGGKSNTVASCRIEDSMFQCCLDSSSSMLPCKASREQCACEGSKIGKRKYPELTNFGSSDTLHPVDEIKLWHKSINKEMKEIADEARKIQLSGDFSDLSAFDERLQYIAEVCIFHSLAEDKIIFPAVDGEFSFSEEHDEEENQFNEFRCLIENIKSAGASSTSAAEFYTKLCSHADQIMETIQRHFHNEEIQVLPLARKNFSFKRQQELLYQSLCIMPLRLIERVLPWLTASLTEDEAKNFLKNLQAGAPKSDVALVTLFSGWACKGRKAGECLSPNGNGLCPVKTLSNIKEVNLQSCNACASVPCTSRSTKSCCQHQDKRPAKRTAVLSCEKKTTPHSTEVANGCKPSGNGRSCCVPDLGVNNNCLELGSLPAAKAMRSSSLNSAAPALNSSLFIWEMDSNSFGTGHAERPVATIFKFHKAISKDLEFLDVESGKLIDCDGTFIRQFIGRFHLLWGFYKAHSNAEDDILFPALESKETLHNVSHSYTLDHKQEEKLFGDIYSVLTELSILHEKLQSDSMMEDIAQTDTVRTDIDNGDCNKKYNELATKLQGMCKSIKITLDQHIFLEELELWPLFDKHFSIQEQDKIVGRIIGTTGAEVLQSMLPWVTSALSEDEQNRMMDTWKQATKNTMFDEWLNECWKGSPDSSSTETSKPSPQKDNDHQEILDQSGELFKPGWKDIFRMNQNELEAEIRKVYQDSTLDPRRKDYLVQNWRTSRWIAAQQKLPKEAETAVNGDVELGCSPSFRDPEKQIYGCEHYKRNCKLRAACCDQLFTCRFCHDKVSDHSMDRKLVTEMLCMRCLKVQPVGPICTTPSCDGFPMAKHYCSICKLFDDERAVYHCPFCNLCRVGEGLGIDFFHCMTCNCCLGMKLVNHKCLEKSLETNCPICCEFLFTSSEAVRALPCGHYMHSACFQAYTCSHYTCPICGKSLGDMAVYFGMLDALLAAEELPEEYKNRCQDILCNDCERKGTTRFHWLYHKCGSCGSYNTRVIKSETIPPDCSTSS

SEQ ID NO: 95820 - protein, 1026 aa, Arabidopsis thaliana
  peptide (1)..(1026): Ceres Seq. ID no. 12730519
MQTCLKKIVPGEKLLQQVIFTWLGGKSNTVASCRIEDSMFQCCLDSSSSMLPCKASREQCACEGSKIGKRKYPELTNFGSSDTLHPVDEIKLWHKSINKEMKEIADEARKIQLSGDFSDLSAFDERLQYIAEVCIFHSLAEDKIIFPAVDGEFSFSEEHDEEENQFNEFRCLIENIKSAGASSTSAAEFYTKLCSHADQIMETIQRHFHNEEIQVLPLARKNFSFKRQQELLYQSLCIMPLRLIERVLPWLTASLTEDEAKNFLKNLQAGAPKSDVALVTLFSGWACKGRKAGECLSPNGNGLCPVKTLSNIKEVNLQSCNACASVPCTSRSTKSCCQHQDKRPAKRTAVLSCEKKTTPHSTEVANGCKPSGNGRSCCVPDLGVNNNCLELGSLPAAKAMRSSSLNSAAPALNSSLFIWEMDSNSFGTGHAERPVATIFKFHKAISKDLEFLDVESGKLIDCDGTFIRQFIGRFHLLWGFYKAHSNAEDDILFPALESKETLHNVSHSYTLDHKQEEKLFGDIYSVLTELSILHEKLQSDSMMEDIAQTDTVRTDIDNGDCNKKYNELATKLQGMCKSIKITLDQHIFLEELELWPLFDKHFSIQEQDKIVGRIIGTTGAEVLQSMLPWVTSALSEDEQNRMMDTWKQATKNTMFDEWLNECWKGSPDSSSTETSKPSPQKDNDHQEILDQSGELFKPGWKDIFRMNQNELEAEIRKVYQDSTLDPRRKDYLVQNWRTSRWIAAQQKLPKEAETAVNGDVELGCSPSFRDPEKQIYGCEHYKRNCKLRAACCDQLFTCRFCHDKVSDHSMDRKLVTEMLCMRCLKVQPVGPICTTPSCDGFPMAKHYCSICKLFDDERAVYHCPFCNLCRVGEGLGIDFFHCMTCNCCLGMKLVNHKCLEKSLETNCPICCEFLFTSSEAVRALPCGHYMHSACFQAYTCSHYTCPICGKSLGDMAVYFGMLDALLAAEELPEEYKNRCQDILCNDCERKGTTRFHWLYHKCGSCGSYNTRVIKSETIPPDCSTSS

SEQ ID NO: 95821 - DNA, 945 bp, Arabidopsis thaliana
  misc_feature (1)..(945): Ceres Seq. ID no. 12730540
  misc_feature (1)..(945): Ortholog of  Ceres SEQ ID NO 13582619 as cited in SEQ ID NO 56520
  misc_feature (1)..(945): Ortholog of  Ceres SEQ ID NO 13660872 as cited in SEQ ID NO 60830
  misc_feature (1)..(945): Ortholog of  Ceres SEQ ID NO 12616221 as cited in SEQ ID NO 63291
atggaagaaaatcttcctccggggttcagatttcatcctacagacgaggagctcataacgcattatctatgtcggaaagtctccgatataggattcaccggtaaagctgtcgtcgacgttgatctcaacaagtgtgaaccttgggatttgccagccaaggcttcaatgggagagaaagagtggtatttcttcagccaaagggatcggaaatatccaaccggtttaagaacaaaccgggcaacagaagctggttactggaaaaccaccgggaaagataaagaaatataccgaagtggagtgttggttgggatgaagaaaaccctagttttctacaaaggaagagctcccaaaggtgagaaaagcaattgggttatgcatgagtacaggcttgagagcaaacaacctttcaaccccacgaataaggaggaatgggtagtgtgtagggttttcgaaaagagcacggcagcaaagaaagcacaagaacaacaacctcaatcttctcaaccatcttttggatctccatgcgatgcaaactcatcaatggcaaatgagtttgaagatattgatgagcttccgaatctgaattcaaactcatcaaccatcgattacaataatcatatccatcaatattcgcaacgcaatgtttactcagaagacaacacaacaagtacggctggtctcaacatgaacatgaacatggctagtactaatcttcagtcttggacaacaagtctccttggtccgcctttatctccaatcaactctttgttgctcaaggctttccaaatcaggaactcttatagtttcccaaaagagatgatccccagtttcaatcattcttctcttcaacaaggagtctccaatatgatccaaaatgcttcaagttcgtctcaagtgcaaccccaaccgcaagaggaagcgtttaatatggactccatatggtga

SEQ ID NO: 95822 - protein, 314 aa, Arabidopsis thaliana
  peptide (1)..(314): Ceres Seq. ID no. 12730541
MEENLPPGFRFHPTDEELITHYLCRKVSDIGFTGKAVVDVDLNKCEPWDLPAKASMGEKEWYFFSQRDRKYPTGLRTNRATEAGYWKTTGKDKEIYRSGVLVGMKKTLVFYKGRAPKGEKSNWVMHEYRLESKQPFNPTNKEEWVVCRVFEKSTAAKKAQEQQPQSSQPSFGSPCDANSSMANEFEDIDELPNLNSNSSTIDYNNHIHQYSQRNVYSEDNTTSTAGLNMNMNMASTNLQSWTTSLLGPPLSPINSLLLKAFQIRNSYSFPKEMIPSFNHSSLQQGVSNMIQNASSSSQVQPQPQEEAFNMDSIW

SEQ ID NO: 95823 - protein, 259 aa, Arabidopsis thaliana
  peptide (1)..(259): Ceres Seq. ID no. 12730542
MGEKEWYFFSQRDRKYPTGLRTNRATEAGYWKTTGKDKEIYRSGVLVGMKKTLVFYKGRAPKGEKSNWVMHEYRLESKQPFNPTNKEEWVVCRVFEKSTAAKKAQEQQPQSSQPSFGSPCDANSSMANEFEDIDELPNLNSNSSTIDYNNHIHQYSQRNVYSEDNTTSTAGLNMNMNMASTNLQSWTTSLLGPPLSPINSLLLKAFQIRNSYSFPKEMIPSFNHSSLQQGVSNMIQNASSSSQVQPQPQEEAFNMDSIW

SEQ ID NO: 95824 - protein, 211 aa, Arabidopsis thaliana
  peptide (1)..(211): Ceres Seq. ID no. 12730543
MKKTLVFYKGRAPKGEKSNWVMHEYRLESKQPFNPTNKEEWVVCRVFEKSTAAKKAQEQQPQSSQPSFGSPCDANSSMANEFEDIDELPNLNSNSSTIDYNNHIHQYSQRNVYSEDNTTSTAGLNMNMNMASTNLQSWTTSLLGPPLSPINSLLLKAFQIRNSYSFPKEMIPSFNHSSLQQGVSNMIQNASSSSQVQPQPQEEAFNMDSIW

SEQ ID NO: 95825 - DNA, 942 bp, Arabidopsis thaliana
  misc_feature (1)..(942): Ceres Seq. ID no. 12730576
  misc_feature (1)..(942): Ortholog of  Ceres SEQ ID NO 13595965 as cited in SEQ ID NO 68231
atgtctctcttctttattttattgtgcatctttctgagtacatttctgaagatttgctttgggaattgtttgtacaagccggatgagttggtaattagcgtctttattcaacaaaaatttggattcgttcaattccataatgaggaagatgctgactatgcaattaaggtttttaacatgattaagctctatggggagcctatacgtgttaaaaaggcatctcaagataagaagagcttggatgttggtgctaacctgtttcttggaaaccttgatcctgatgtggatgaaaagatgttgcatgatacttttagcgcgtttggtgtaatttctgatcatcctaagataatgcgagatcccgatactggaaacccacgaggttttggtttcattagctatgactcttttgaagcatctgatgctgctattgaggcaatgactggacaatatctgagtaatcgtcaaataacagtcacttatgcatacaagaaagacaccaaaggagagcgccacggtactcctgaagagaggcttttggctgcaaattcccaaagaagcagaccccataagctattcgcaactggcccttctacgcataatgctcctaaagttaacggtctacaacctgtaccaatcccgggtccacgtccaccaccacaaccacaagtgtatcaaactcagccaccatcttggccatctcagccacaacaacaatacggcttagcggttcgaccacctatgcagttccgtccgcctcaaggtatgcagtcgcaaccaccacctcctcagtttcctcatcaccaacaaggttttggttgtccgaggcagccaccaccatatcaagccatgggaatgcaccaacatggttggccaccgcaacatattcagcaacatggtgggttagtcatattaatattaaataacaaatctttgggagattga

SEQ ID NO: 95826 - protein, 313 aa, Arabidopsis thaliana
  peptide (1)..(313): Ceres Seq. ID no. 12730577
MSLFFILLCIFLSTFLKICFGNCLYKPDELVISVFIQQKFGFVQFHNEEDADYAIKVFNMIKLYGEPIRVKKASQDKKSLDVGANLFLGNLDPDVDEKMLHDTFSAFGVISDHPKIMRDPDTGNPRGFGFISYDSFEASDAAIEAMTGQYLSNRQITVTYAYKKDTKGERHGTPEERLLAANSQRSRPHKLFATGPSTHNAPKVNGLQPVPIPGPRPPPQPQVYQTQPPSWPSQPQQQYGLAVRPPMQFRPPQGMQSQPPPPQFPHHQQGFGCPRQPPPYQAMGMHQHGWPPQHIQQHGGLVILILNNKSLGD

SEQ ID NO: 95827 - protein, 254 aa, Arabidopsis thaliana
  peptide (1)..(254): Ceres Seq. ID no. 12730578
MIKLYGEPIRVKKASQDKKSLDVGANLFLGNLDPDVDEKMLHDTFSAFGVISDHPKIMRDPDTGNPRGFGFISYDSFEASDAAIEAMTGQYLSNRQITVTYAYKKDTKGERHGTPEERLLAANSQRSRPHKLFATGPSTHNAPKVNGLQPVPIPGPRPPPQPQVYQTQPPSWPSQPQQQYGLAVRPPMQFRPPQGMQSQPPPPQFPHHQQGFGCPRQPPPYQAMGMHQHGWPPQHIQQHGGLVILILNNKSLGD

SEQ ID NO: 95828 - protein, 215 aa, Arabidopsis thaliana
  peptide (1)..(215): Ceres Seq. ID no. 12730579
MLHDTFSAFGVISDHPKIMRDPDTGNPRGFGFISYDSFEASDAAIEAMTGQYLSNRQITVTYAYKKDTKGERHGTPEERLLAANSQRSRPHKLFATGPSTHNAPKVNGLQPVPIPGPRPPPQPQVYQTQPPSWPSQPQQQYGLAVRPPMQFRPPQGMQSQPPPPQFPHHQQGFGCPRQPPPYQAMGMHQHGWPPQHIQQHGGLVILILNNKSLGD

SEQ ID NO: 95829 - DNA, 833 bp, Arabidopsis thaliana
  misc_feature (1)..(833): Ceres Seq. ID no. 12730580
  misc_feature (1)..(833): Ortholog of  Ceres SEQ ID NO 13661928 as cited in SEQ ID NO 61155
atttcaaagcaaaacaaaagagagagagtgtatccatttttggaggggaaaacaaagtatgcagcagccctgtgtgatagtgggttcgaagtactgctcaccaaaccctgtaggtttggcgatcgtccgtaaggtgatgaagataacggacggtaacttcgtgataacgagtgcggacggtaagttattgttcaaggtgaaggatcctttgtttagtcttcacggcaagaggatcttgctggattgttctggagctaaggtcttaactttgagagggaagatgatgaccatgcatgacaggtggcaagtgtttagaggagggagtacggaggagggtgctctactatacacggtgaaaagatcgtcgatgattcagctagcccctaaacttgaggtgtttttggctaacaacgtagaggagaagatatgtgatttcaaagtcaaaggggcctggctcgacgactcttgtgttgtctacgccggcgattctgacaccattattgcccacatgtgcggaaagcaaacgatgcgaggctttttcttcggaaaggaccatttctccgtcactgttgataagaacgttgattatgccttcattgcatctctcattgtcatccttgtagaaatagaaaaagctggttttattacgaaaatgacaacacaaatgataataggtttttaggtatcaatttttaaagcactatcatatcgttgtagtaatttaggttgtcaatacaatttggtgtaatgcactagcatcgtttgcttttcgtacatctgcattcaaaccataccaattttatttcaagttttaacaattaataaaacattgg

SEQ ID NO: 95830 - protein, 226 aa, Arabidopsis thaliana
  peptide (1)..(226): Ceres Seq. ID no. 12730581
FQSKTKERECIHFWRGKQSMQQPCVIVGSKYCSPNPVGLAIVRKVMKITDGNFVITSADGKLLFKVKDPLFSLHGKRILLDCSGAKVLTLRGKMMTMHDRWQVFRGGSTEEGALLYTVKRSSMIQLAPKLEVFLANNVEEKICDFKVKGAWLDDSCVVYAGDSDTIIAHMCGKQTMRGFFFGKDHFSVTVDKNVDYAFIASLIVILVEIEKAGFITKMTTQMIIGF

SEQ ID NO: 95831 - protein, 207 aa, Arabidopsis thaliana
  peptide (1)..(207): Ceres Seq. ID no. 12730582
MQQPCVIVGSKYCSPNPVGLAIVRKVMKITDGNFVITSADGKLLFKVKDPLFSLHGKRILLDCSGAKVLTLRGKMMTMHDRWQVFRGGSTEEGALLYTVKRSSMIQLAPKLEVFLANNVEEKICDFKVKGAWLDDSCVVYAGDSDTIIAHMCGKQTMRGFFFGKDHFSVTVDKNVDYAFIASLIVILVEIEKAGFITKMTTQMIIGF

SEQ ID NO: 95832 - protein, 181 aa, Arabidopsis thaliana
  peptide (1)..(181): Ceres Seq. ID no. 12730583
MKITDGNFVITSADGKLLFKVKDPLFSLHGKRILLDCSGAKVLTLRGKMMTMHDRWQVFRGGSTEEGALLYTVKRSSMIQLAPKLEVFLANNVEEKICDFKVKGAWLDDSCVVYAGDSDTIIAHMCGKQTMRGFFFGKDHFSVTVDKNVDYAFIASLIVILVEIEKAGFITKMTTQMIIGF

SEQ ID NO: 95833 - DNA, 671 bp, Arabidopsis thaliana
  misc_feature (1)..(671): Ceres Seq. ID no. 12730584
  misc_feature (1)..(671): Ortholog of  Ceres SEQ ID NO 13663631 as cited in SEQ ID NO 67073
aaagcttggaaatagccattatttcaactaagaaaaatgaaagtcacaagctactctcgaattctaataatcttggcagcacttgtgggtgctcttgttgttcccttgaaggctcaagacagccagcaagactatgtaaatgctcacaaccaggcacgatcgcagataggcgtaggccccatgcagtgggacgaaggacttgcagcctacgctcggaactacgcaaaccaactaaaaggagactgcagactcgtacattcccgtgggccttacggggagaacttggcaaagagtggcggtgacttgtctggtgttgctgccgtgaacttgtgggttaacgagaaggctaactacaactacgatacaaacacgtgcaacggagtttgcggtcactacactcaggtcgtttggagaaattctgtgagactcggatgtgctaaagtgagatgtaacaatggtggaaccatcatcagttgcaattatgatcctccggggaactatgcgaaccagaagccttactgatgtgtgatcatgttacacatatggcatatacacacacatataaaacacggacctgcacaaaggacgtgaatatatatttcaataagaagcatcatatgcaggatgtgtataaatatttattaaaaaatacaaataagttaaaggcctct

SEQ ID NO: 95834 - protein, 161 aa, Arabidopsis thaliana
  peptide (1)..(161): Ceres Seq. ID no. 12730585
MKVTSYSRILIILAALVGALVVPLKAQDSQQDYVNAHNQARSQIGVGPMQWDEGLAAYARNYANQLKGDCRLVHSRGPYGENLAKSGGDLSGVAAVNLWVNEKANYNYDTNTCNGVCGHYTQVVWRNSVRLGCAKVRCNNGGTIISCNYDPPGNYANQKPY

SEQ ID NO: 95835 - protein, 113 aa, Arabidopsis thaliana
  peptide (1)..(113): Ceres Seq. ID no. 12730586
MQWDEGLAAYARNYANQLKGDCRLVHSRGPYGENLAKSGGDLSGVAAVNLWVNEKANYNYDTNTCNGVCGHYTQVVWRNSVRLGCAKVRCNNGGTIISCNYDPPGNYANQKPY

SEQ ID NO: 95836 - protein, 99 aa, Arabidopsis thaliana
  peptide (1)..(99): Ceres Seq. ID no. 12730587
SLEIAIISTKKNESHKLLSNSNNLGSTCGCSCCSLEGSRQPARLCKCSQPGTIADRRRPHAVGRRTCSLRSELRKPTKRRLQTRTFPWALRGELGKEWR

SEQ ID NO: 95837 - DNA, 760 bp, Arabidopsis thaliana
  misc_feature (1)..(760): Ceres Seq. ID no. 12730588
  misc_feature (1)..(760): Ortholog of  Ceres SEQ ID NO 13663631 as cited in SEQ ID NO 67073
ataacacaacaataaccattatcaacttagaaaaatgaattttactggctattctcgatttttaatcgtctttgtagctcttgtaggtgctcttgttcttccctcgaaagctcaagatagcccacaagattatctaagggttcacaaccaggcacgaggagcggtaggcgtaggtcccatgcagtgggacgagagggttgcagcctatgctcggagctacgcagaacaactaagaggcaactgcagactcatacactctggtgggccttacggggaaaacttagcctggggtagcggtgacttgtctggcgtctccgccgtgaacatgtgggttagcgagaaggctaactacaactacgctgcgaacacgtgcaatggagtttgtggtcactacactcaagttgtttggagaaagtcagtgagactcggatgtgccaaagtgaggtgtaacaatggtggaaccataatcagttgcaactatgatcctcgtgggaattatgtgaacgagaagccatactaatgaagtaatgatgtgatcatgcatacacacgtacataaaggacgtgtatatgtatcagtatttcaataaggagcatcatatgcaggatgtatcaatatttatcaaataatacaaataagagctgagattacgagaatctatttaaattaaaagttacatacttaattattatagttatatatgtaaaatatgtggcctttttaaaagttacataattaattattatagttaatgtctttc

SEQ ID NO: 95838 - protein, 161 aa, Arabidopsis thaliana
  peptide (1)..(161): Ceres Seq. ID no. 12730589
MNFTGYSRFLIVFVALVGALVLPSKAQDSPQDYLRVHNQARGAVGVGPMQWDERVAAYARSYAEQLRGNCRLIHSGGPYGENLAWGSGDLSGVSAVNMWVSEKANYNYAANTCNGVCGHYTQVVWRKSVRLGCAKVRCNNGGTIISCNYDPRGNYVNEKPY

SEQ ID NO: 95839 - protein, 113 aa, Arabidopsis thaliana
  peptide (1)..(113): Ceres Seq. ID no. 12730590
MQWDERVAAYARSYAEQLRGNCRLIHSGGPYGENLAWGSGDLSGVSAVNMWVSEKANYNYAANTCNGVCGHYTQVVWRKSVRLGCAKVRCNNGGTIISCNYDPRGNYVNEKPY

SEQ ID NO: 95840 - DNA, 1479 bp, Arabidopsis thaliana
  misc_feature (1)..(1479): Ceres Seq. ID no. 12730595
  misc_feature (1)..(1479): Ortholog of  Ceres SEQ ID NO 15177258 as cited in SEQ ID NO 51386
atgagtgacctccaagcaaaaaacgatgtggtagctgtagatagacagtcttcctcgtcgttggcggatcttgatggaccatctccgctgagaaagatgatatcagtggcttctattgccgccggtattcagttcggttgggctcttcagctgtctctgctaactccatacgtgcagcttcttggagtcccacacaaatggtcatctttcatatggctatgtggtcctgtctctggtcttcttgtccagccatccgtcggttacttcagcgaccgatgcacgtcaagattcggacgtcgtcgtcctttcatcgccacaggcgccttgcttgtagctgttgctgttgtactaatcggatacgcagctgattttggccacagcatgggagacaaaatcgacaaacctgtcaagatgcgagccgttgttatcttcgctctcggtttctggatccttgacgtggctaacaacactctccaaggaccttgtcgcgctttcctcggtgatttagccgctggagacgctaagaaaacgcgaacagcaaacgcgtttttctctttcttcatggctgttgggaacgttttgggatacgcggcaggatcatacactaacctctacaagatcttccctttcacaatgactaaagcatgtgacatatattgcgcaaatctcaagagttgtttcttcctttccatcactctcctcctagtcgtcacaatcatagctctttggtacgtggaagacaagcaatggtcgcctaaagcagactcggacaacgagaaaactccgttctttggtgagatctttggagctttcaaggtgatgaaacgtccaatgtggatgctattaatcgtcacggccttgaactggatcgcatggttcccttttcttttatacgataccgattggatgggtcgtgaagtgtacggtggagactcaaaaggagatgacaaaatgaagaaactatacaaccaagggattcacgttggtgcgttgggattgatgcttaactctatcgttcttggaatcgtctcacttggtattgaaggtattagcaagaaaataggtggagctaaaaggctttggggagctgtgaatatcatccttgctgtgtgtttggcaatgacggttttggttactaaaaaggcggaggagcaccggagaatcgctggtccgatggcccttcctaccgatggcatcagagctggagcattgactctctttgctcttcttggaattcctcttgctattacattcagtattccgtttgcactagcttccataatctcaagtagttccggcgccggtcaaggactgtctctaggagttttaaacatggcaatagtgataccacaaatgattgtatcgtttggagttggtcctattgatgcgctttttggaggtggaaacttaccaagatttgtggtcggagctattgcagcggcaattagcagtgttgtggcatttaccgtgttaccttaa

SEQ ID NO: 95841 - protein, 492 aa, Arabidopsis thaliana
  peptide (1)..(492): Ceres Seq. ID no. 12730596
MSDLQAKNDVVAVDRQSSSSLADLDGPSPLRKMISVASIAAGIQFGWALQLSLLTPYVQLLGVPHKWSSFIWLCGPVSGLLVQPSVGYFSDRCTSRFGRRRPFIATGALLVAVAVVLIGYAADFGHSMGDKIDKPVKMRAVVIFALGFWILDVANNTLQGPCRAFLGDLAAGDAKKTRTANAFFSFFMAVGNVLGYAAGSYTNLYKIFPFTMTKACDIYCANLKSCFFLSITLLLVVTIIALWYVEDKQWSPKADSDNEKTPFFGEIFGAFKVMKRPMWMLLIVTALNWIAWFPFLLYDTDWMGREVYGGDSKGDDKMKKLYNQGIHVGALGLMLNSIVLGIVSLGIEGISKKIGGAKRLWGAVNIILAVCLAMTVLVTKKAEEHRRIAGPMALPTDGIRAGALTLFALLGIPLAITFSIPFALASIISSSSGAGQGLSLGVLNMAIVIPQMIVSFGVGPIDALFGGGNLPRFVVGAIAAAISSVVAFTVLP

SEQ ID NO: 95842 - protein, 460 aa, Arabidopsis thaliana
  peptide (1)..(460): Ceres Seq. ID no. 12730597
MISVASIAAGIQFGWALQLSLLTPYVQLLGVPHKWSSFIWLCGPVSGLLVQPSVGYFSDRCTSRFGRRRPFIATGALLVAVAVVLIGYAADFGHSMGDKIDKPVKMRAVVIFALGFWILDVANNTLQGPCRAFLGDLAAGDAKKTRTANAFFSFFMAVGNVLGYAAGSYTNLYKIFPFTMTKACDIYCANLKSCFFLSITLLLVVTIIALWYVEDKQWSPKADSDNEKTPFFGEIFGAFKVMKRPMWMLLIVTALNWIAWFPFLLYDTDWMGREVYGGDSKGDDKMKKLYNQGIHVGALGLMLNSIVLGIVSLGIEGISKKIGGAKRLWGAVNIILAVCLAMTVLVTKKAEEHRRIAGPMALPTDGIRAGALTLFALLGIPLAITFSIPFALASIISSSSGAGQGLSLGVLNMAIVIPQMIVSFGVGPIDALFGGGNLPRFVVGAIAAAISSVVAFTVLP

SEQ ID NO: 95843 - protein, 365 aa, Arabidopsis thaliana
  peptide (1)..(365): Ceres Seq. ID no. 12730598
MGDKIDKPVKMRAVVIFALGFWILDVANNTLQGPCRAFLGDLAAGDAKKTRTANAFFSFFMAVGNVLGYAAGSYTNLYKIFPFTMTKACDIYCANLKSCFFLSITLLLVVTIIALWYVEDKQWSPKADSDNEKTPFFGEIFGAFKVMKRPMWMLLIVTALNWIAWFPFLLYDTDWMGREVYGGDSKGDDKMKKLYNQGIHVGALGLMLNSIVLGIVSLGIEGISKKIGGAKRLWGAVNIILAVCLAMTVLVTKKAEEHRRIAGPMALPTDGIRAGALTLFALLGIPLAITFSIPFALASIISSSSGAGQGLSLGVLNMAIVIPQMIVSFGVGPIDALFGGGNLPRFVVGAIAAAISSVVAFTVLP

SEQ ID NO: 95844 - DNA, 1002 bp, Arabidopsis thaliana
  misc_feature (1)..(1002): Ceres Seq. ID no. 12730621
  misc_feature (1)..(1002): Ortholog of  Ceres SEQ ID NO 12614972 as cited in SEQ ID NO 61986
  misc_feature (1)..(1002): Ortholog of  Ceres SEQ ID NO 14302317 as cited in SEQ ID NO 63244
  misc_feature (1)..(1002): Ortholog of  Ceres SEQ ID NO 12625706 as cited in SEQ ID NO 64144
  misc_feature (1)..(1002): Ortholog of  Ceres SEQ ID NO 13584933 as cited in SEQ ID NO 65009
  misc_feature (1)..(1002): Ortholog of  Ceres SEQ ID NO 12634984 as cited in SEQ ID NO 0
  misc_feature (1)..(1002): Ortholog of  Ceres SEQ ID NO 13599377 as cited in SEQ ID NO 0
atggatgaaaaagatagaccaaagaacttgagggaagaagaagaaaaaccgagtgaagaaaccaaaattctgatatcttcacttccttgggagatagattaccttgggaacaagctgttcaactacgaaggatattggtacagcgaagacattctccaatcaatccccaatatacacactggttttcagccacaagaaactgatataattcttgcttctttctacaaatcgggcacgacttggctcaaggcactcacatttgcactcgttcaacgatctaaacactctttggaagatcatcaacatcctttgctacatcataatcctcatgagatagtgcccaatcttgagctagatctgtatcttaaaagctcaaaaccggacttgaccaagttcttatcatcatcatcatcatctccaagattgttctcaactcacatgtcgctggacccgcttcaagtacccttgaaggagaacctttgcaagatcgtgtacgtttgcaggaacgtgaaagacgtgatggtgtcagtttggtattttaggcaaagcaaaaagatcactcgagcggaggattactctttggaggctatatttgagtcattctgcaacggagttaccctacacggtcccttttgggaccatgcactgagctattggcgaggcagcttggaagatcccaagcattttcttttcatgaggtacgaggatttgaaagcggagcctcgtactcaggtcaagagacttgcagagttcttggattgtccattcactaaggaagaggaagatagcggatctgtagacaagatcttggaactttgctctttaagtaatctaagaagtgtggagatcaacaaaaccagaacgtcgagtagagtggatttcaagagttatttccgtaaaggacaagttggtgactggaagagttatatgacccctgaaatggtagacaaaattgatatgattatagaggaaaaactcaaaggttccggtttgaaattctaa

SEQ ID NO: 95845 - protein, 333 aa, Arabidopsis thaliana
  peptide (1)..(333): Ceres Seq. ID no. 12730622
MDEKDRPKNLREEEEKPSEETKILISSLPWEIDYLGNKLFNYEGYWYSEDILQSIPNIHTGFQPQETDIILASFYKSGTTWLKALTFALVQRSKHSLEDHQHPLLHHNPHEIVPNLELDLYLKSSKPDLTKFLSSSSSSPRLFSTHMSLDPLQVPLKENLCKIVYVCRNVKDVMVSVWYFRQSKKITRAEDYSLEAIFESFCNGVTLHGPFWDHALSYWRGSLEDPKHFLFMRYEDLKAEPRTQVKRLAEFLDCPFTKEEEDSGSVDKILELCSLSNLRSVEINKTRTSSRVDFKSYFRKGQVGDWKSYMTPEMVDKIDMIIEEKLKGSGLKF

SEQ ID NO: 95846 - protein, 187 aa, Arabidopsis thaliana
  peptide (1)..(187): Ceres Seq. ID no. 12730623
MSLDPLQVPLKENLCKIVYVCRNVKDVMVSVWYFRQSKKITRAEDYSLEAIFESFCNGVTLHGPFWDHALSYWRGSLEDPKHFLFMRYEDLKAEPRTQVKRLAEFLDCPFTKEEEDSGSVDKILELCSLSNLRSVEINKTRTSSRVDFKSYFRKGQVGDWKSYMTPEMVDKIDMIIEEKLKGSGLKF

SEQ ID NO: 95847 - DNA, 602 bp, Arabidopsis thaliana
  misc_feature (1)..(602): Ceres Seq. ID no. 12730632
  misc_feature (1)..(602): Ortholog of  Ceres SEQ ID NO 15179051 as cited in SEQ ID NO 0
aaatatacactttgttatcaaattacaagtaatcaatcaaaagatggaaggcaaaactgtgatattcagtgtactcgtaatgggtctggtcatctcgcaaattcaagtagaagcacaaaaaacttgctgcccgagccagtcaactaggaaggagtttgaagattgcatttcagaaggaaatttgcagatactttgttcagctgaaagtggatgccgagacacttacgtgggttattgcccttcgggttttccttacgggagtctcacaaactctggtgatgttgtcaatgtatattgtaagttggggtgtgtatcctctctgtgtggtgccttaacgagtctccaaaaacttgacacaagtggaaaagtgaatgtcgcggttgaacgatgtaccaaggcatgttctactatatgcactaaaggatctaaaaccgcagttgaaactgtgtaaaaaagcagtcaagcataaacaagtaaaggggtggtcatgatcactaaaagtgtaaaagtgttgttttcatacaataattgtcgtgtatgtgtcaaacgtgctagactatggtgctagtactgtttaataaattgtttccggtttttttacg

SEQ ID NO: 95848 - protein, 149 aa, Arabidopsis thaliana
  peptide (1)..(149): Ceres Seq. ID no. 12730633
NIHFVIKLQVINQKMEGKTVIFSVLVMGLVISQIQVEAQKTCCPSQSTRKEFEDCISEGNLQILCSAESGCRDTYVGYCPSGFPYGSLTNSGDVVNVYCKLGCVSSLCGALTSLQKLDTSGKVNVAVERCTKACSTICTKGSKTAVETV

SEQ ID NO: 95849 - protein, 135 aa, Arabidopsis thaliana
  peptide (1)..(135): Ceres Seq. ID no. 12730634
MEGKTVIFSVLVMGLVISQIQVEAQKTCCPSQSTRKEFEDCISEGNLQILCSAESGCRDTYVGYCPSGFPYGSLTNSGDVVNVYCKLGCVSSLCGALTSLQKLDTSGKVNVAVERCTKACSTICTKGSKTAVETV

SEQ ID NO: 95850 - protein, 123 aa, Arabidopsis thaliana
  peptide (1)..(123): Ceres Seq. ID no. 12730635
MGLVISQIQVEAQKTCCPSQSTRKEFEDCISEGNLQILCSAESGCRDTYVGYCPSGFPYGSLTNSGDVVNVYCKLGCVSSLCGALTSLQKLDTSGKVNVAVERCTKACSTICTKGSKTAVETV

SEQ ID NO: 95851 - DNA, 372 bp, Arabidopsis thaliana
  misc_feature (1)..(372): Ceres Seq. ID no. 12730640
  misc_feature (1)..(372): Ortholog of  Ceres SEQ ID NO 15174406 as cited in SEQ ID NO 0
atggctggtcttatgaagttaggatgcttggtctttgtcttcgtgattgcggccggtccaatcacagcaaaggcggctctgagctgtggcgaagttaacagcaatttgaaaccgtgcactggctacttgaccaatggtggtatcactagcccaggcccacagtgctgcaatggtgttagaaagcttaacggcatggtccttacaaccctagaccgtcggcaagcatgtcgttgcattaaaaatgccgctagaaacgtcggccctggtctcaacgctgaccgtgctgctgggattcctaggagatgcggaatcaaaataccttacagtacccaaatcaggttcaacaccaagtgcaacacgtacatatgttaa

SEQ ID NO: 95852 - protein, 123 aa, Arabidopsis thaliana
  peptide (1)..(123): Ceres Seq. ID no. 12730641
MAGLMKLGCLVFVFVIAAGPITAKAALSCGEVNSNLKPCTGYLTNGGITSPGPQCCNGVRKLNGMVLTTLDRRQACRCIKNAARNVGPGLNADRAAGIPRRCGIKIPYSTQIRFNTKCNTYIC

SEQ ID NO: 95853 - protein, 119 aa, Arabidopsis thaliana
  peptide (1)..(119): Ceres Seq. ID no. 12730642
MKLGCLVFVFVIAAGPITAKAALSCGEVNSNLKPCTGYLTNGGITSPGPQCCNGVRKLNGMVLTTLDRRQACRCIKNAARNVGPGLNADRAAGIPRRCGIKIPYSTQIRFNTKCNTYIC

SEQ ID NO: 95854 - DNA, 2235 bp, Arabidopsis thaliana
  misc_feature (1)..(2235): Ceres Seq. ID no. 12730669
  misc_feature (1)..(2235): Ortholog of  Ceres SEQ ID NO 15168900 as cited in SEQ ID NO 217
atgacttccaacagaagcaacctcttcctccatcttctccttcttcatcttcctactcttatccaagctcttaacacagatggtgttgctttactctctttcaagtattccatcctcaatgatcctctcttagttctacgaaactggaactacgacgatgaaacaccgtgctcttggaccggtgttacatgcacagagcttgggattcccaacacccctgacatgtttagagttacaagtttggttcttcccaacaaacagcttcttggttctgtttctcccgacttgttttcaatcctacatctaagaatcttggatctctccgacaatttcttccatggatcactgccggattctgtgtccaacgccagtgagcttcgtattctgtcccttggtaacaacaaggtttctggtgaactaccccgtagtatcagcaacgtggctagtctgcagctcttgaatctctctgccaacgccttgaccggaaaaatccctcccaatctctcacttcccaagaatctgacagtcatttccttggcgaagaattcattttcaggcgatattccaagcgggtttgaagcagtacaggttctagatatctcctcaaatcttctagacggatctcttcctccagatttcagaggaacaagtctcctttacctcaacttatcaaacaatcaaatctccggcatgatttctccacctttcgccgaaaaatttccagcaagcgccatcattgatctctccttcaacaatctaacaggaccaatccctaacacaccaccattgcttaaccaaaagaccgagtctttttctggtaacataggcttatgtggtcagccattaaagaccctttgttcaatcccttctactctatcagacccaccaaatatctctgaaactacttcacctgcaatagcagtcatgcccacaactccaacaccaacaaactcttcaacagaatcaacaaatcaaacagccaaaagcaaactaaaaccaagcacaatcatcggcattacacttgcagatatagctggtcttgctatcatagccatgttcatcctctacatataccagctcaagaaacgtagaagctaccaagaatacagcactttcaacgtcttacaaaaatgtctggagaaaaacgatacattatccgtcaagaaatcgaaacacaacgtcgccgacgccttggagttcacgaaatctccgcctgcaaaaatgggatgcggttcatggataagcagaaggtacgaagaaacaacgtcggtgtcatccgagagtgacatagagaaccaaaaacccgttgaggcatttgatcgaacaggtggtgggcgagtaaaacacaatactgaaactcaactagtgacagtggatggagaaactcagctggagctagatactctactaaaggcatcagcttacgtacttggaaccaacagaagcgacggaattgtgtataaagcggtgttagagaacggtgcggcttttgcagtgcggcggattggggcggagagttgtccggcggcgaaatttaaggaattcgaaaaggaggttcagggtatcgctaaacttcgtcacccaaatctcgttagggttcgtggcttcgtttgggggaaagaagagaagcttctcatctccgactatgtcccaaatggaaacctacctctatcctccatctccgcaaaatcaagctcgttttctcataaacctctctcctttgaggcacggctcaagttagcaagaggaatagctagaggaattgcttatatccacgacaagaagcatgtgcacggcaacatcaaggccaataacattctcttggactccgagtttgagcctgtaattacagatatgggccttgatcgtattatgacttcggcccatttactcacggacgggccattgtcgagcttacaagaccaaccaccagagtggtcgacaagccagaagccaaaccccaaatgggatgtatattcatttggtgttatactcttggaacttctcacaggcatagttttttcggtcgatcgagatttggttcgcgattctgagactgatgagaaaagttggttcttgaagttggtcgatggggaaattagggttgaggtggctcaccgcgaggatgaggcggtcgcatgcttgaagttaggctatgaatgtgtctcctccttgcctcaaaagcgaccgtctatgaaggaagtggtgcaagtgctagagaaaatgtttgtttag

SEQ ID NO: 95855 - protein, 744 aa, Arabidopsis thaliana
  peptide (1)..(744): Ceres Seq. ID no. 12730670
MTSNRSNLFLHLLLLHLPTLIQALNTDGVALLSFKYSILNDPLLVLRNWNYDDETPCSWTGVTCTELGIPNTPDMFRVTSLVLPNKQLLGSVSPDLFSILHLRILDLSDNFFHGSLPDSVSNASELRILSLGNNKVSGELPRSISNVASLQLLNLSANALTGKIPPNLSLPKNLTVISLAKNSFSGDIPSGFEAVQVLDISSNLLDGSLPPDFRGTSLLYLNLSNNQISGMISPPFAEKFPASAIIDLSFNNLTGPIPNTPPLLNQKTESFSGNIGLCGQPLKTLCSIPSTLSDPPNISETTSPAIAVMPTTPTPTNSSTESTNQTAKSKLKPSTIIGITLADIAGLAIIAMFILYIYQLKKRRSYQEYSTFNVLQKCLEKNDTLSVKKSKHNVADALEFTKSPPAKMGCGSWISRRYEETTSVSSESDIENQKPVEAFDRTGGGRVKHNTETQLVTVDGETQLELDTLLKASAYVLGTNRSDGIVYKAVLENGAAFAVRRIGAESCPAAKFKEFEKEVQGIAKLRHPNLVRVRGFVWGKEEKLLISDYVPNGNLPLSSISAKSSSFSHKPLSFEARLKLARGIARGIAYIHDKKHVHGNIKANNILLDSEFEPVITDMGLDRIMTSAHLLTDGPLSSLQDQPPEWSTSQKPNPKWDVYSFGVILLELLTGIVFSVDRDLVRDSETDEKSWFLKLVDGEIRVEVAHREDEAVACLKLGYECVSSLPQKRPSMKEVVQVLEKMFV

SEQ ID NO: 95856 - protein, 670 aa, Arabidopsis thaliana
  peptide (1)..(670): Ceres Seq. ID no. 12730671
MFRVTSLVLPNKQLLGSVSPDLFSILHLRILDLSDNFFHGSLPDSVSNASELRILSLGNNKVSGELPRSISNVASLQLLNLSANALTGKIPPNLSLPKNLTVISLAKNSFSGDIPSGFEAVQVLDISSNLLDGSLPPDFRGTSLLYLNLSNNQISGMISPPFAEKFPASAIIDLSFNNLTGPIPNTPPLLNQKTESFSGNIGLCGQPLKTLCSIPSTLSDPPNISETTSPAIAVMPTTPTPTNSSTESTNQTAKSKLKPSTIIGITLADIAGLAIIAMFILYIYQLKKRRSYQEYSTFNVLQKCLEKNDTLSVKKSKHNVADALEFTKSPPAKMGCGSWISRRYEETTSVSSESDIENQKPVEAFDRTGGGRVKHNTETQLVTVDGETQLELDTLLKASAYVLGTNRSDGIVYKAVLENGAAFAVRRIGAESCPAAKFKEFEKEVQGIAKLRHPNLVRVRGFVWGKEEKLLISDYVPNGNLPLSSISAKSSSFSHKPLSFEARLKLARGIARGIAYIHDKKHVHGNIKANNILLDSEFEPVITDMGLDRIMTSAHLLTDGPLSSLQDQPPEWSTSQKPNPKWDVYSFGVILLELLTGIVFSVDRDLVRDSETDEKSWFLKLVDGEIRVEVAHREDEAVACLKLGYECVSSLPQKRPSMKEVVQVLEKMFV

SEQ ID NO: 95857 - protein, 514 aa, Arabidopsis thaliana
  peptide (1)..(514): Ceres Seq. ID no. 12730672
MISPPFAEKFPASAIIDLSFNNLTGPIPNTPPLLNQKTESFSGNIGLCGQPLKTLCSIPSTLSDPPNISETTSPAIAVMPTTPTPTNSSTESTNQTAKSKLKPSTIIGITLADIAGLAIIAMFILYIYQLKKRRSYQEYSTFNVLQKCLEKNDTLSVKKSKHNVADALEFTKSPPAKMGCGSWISRRYEETTSVSSESDIENQKPVEAFDRTGGGRVKHNTETQLVTVDGETQLELDTLLKASAYVLGTNRSDGIVYKAVLENGAAFAVRRIGAESCPAAKFKEFEKEVQGIAKLRHPNLVRVRGFVWGKEEKLLISDYVPNGNLPLSSISAKSSSFSHKPLSFEARLKLARGIARGIAYIHDKKHVHGNIKANNILLDSEFEPVITDMGLDRIMTSAHLLTDGPLSSLQDQPPEWSTSQKPNPKWDVYSFGVILLELLTGIVFSVDRDLVRDSETDEKSWFLKLVDGEIRVEVAHREDEAVACLKLGYECVSSLPQKRPSMKEVVQVLEKMFV

SEQ ID NO: 95858 - DNA, 1087 bp, Arabidopsis thaliana
  misc_feature (1)..(1087): Ceres Seq. ID no. 12730673
  misc_feature (1)..(1087): Ortholog of  Ceres SEQ ID NO 13589868 as cited in SEQ ID NO 55521
  misc_feature (1)..(1087): Ortholog of  Ceres SEQ ID NO 12617659 as cited in SEQ ID NO 65286
  misc_feature (1)..(1087): Ortholog of  Ceres SEQ ID NO 12780566 as cited in SEQ ID NO 65822
aatctgcaaatcaaactttcagttattttttcttttctctcatgtgtgtaaaatactcttcatagatctcatataagtccaagcttgaattgaaatatcagaagctgtgtttctttcactgtatctaagatccttgtttttgttttttgttctacatgggagccagattttcacgtatagcgaaaaggtttcttcctaaaagtaaagtaaggattttgatggttggtcttgatggttcagggaagactaccatcctttacaagttgaagcttggagaagttgtcacaacagtgcctactattggtttcaacctcgagacagtagaatacaaaggcatcaatttcactgtatgggatataggaggacaagagaagattcgcaaattgtggagacactatttccagaacgcgcaggggctcatctttgtagtggacagcagcgatagtgaaaggttatcagaagctcgaaacgagctgcatcgcatactaaccgataatgaactagaaggtgcatgtgtacttgtctttgcgaacaagcaagattcgagaaatgctttacctgtagccgaggttgccaacaaacttggtctacacagcctatccaaacgttgttggcttatacaaggaacctcagctatctctgggcaaggattatacgaaggacttgagtggctatcgacaacaatccccaacaaacccgaacggtctacttcggttagtagtttccggagtgattcctatgagaggaagctggtccgaggtccgaggtattaaaaggctttaaatggttactccaacgtaaaaaacagaacgcaccagaaagggcaagtgtatttttgtactagcttgtttggtatacgctctgattcgtacgagcaaccaaaatagctctcttctgcgttctatatttgtatgattatgttgttttgttttcaatgtttctcattgagaaccatatttgactattactcatattatggtgtgaataaggttttctagggtatatatctttacgagtttacgtacaccctttacatgatgaatattttctcgttcttactttagaatttaacatattttattttatt

SEQ ID NO: 95859 - protein, 205 aa, Arabidopsis thaliana
  peptide (1)..(205): Ceres Seq. ID no. 12730674
MGARFSRIAKRFLPKSKVRILMVGLDGSGKTTILYKLKLGEVVTTVPTIGFNLETVEYKGINFTVWDIGGQEKIRKLWRHYFQNAQGLIFVVDSSDSERLSEARNELHRILTDNELEGACVLVFANKQDSRNALPVAEVANKLGLHSLSKRCWLIQGTSAISGQGLYEGLEWLSTTIPNKPERSTSVSSFRSDSYERKLVRGPRY

SEQ ID NO: 95860 - protein, 184 aa, Arabidopsis thaliana
  peptide (1)..(184): Ceres Seq. ID no. 12730675
MVGLDGSGKTTILYKLKLGEVVTTVPTIGFNLETVEYKGINFTVWDIGGQEKIRKLWRHYFQNAQGLIFVVDSSDSERLSEARNELHRILTDNELEGACVLVFANKQDSRNALPVAEVANKLGLHSLSKRCWLIQGTSAISGQGLYEGLEWLSTTIPNKPERSTSVSSFRSDSYERKLVRGPRY

SEQ ID NO: 95861 - DNA, 1542 bp, Arabidopsis thaliana
  misc_feature (1)..(1542): Ceres Seq. ID no. 12730756
  misc_feature (1)..(1542): Ortholog of  Ceres SEQ ID NO 13594213 as cited in SEQ ID NO 57038
  misc_feature (1)..(1542): Ortholog of  Ceres SEQ ID NO 13654989 as cited in SEQ ID NO 63117
  misc_feature (1)..(1542): Ortholog of  Ceres SEQ ID NO 13584744 as cited in SEQ ID NO 69137
aaacaagaagaagaaaagaaacacaaaatcaacaacaatggcggtgaagaagaaagtttcatggagatcactaatcgttggatgtttaggagatccagaaaccctaatggcatcttcaaagaaacctaaaagaaaaaatgacgtcatcaagaaacagagctcttttcaaagactatcgatacttgatatgagcaatccaagttccaacactttgtcagaagatctatcgatttctttggccggatcagatcttcatgtgtttaccctagcggagcttaaagtcattacacaaagcttttcatcgaccaattttctaggtgaaggtgggtttggtcctgttcataagggtttcattgatgataagctacgtcctggtcttaaagctcagcctgttgctgttaaattgcttgatcttgaaggtcttcaaggtcaccgtgaatggctgacggaagttatgtttttgggacaattgaagcacaaaaatttggtgaaattgattggttattgttgtgaggaagaacatagaactcttgtttatgagttcatgcctcgtggaagcttagagaatcaacttttcagaagatactctgcctcgcttccatggtcaacaagaatgaagatcgctcatggagctgcaacaggacttcaatttctacacgaagctgaaaatcctgttatctatcgggatttcaaagcctccaatatcttgttagattccgattacacggcgaaactctctgacttcgggttagccaaagacggaccagaaggagacgacactcatgtgtcaactcgagtgatgggcacacaaggctacgcagctcctgaatacatcatgaccggtcatttaacagcaagaagtgacgtatacagctttggagttgtgttgctagagcttttgaccggacggagatcagtagacaaaaagagatcatcgagggaacaaaaccttgtggactgggctcgtccaatgctcaatgacccacgtaaactatctcgaatcatggacccgagacttgaaggtcagtactcagagacaggagcaagaaaagcagcaacattggcttaccaatgcttaagccatcgacccaagaaccggccatgtatgagtgccgtcgtctctatactcaatgatcttaaagactataatgatattcctatggggactttcacttacacggtgccaaacactccggacaataaagaagatgatggtcgtgttggtaataagccacgtaagagtagtcatcatcatcatcatcaacaacaacaaagtaatcatccccggtcgtctccatctccgacaaccaagtctccatctcccacggccaagtcgccgaggaattcaacggaaaatcaccggagaacgttgagaaatggagtgaattcgccgttgagaagtgaggcaggtggggaacggtactaagtttttctagtcacaccaactcttaaaattcattttttttcctttaatctaatgtaaataattcatacgtttgtcttttcgtaatgtaagaatatataattatatttttttttgtg

SEQ ID NO: 95862 - protein, 474 aa, Arabidopsis thaliana
  peptide (1)..(474): Ceres Seq. ID no. 12730757
NKKKKRNTKSTTMAVKKKVSWRSLIVGCLGDPETLMASSKKPKRKNDVIKKQSSFQRLSILDMSNPSSNTLSEDLSISLAGSDLHVFTLAELKVITQSFSSTNFLGEGGFGPVHKGFIDDKLRPGLKAQPVAVKLLDLEGLQGHREWLTEVMFLGQLKHKNLVKLIGYCCEEEHRTLVYEFMPRGSLENQLFRRYSASLPWSTRMKIAHGAATGLQFLHEAENPVIYRDFKASNILLDSDYTAKLSDFGLAKDGPEGDDTHVSTRVMGTQGYAAPEYIMTGHLTARSDVYSFGVVLLELLTGRRSVDKKRSSREQNLVDWARPMLNDPRKLSRIMDPRLEGQYSETGARKAATLAYQCLSHRPKNRPCMSAVVSILNDLKDYNDIPMGTFTYTVPNTPDNKEDDGRVGNKPRKSSHHHHHQQQQSNHPRSSPSPTTKSPSPTAKSPRNSTENHRRTLRNGVNSPLRSEAGGERY

SEQ ID NO: 95863 - protein, 462 aa, Arabidopsis thaliana
  peptide (1)..(462): Ceres Seq. ID no. 12730758
MAVKKKVSWRSLIVGCLGDPETLMASSKKPKRKNDVIKKQSSFQRLSILDMSNPSSNTLSEDLSISLAGSDLHVFTLAELKVITQSFSSTNFLGEGGFGPVHKGFIDDKLRPGLKAQPVAVKLLDLEGLQGHREWLTEVMFLGQLKHKNLVKLIGYCCEEEHRTLVYEFMPRGSLENQLFRRYSASLPWSTRMKIAHGAATGLQFLHEAENPVIYRDFKASNILLDSDYTAKLSDFGLAKDGPEGDDTHVSTRVMGTQGYAAPEYIMTGHLTARSDVYSFGVVLLELLTGRRSVDKKRSSREQNLVDWARPMLNDPRKLSRIMDPRLEGQYSETGARKAATLAYQCLSHRPKNRPCMSAVVSILNDLKDYNDIPMGTFTYTVPNTPDNKEDDGRVGNKPRKSSHHHHHQQQQSNHPRSSPSPTTKSPSPTAKSPRNSTENHRRTLRNGVNSPLRSEAGGERY

SEQ ID NO: 95864 - protein, 439 aa, Arabidopsis thaliana
  peptide (1)..(439): Ceres Seq. ID no. 12730759
MASSKKPKRKNDVIKKQSSFQRLSILDMSNPSSNTLSEDLSISLAGSDLHVFTLAELKVITQSFSSTNFLGEGGFGPVHKGFIDDKLRPGLKAQPVAVKLLDLEGLQGHREWLTEVMFLGQLKHKNLVKLIGYCCEEEHRTLVYEFMPRGSLENQLFRRYSASLPWSTRMKIAHGAATGLQFLHEAENPVIYRDFKASNILLDSDYTAKLSDFGLAKDGPEGDDTHVSTRVMGTQGYAAPEYIMTGHLTARSDVYSFGVVLLELLTGRRSVDKKRSSREQNLVDWARPMLNDPRKLSRIMDPRLEGQYSETGARKAATLAYQCLSHRPKNRPCMSAVVSILNDLKDYNDIPMGTFTYTVPNTPDNKEDDGRVGNKPRKSSHHHHHQQQQSNHPRSSPSPTTKSPSPTAKSPRNSTENHRRTLRNGVNSPLRSEAGGERY

SEQ ID NO: 95865 - DNA, 1176 bp, Arabidopsis thaliana
  misc_feature (1)..(1176): Ceres Seq. ID no. 12730771
  misc_feature (1)..(1176): Ortholog of  Ceres SEQ ID NO 13662937 as cited in SEQ ID NO 64415
  misc_feature (1)..(1176): Ortholog of  Ceres SEQ ID NO 13595984 as cited in SEQ ID NO 68340
  misc_feature (1)..(1176): Ortholog of  Ceres SEQ ID NO 12635014 as cited in SEQ ID NO 0
atgacggcggcacaagggaactctaacgagactctgttttcttcttacaagatgggaagattcgatctctctcatcgagtggttctggcgccgatgacgcggtgcagggcgttgaacggagtaccaaacgcggcgttggcagagtattatgctcaacggaccactcccggcggttttctcatctccgaaggcaccatggtctctcccggatccgcagggttcccacatgtgcctggaatctattcagatgaacaagtagaagcatggaagcaagttgtggaagcagttcacgctaagggaggtttcatcttttgtcaattatggcatgttggacgtgcttctcatgcagtgtatcaacctaatggaggatcaccaatatcgtcaacgaacaaaccaatctcggaaaacaggtggcgagttttgttgcccgatggttcccacgtgaagtacccgaaacctcgggctttagaagcttccgagatacctcgggtggtggaggattattgcctttctgctttgaatgcgattcgagctggtttcgatgggattgagatccacggggcgcatggttaccttattgatcagtttttgaaagatgggatcaatgaccgtactgaccaatacggaggatccattgcaaaccgttgtagattcttgaaacaagtagtggaaggtgtagtttcagccataggagctagtaaagttggtgtgagggtatctccggctatagatcacttggacgcaactgattctgacccactatcactcgggctagccgtggttggcatgctcaataagttacaaggtgttaatggctcaaagctcgcttaccttcacgttacacaacctcgctaccacgcctacgggcaaacagagtctggaaggcaagggagtgatgaggaagaagctaagctaatgaagagcttgaggatggcttataatggaacctttatgtctagtggaggattcaataaggaactaggtatgcaagctgttcaacaaggtgatgctgatttggtttcatatggcagactgtttatcgcaaacccggatttggtttcgcggttcaagattgatggagagttgaataaatataatcggaagacgttttacactcaagatccagttgttggctacacggattatcctttcttggctcctttttcccgcctctga

SEQ ID NO: 95866 - protein, 391 aa, Arabidopsis thaliana
  peptide (1)..(391): Ceres Seq. ID no. 12730772
MTAAQGNSNETLFSSYKMGRFDLSHRVVLAPMTRCRALNGVPNAALAEYYAQRTTPGGFLISEGTMVSPGSAGFPHVPGIYSDEQVEAWKQVVEAVHAKGGFIFCQLWHVGRASHAVYQPNGGSPISSTNKPISENRWRVLLPDGSHVKYPKPRALEASEIPRVVEDYCLSALNAIRAGFDGIEIHGAHGYLIDQFLKDGINDRTDQYGGSIANRCRFLKQVVEGVVSAIGASKVGVRVSPAIDHLDATDSDPLSLGLAVVGMLNKLQGVNGSKLAYLHVTQPRYHAYGQTESGRQGSDEEEAKLMKSLRMAYNGTFMSSGGFNKELGMQAVQQGDADLVSYGRLFIANPDLVSRFKIDGELNKYNRKTFYTQDPVVGYTDYPFLAPFSRL

SEQ ID NO: 95867 - protein, 374 aa, Arabidopsis thaliana
  peptide (1)..(374): Ceres Seq. ID no. 12730773
MGRFDLSHRVVLAPMTRCRALNGVPNAALAEYYAQRTTPGGFLISEGTMVSPGSAGFPHVPGIYSDEQVEAWKQVVEAVHAKGGFIFCQLWHVGRASHAVYQPNGGSPISSTNKPISENRWRVLLPDGSHVKYPKPRALEASEIPRVVEDYCLSALNAIRAGFDGIEIHGAHGYLIDQFLKDGINDRTDQYGGSIANRCRFLKQVVEGVVSAIGASKVGVRVSPAIDHLDATDSDPLSLGLAVVGMLNKLQGVNGSKLAYLHVTQPRYHAYGQTESGRQGSDEEEAKLMKSLRMAYNGTFMSSGGFNKELGMQAVQQGDADLVSYGRLFIANPDLVSRFKIDGELNKYNRKTFYTQDPVVGYTDYPFLAPFSRL

SEQ ID NO: 95868 - protein, 360 aa, Arabidopsis thaliana
  peptide (1)..(360): Ceres Seq. ID no. 12730774
MTRCRALNGVPNAALAEYYAQRTTPGGFLISEGTMVSPGSAGFPHVPGIYSDEQVEAWKQVVEAVHAKGGFIFCQLWHVGRASHAVYQPNGGSPISSTNKPISENRWRVLLPDGSHVKYPKPRALEASEIPRVVEDYCLSALNAIRAGFDGIEIHGAHGYLIDQFLKDGINDRTDQYGGSIANRCRFLKQVVEGVVSAIGASKVGVRVSPAIDHLDATDSDPLSLGLAVVGMLNKLQGVNGSKLAYLHVTQPRYHAYGQTESGRQGSDEEEAKLMKSLRMAYNGTFMSSGGFNKELGMQAVQQGDADLVSYGRLFIANPDLVSRFKIDGELNKYNRKTFYTQDPVVGYTDYPFLAPFSRL

SEQ ID NO: 95869 - DNA, 1669 bp, Arabidopsis thaliana
  misc_feature (1)..(1669): Ceres Seq. ID no. 12730879
  misc_feature (1)..(1669): Ortholog of  Ceres SEQ ID NO 13654989 as cited in SEQ ID NO 63117
  misc_feature (1)..(1669): Ortholog of  Ceres SEQ ID NO 13584744 as cited in SEQ ID NO 69137
ctctttctccgacctcctccgagaaacccatctctcctcctccatttttgcccttggagtttcatcagcaagtttctcggagtctcgtcggagagatcggagttttttttttttttttttcctggatctgtcgactatgtgatgggaatccaataacagagaacgcagagagagtgttttcggatggggatttgctttagcgctgaagatcagcactaccaattttctcaacaacaaaactatcctaagaaaacaactccagggaaaaaagcagcagtgtatctaatgaagtcagattgtgaagatgtagttggtaaagtgagtggaagtggaagtggtggtggtggtttgccattggctccaaaaaacattaaagatcttcaatcaaatccaggatatgaaaatgttgatattttcacttacgaagagatgaagattgctactaagcagttcaggccggattatattctcggtgagggaggtttcggagtggtgtataaaggagttatagatgagtctgtgagggttggtttcaagtctacaaaagttgctatcaaagaacttaatcctgagggtttccaaggagatagagagtggctggctgaagtcaactatttaggacagctgagtcacccgaatttggtgaaacttattggctactgctgtgaagatgatcatagattgttagtctatgaatacatggcaatggggagccttgagaaacatcttttccgaagagttggatgcactttgacatggacaaaaagaatgaagattgcgctagacgcagccaagggtcttgcatttcttcatggtgctgaacgctccatcatataccgggatctgaagacagcaaatatattgcttgatgagggttacaatgctaaactctctgactttggactggcaaaggatggtccaagaggagaccaaacacatgtgtctacacgtgttatggggacttacggatacgctgctccagagtatgtcatgacagggcatttgacatccagaagtgatgtgtatggattcggtgtacttctccttgagatgctccttgggaagagggcaatggacaaaagcagagcttgcagggagcataacttggtagagtgggcacgacctcttttgaatcacaacaaaaagcttttgaggatcatagaccctcgaatggatggacagtacggcactaaggcgttgatgaaagtagctggtttggcataccaatgcctaagccaaaacccgaaaggaaggcctctcatgaatcatgttgtagaagttcttgagactctcaaggacgacggagatgctcaggaggaagtcatgactaatcttcatagtaggggaaagtctgtaaccttatatgaagcttctagcgattctcaaggcacaagagatgggaatggacagaggaggagaagaccggaaagtggtagaagcaagagcgaagccgcggtcgacactgaaaaatatgtttctactctttcggaaccggatactaccaaaatttaagactcaagacagaatgattcaccagtgatttgagactgtaagataagaaagtagcagagttggcttaaaatgtataaataagttgagtcttcgtttcgggttcttcttctttttgaattacaaatattagtgcaatatgcaatttgatgtttctttg

SEQ ID NO: 95870 - protein, 442 aa, Arabidopsis thaliana
  peptide (1)..(442): Ceres Seq. ID no. 12730880
MGICFSAEDQHYQFSQQQNYPKKTTPGKKAAVYLMKSDCEDVVGKVSGSGSGGGGLPLAPKNIKDLQSNPGYENVDIFTYEEMKIATKQFRPDYILGEGGFGVVYKGVIDESVRVGFKSTKVAIKELNPEGFQGDREWLAEVNYLGQLSHPNLVKLIGYCCEDDHRLLVYEYMAMGSLEKHLFRRVGCTLTWTKRMKIALDAAKGLAFLHGAERSIIYRDLKTANILLDEGYNAKLSDFGLAKDGPRGDQTHVSTRVMGTYGYAAPEYVMTGHLTSRSDVYGFGVLLLEMLLGKRAMDKSRACREHNLVEWARPLLNHNKKLLRIIDPRMDGQYGTKALMKVAGLAYQCLSQNPKGRPLMNHVVEVLETLKDDGDAQEEVMTNLHSRGKSVTLYEASSDSQGTRDGNGQRRRRPESGRSKSEAAVDTEKYVSTLSEPDTTKI

SEQ ID NO: 95871 - protein, 408 aa, Arabidopsis thaliana
  peptide (1)..(408): Ceres Seq. ID no. 12730881
MKSDCEDVVGKVSGSGSGGGGLPLAPKNIKDLQSNPGYENVDIFTYEEMKIATKQFRPDYILGEGGFGVVYKGVIDESVRVGFKSTKVAIKELNPEGFQGDREWLAEVNYLGQLSHPNLVKLIGYCCEDDHRLLVYEYMAMGSLEKHLFRRVGCTLTWTKRMKIALDAAKGLAFLHGAERSIIYRDLKTANILLDEGYNAKLSDFGLAKDGPRGDQTHVSTRVMGTYGYAAPEYVMTGHLTSRSDVYGFGVLLLEMLLGKRAMDKSRACREHNLVEWARPLLNHNKKLLRIIDPRMDGQYGTKALMKVAGLAYQCLSQNPKGRPLMNHVVEVLETLKDDGDAQEEVMTNLHSRGKSVTLYEASSDSQGTRDGNGQRRRRPESGRSKSEAAVDTEKYVSTLSEPDTTKI

SEQ ID NO: 95872 - protein, 360 aa, Arabidopsis thaliana
  peptide (1)..(360): Ceres Seq. ID no. 12730882
MKIATKQFRPDYILGEGGFGVVYKGVIDESVRVGFKSTKVAIKELNPEGFQGDREWLAEVNYLGQLSHPNLVKLIGYCCEDDHRLLVYEYMAMGSLEKHLFRRVGCTLTWTKRMKIALDAAKGLAFLHGAERSIIYRDLKTANILLDEGYNAKLSDFGLAKDGPRGDQTHVSTRVMGTYGYAAPEYVMTGHLTSRSDVYGFGVLLLEMLLGKRAMDKSRACREHNLVEWARPLLNHNKKLLRIIDPRMDGQYGTKALMKVAGLAYQCLSQNPKGRPLMNHVVEVLETLKDDGDAQEEVMTNLHSRGKSVTLYEASSDSQGTRDGNGQRRRRPESGRSKSEAAVDTEKYVSTLSEPDTTKI

SEQ ID NO: 95873 - DNA, 1778 bp, Arabidopsis thaliana
  misc_feature (1)..(1778): Ceres Seq. ID no. 12730893
  misc_feature (1)..(1778): Ortholog of  Ceres SEQ ID NO 15176822 as cited in SEQ ID NO 1160
  misc_feature (1)..(1778): Ortholog of  Ceres SEQ ID NO 13593889 as cited in SEQ ID NO 53305
  misc_feature (1)..(1778): Ortholog of  Ceres SEQ ID NO 13581959 as cited in SEQ ID NO 56156
aagttaacggcgattatcttcgttcacacaagcaacacaaaagagaaaacatgaatcatctctctctccctctctccggttccacagtaaagaattgattcctcaatctcacgcggaagcaaaatccaaattctaaaattctaagaaaccactctaatcacatcgctctatcgatcaaaatcgaaacccttattcaaaaatctcttattttttccatttttctctcaatcatctgaatcggttttgagatgagctccgattcaccggcggctggagacggtggcgaacaagccgctgcgggaacaagcgtgccttcaccttcatacgacaaacaaaaggagaaggcacgtgtgagtagaacatctctgatactatggcacgcgcaccaaaacgacgcagctgcagttcggaaactcttggaggaagatccgactttggttcacgctagagactatgacaaacgaacgcctctccacgtggcgtcgcttcatggatggatcgatgttgttaaatgtctgcttgagtttggtgctgatgtcaatgctcaggataggtggaagaacacgccactggctgatgcagaaggagctaggaagcagaaaatgattgaactgctgaaatctcatggtggtttgtcttatggtcaaaacggaagtcactttgaaccaaagcctgtgccaccaccaattccaaagaaatgtgactgggaaattgaacctgctgagctggatttttcaaatgctgcaatgattggaaagggttcatttggtgagattgtgaaagcctattggagaggaacaccggtagctgtgaaacgtattcttccttctctttcagatgatagactggttattcaggacttcaggcatgaggttgatttgctagttaagcttcgccatccaaatatagtccaattcttaggagcggtaaccgaaagaaagccccttatgttaatcactgagtacttacgcgggggagatcttcatcaatacctcaaggagaagggcggtcttactccaacaactgctgtcaactttgctttggatatcgcgagaggaatgacatatcttcacaatgaacctaatgttatcattcaccgagatcttaaaccaaggaacgttcttctggttaattctagtgcagaccacttgaaagttggagactttggacttagtaagctcataaaagttcaaaactctcatgatgtctacaaaatgactggagaaacaggaagctatcgttatatggctcctgaagtattcaagcatagaagatatgacaagaaagtcgatgtcttctcctttgcaatgatactttacgagatgcttgaaggagagccaccatttgcgaaccatgagccatatgaagcagccaaacatgtatctgatggacatagacctacattccgttccaaaggatgcacaccagatctaagagagttaattgtgaaatgctgggacgcagacatgaaccagagaccgtcgtttctggacattctcaagagacttgaaaagatcaaggaaactctaccatcagatcaccattggggcttattcacttcataatacacaaaatccattatttaagcacaaaaacaaccagaaacaagaaagtatcattctctgtttgccttattaatctctgtttcatttcttttgtaaagattgtttctttttcatcttttcatttgctttaaaagagtgtgagatagaaagcttttattgttgttacatggattggattgagtttgcaggttaatgagaagttcatatcatatc

SEQ ID NO: 95874 - protein, 438 aa, Arabidopsis thaliana
  peptide (1)..(438): Ceres Seq. ID no. 12730894
MSSDSPAAGDGGEQAAAGTSVPSPSYDKQKEKARVSRTSLILWHAHQNDAAAVRKLLEEDPTLVHARDYDKRTPLHVASLHGWIDVVKCLLEFGADVNAQDRWKNTPLADAEGARKQKMIELLKSHGGLSYGQNGSHFEPKPVPPPIPKKCDWEIEPAELDFSNAAMIGKGSFGEIVKAYWRGTPVAVKRILPSLSDDRLVIQDFRHEVDLLVKLRHPNIVQFLGAVTERKPLMLITEYLRGGDLHQYLKEKGGLTPTTAVNFALDIARGMTYLHNEPNVIIHRDLKPRNVLLVNSSADHLKVGDFGLSKLIKVQNSHDVYKMTGETGSYRYMAPEVFKHRRYDKKVDVFSFAMILYEMLEGEPPFANHEPYEAAKHVSDGHRPTFRSKGCTPDLRELIVKCWDADMNQRPSFLDILKRLEKIKETLPSDHHWGLFTS

SEQ ID NO: 95875 - protein, 320 aa, Arabidopsis thaliana
  peptide (1)..(320): Ceres Seq. ID no. 12730895
MIELLKSHGGLSYGQNGSHFEPKPVPPPIPKKCDWEIEPAELDFSNAAMIGKGSFGEIVKAYWRGTPVAVKRILPSLSDDRLVIQDFRHEVDLLVKLRHPNIVQFLGAVTERKPLMLITEYLRGGDLHQYLKEKGGLTPTTAVNFALDIARGMTYLHNEPNVIIHRDLKPRNVLLVNSSADHLKVGDFGLSKLIKVQNSHDVYKMTGETGSYRYMAPEVFKHRRYDKKVDVFSFAMILYEMLEGEPPFANHEPYEAAKHVSDGHRPTFRSKGCTPDLRELIVKCWDADMNQRPSFLDILKRLEKIKETLPSDHHWGLFTS

SEQ ID NO: 95876 - protein, 272 aa, Arabidopsis thaliana
  peptide (1)..(272): Ceres Seq. ID no. 12730896
MIGKGSFGEIVKAYWRGTPVAVKRILPSLSDDRLVIQDFRHEVDLLVKLRHPNIVQFLGAVTERKPLMLITEYLRGGDLHQYLKEKGGLTPTTAVNFALDIARGMTYLHNEPNVIIHRDLKPRNVLLVNSSADHLKVGDFGLSKLIKVQNSHDVYKMTGETGSYRYMAPEVFKHRRYDKKVDVFSFAMILYEMLEGEPPFANHEPYEAAKHVSDGHRPTFRSKGCTPDLRELIVKCWDADMNQRPSFLDILKRLEKIKETLPSDHHWGLFTS

SEQ ID NO: 95877 - DNA, 744 bp, Arabidopsis thaliana
  misc_feature (1)..(744): Ceres Seq. ID no. 12730929
  misc_feature (1)..(744): Ortholog of  Ceres SEQ ID NO 13596116 as cited in SEQ ID NO 62213
atgagaggaatcatcatcgtaagcttgttaattttacagagccttgtcgtgtcttcgtctcaaacagaaccagacttcaatttcttctactgggtcaactactggccaggagcaatatgcgatagccaaaaaggatgttgccctccaacgaaaggcaacacagcgtcggattttatcatccatggactctggcctcagttcaacaatggcacttggcctgcgttttgcgaccaaaccaatctcttcgatatctccaagatatcagatctagtctgccaaatggaaaagaaatggacagagtggggagtgtgggcatgtccaagtaacgagacaaatctatgggaacacgagtggaataagcatggcacctgtgtccaatctatcttcgaccaacactcttacttccgtaccaatctcaaattcaaacacaaagtccatctcctcaacatccttatacaaaaaggtattaaaccaaatgatgggttttacagtttggacgagatcaaaaatgcgatcaaatgcgcgatcggatttgcaccgggtatcgaatgcaatgaagatgtaaaggggaataagcagcttttccagatctatatatgtcttgataattacgcaaaagagtttgtggaatgcccgtatgttccggataaatcatgtgcttccaagatcaagtttccaagtcttcctgagagagattctcttaatgagtctctaagtgtgatgtcctctgtttcaactacctaa

SEQ ID NO: 95878 - protein, 247 aa, Arabidopsis thaliana
  peptide (1)..(247): Ceres Seq. ID no. 12730930
MRGIIIVSLLILQSLVVSSSQTEPDFNFFYWVNYWPGAICDSQKGCCPPTKGNTASDFIIHGLWPQFNNGTWPAFCDQTNLFDISKISDLVCQMEKKWTEWGVWACPSNETNLWEHEWNKHGTCVQSIFDQHSYFRTNLKFKHKVHLLNILIQKGIKPNDGFYSLDEIKNAIKCAIGFAPGIECNEDVKGNKQLFQIYICLDNYAKEFVECPYVPDKSCASKIKFPSLPERDSLNESLSVMSSVSTT

SEQ ID NO: 95879 - protein, 154 aa, Arabidopsis thaliana
  peptide (1)..(154): Ceres Seq. ID no. 12730931
MEKKWTEWGVWACPSNETNLWEHEWNKHGTCVQSIFDQHSYFRTNLKFKHKVHLLNILIQKGIKPNDGFYSLDEIKNAIKCAIGFAPGIECNEDVKGNKQLFQIYICLDNYAKEFVECPYVPDKSCASKIKFPSLPERDSLNESLSVMSSVSTT

SEQ ID NO: 95880 - DNA, 687 bp, Arabidopsis thaliana
  misc_feature (1)..(687): Ceres Seq. ID no. 12730932
  misc_feature (1)..(687): Ortholog of  Ceres SEQ ID NO 13596116 as cited in SEQ ID NO 62213
atgggagcaaagggttgtgttaacgttctcctcaagcttctagtgtttcaaggtcttttcgtttcacgtcctcaagaagactttgatttcttctacttcgttcttcagtggcctggagcctattgcgatacatcgcgtgcttgttgctatccaacatccggtaaacccgctgcagattttggtatccacggtctatggcctaattataacggtggttcatggccatcaaattgtgatcccgatagccaatttgatagatctcagatatcggatctcgtaagtagtttgaaaaagaattggccaacactatcatgtccaagcaacgaagggttcaacttttgggaacacgaatgggagaaacacggtacatgctccgaatccgtaatggaccaacatgagtactttgaaaatgctcttaaactcaaacaaaaagcaaatctcctccaaatcctcaaaaactccggaattaatccggatgatggattctacaatctggataagatcaccaacgcgataaaagatggaattggatttacgccaggaatagaatgtaacaaagatccggagcgtaatgcccagcttcatcagatctatatttgtgttgatacgtcaggaactgagtttatcgaatgtccagttttgcctagaggaagctgtccatctcaaatccagttttctaagttctaa

SEQ ID NO: 95881 - protein, 228 aa, Arabidopsis thaliana
  peptide (1)..(228): Ceres Seq. ID no. 12730933
MGAKGCVNVLLKLLVFQGLFVSRPQEDFDFFYFVLQWPGAYCDTSRACCYPTSGKPAADFGIHGLWPNYNGGSWPSNCDPDSQFDRSQISDLVSSLKKNWPTLSCPSNEGFNFWEHEWEKHGTCSESVMDQHEYFENALKLKQKANLLQILKNSGINPDDGFYNLDKITNAIKDGIGFTPGIECNKDPERNAQLHQIYICVDTSGTEFIECPVLPRGSCPSQIQFSKF

SEQ ID NO: 95882 - DNA, 1603 bp, Arabidopsis thaliana
  misc_feature (1)..(1603): Ceres Seq. ID no. 12730950
  misc_feature (1)..(1603): Ortholog of  Ceres SEQ ID NO 13654989 as cited in SEQ ID NO 63117
  misc_feature (1)..(1603): Ortholog of  Ceres SEQ ID NO 13584744 as cited in SEQ ID NO 69137
attctattagcgttcatattcagctaaacagacattgcgccgccgttaagtcgaaaggatagaaagaaattaaagaaagaagaagcttgttgtctttgcttcttgaggctctcttcttgtcttgatcatctgttacgttgttccacgaaaagaacagtagctttgtctctccatatagggttattatctgaaatgggtaattgtttagattcatcagctaaagtggataatagcaaccatagcccacatgctaattctgcttcttcgggctctaaagtttcaagcaagacaagccgttcaacgggtccttcaggactaagcacaacttcttacagcacagatagtagttttgggccattaccaacacttaggacagaaggagagatactttcatcgcctaacctaaaagctttcactttcaacgaactcaagaacgcgactaagaactttcgtcaagataatctactaggggaaggaggtttcggttgtgtattcaaaggatggattgatcaaacatctctcactgcttcacgtcccggttctggaatcgttgttgctgttaagcagcttaagcctgaaggttttcaaggtcataaagagtggttgactgaagtaaactatcttggtcaacttagtcacccaaatcttgtattactagttgggtattgcgcggaaggcgaaaaccggcttcttgtatatgaattcatgccaaaaggaagcttggagaatcatctttttagacgtggggcgcagccacttacatgggcaataaggatgaaagtggcggtaggtgcagctaaagggctaacttttcttcatgaagcaaagtcacaagtgatatacagagactttaaagctgctaacattctactcgacgctgacttcaatgctaagctttcagatttcggattggcaaaagcaggtcctactggtgataatacacatgtgtcaacaaaggtcattggtactcatggatatgcagctcctgaatatgttgccacaggtagattaaccgcaaagagtgatgtgtacagcttcggggtcgtgctactagaactaatatcaggacggcgtgccatggacaattcgaatggaggaaacgagtatagtcttgtagattgggcaacaccgtaccttggcgataagcgaaagctttttcgcataatggacacgaaactagggggtcaatatccacaaaagggagctttcacagctgctaatcttgcattgcaatgcttaaatcccgatgcaaaactccggccaaaaatgtcagaggttttagtcacattagaacagctagaatccgttgctaaacctggaaccaaacacacccaaatggaatctccaagatttcatcattcttctgttatgcagaaatctccggtaagatatagtcatgatcggcctctgctgcacatgactcctggtgcatcgcctttaccttcttacactcaatctcctcgtgtaagatgaaacacatttaagaaaacagatcgtgctttatgcttgtatgtgtactatatgtaaaaatgcaggcttgtctgtgtaattagagaggagtgattgcaaaggtttatacagagattaactatttacttcaact

SEQ ID NO: 95883 - protein, 426 aa, Arabidopsis thaliana
  peptide (1)..(426): Ceres Seq. ID no. 12730951
MGNCLDSSAKVDNSNHSPHANSASSGSKVSSKTSRSTGPSGLSTTSYSTDSSFGPLPTLRTEGEILSSPNLKAFTFNELKNATKNFRQDNLLGEGGFGCVFKGWIDQTSLTASRPGSGIVVAVKQLKPEGFQGHKEWLTEVNYLGQLSHPNLVLLVGYCAEGENRLLVYEFMPKGSLENHLFRRGAQPLTWAIRMKVAVGAAKGLTFLHEAKSQVIYRDFKAANILLDADFNAKLSDFGLAKAGPTGDNTHVSTKVIGTHGYAAPEYVATGRLTAKSDVYSFGVVLLELISGRRAMDNSNGGNEYSLVDWATPYLGDKRKLFRIMDTKLGGQYPQKGAFTAANLALQCLNPDAKLRPKMSEVLVTLEQLESVAKPGTKHTQMESPRFHHSSVMQKSPVRYSHDRPLLHMTPGASPLPSYTQSPRVR

SEQ ID NO: 95884 - protein, 255 aa, Arabidopsis thaliana
  peptide (1)..(255): Ceres Seq. ID no. 12730952
MPKGSLENHLFRRGAQPLTWAIRMKVAVGAAKGLTFLHEAKSQVIYRDFKAANILLDADFNAKLSDFGLAKAGPTGDNTHVSTKVIGTHGYAAPEYVATGRLTAKSDVYSFGVVLLELISGRRAMDNSNGGNEYSLVDWATPYLGDKRKLFRIMDTKLGGQYPQKGAFTAANLALQCLNPDAKLRPKMSEVLVTLEQLESVAKPGTKHTQMESPRFHHSSVMQKSPVRYSHDRPLLHMTPGASPLPSYTQSPRVR

SEQ ID NO: 95885 - protein, 232 aa, Arabidopsis thaliana
  peptide (1)..(232): Ceres Seq. ID no. 12730953
MKVAVGAAKGLTFLHEAKSQVIYRDFKAANILLDADFNAKLSDFGLAKAGPTGDNTHVSTKVIGTHGYAAPEYVATGRLTAKSDVYSFGVVLLELISGRRAMDNSNGGNEYSLVDWATPYLGDKRKLFRIMDTKLGGQYPQKGAFTAANLALQCLNPDAKLRPKMSEVLVTLEQLESVAKPGTKHTQMESPRFHHSSVMQKSPVRYSHDRPLLHMTPGASPLPSYTQSPRVR

SEQ ID NO: 95886 - DNA, 621 bp, Arabidopsis thaliana
  misc_feature (1)..(621): Ceres Seq. ID no. 12730958
  misc_feature (1)..(621): Ortholog of  Ceres SEQ ID NO 13584646 as cited in SEQ ID NO 60715
atggaaaccgtcgggcgtccacgtggcagacctcgaggttccaaaaacaaacctaaagctccaatctttgtcaccattgaccctcctatgagtccttacatcctcgaagtgccatccggaaacgatgtcgttgaagccctaaaccgtttctgccgcggtaaagccatcggcttttgcgtcctcagtggctcaggctccgttgctgatgtcactttgcgtcagccttctccggcagctcctggctcaaccattactttccacggaaagttcgatcttctctctgtctccgccactttcctccctcctctacctcctacctccttgtcccctcccgtctccaatttcttcaccgtctctctcgccggacctcaggggaaagtcatcggtggattcgtcgctggtcctctcgttgccgccggaactgtttacttcgtcgccactagtttcaagaacccttcctatcaccggttacctgctacggaggaagagcaaagaaactcggcggaaggggaagaggagggacaatcgccgccggtctctggaggtggtggagagtcgatgtacgtgggtggctctgatgtcatttgggatcccaacgccaaagctccatcgccgtactga

SEQ ID NO: 95887 - protein, 206 aa, Arabidopsis thaliana
  peptide (1)..(206): Ceres Seq. ID no. 12730959
METVGRPRGRPRGSKNKPKAPIFVTIDPPMSPYILEVPSGNDVVEALNRFCRGKAIGFCVLSGSGSVADVTLRQPSPAAPGSTITFHGKFDLLSVSATFLPPLPPTSLSPPVSNFFTVSLAGPQGKVIGGFVAGPLVAAGTVYFVATSFKNPSYHRLPATEEEQRNSAEGEEEGQSPPVSGGGGESMYVGGSDVIWDPNAKAPSPY

SEQ ID NO: 95888 - protein, 177 aa, Arabidopsis thaliana
  peptide (1)..(177): Ceres Seq. ID no. 12730960
MSPYILEVPSGNDVVEALNRFCRGKAIGFCVLSGSGSVADVTLRQPSPAAPGSTITFHGKFDLLSVSATFLPPLPPTSLSPPVSNFFTVSLAGPQGKVIGGFVAGPLVAAGTVYFVATSFKNPSYHRLPATEEEQRNSAEGEEEGQSPPVSGGGGESMYVGGSDVIWDPNAKAPSPY

SEQ ID NO: 95889 - protein, 138 aa, Arabidopsis thaliana
  peptide (1)..(138): Ceres Seq. ID no. 12730961
MSLCVSLLRQLLAQPLLSTESSIFSLSPPLSSLLYLLPPCPLPSPISSPSLSPDLRGKSSVDSSLVLSLPPELFTSSPLVSRTLPITGYLLRRKSKETRRKGKRRDNRRRSLEVVESRCTWVALMSFGIPTPKLHRRT

SEQ ID NO: 95890 - DNA, 948 bp, Arabidopsis thaliana
  misc_feature (1)..(948): Ceres Seq. ID no. 12730966
  misc_feature (1)..(948): Ortholog of  Ceres SEQ ID NO 14310369 as cited in SEQ ID NO 54765
  misc_feature (1)..(948): Ortholog of  Ceres SEQ ID NO 13638746 as cited in SEQ ID NO 59296
  misc_feature (1)..(948): Ortholog of  Ceres SEQ ID NO 13596474 as cited in SEQ ID NO 62169
  misc_feature (1)..(948): Ortholog of  Ceres SEQ ID NO 13598714 as cited in SEQ ID NO 62656
  misc_feature (1)..(948): Ortholog of  Ceres SEQ ID NO 13597519 as cited in SEQ ID NO 64759
  misc_feature (1)..(948): Ortholog of  Ceres SEQ ID NO 13662323 as cited in SEQ ID NO 68305
  misc_feature (1)..(948): Ortholog of  Ceres SEQ ID NO 13587054 as cited in SEQ ID NO 0
atggcgatcttcaagattcttgtattgttgttgagtttgtgttgtttcagtcaagcacaactttctcctactttctacgaccaaacttgtcaaaacgctctctccaccatccgatcttcaatccgaaccgcaatcagccgtgaacgtagaatggctgcttctctcatccgtctccatttccacgactgcttcgttaatggttgtgatgcatcggtcatgctcgtggcaactcccaccatggagagtgagagagattcattggcaaattttcaatcggcaagaggatttgaagttatcgatcaagccaaatcagctgtagagagtgtttgtcccggcgttgtttcttgcgctgatattattgccgttgctgctagagatgcttctgaatatgtcggaggtccaagatatgatgtgaaggttggtcgaagagattccaccaacgcgtttagggctatcgcagacagggatctccccaacttcagggctagcctcaacgatctctctgaactcttccttcgaaaaggactcaacacaagagacctcgtcgctctctcaggagctcacacattagggcaagctcaatgcctcacgttcaaaggtaggctttacgataactcgagtgacattgacgcgggattctccagtacccgtaagcgtcgttgtccggtcaacggtggagatacgactctagcacctttagatcaagtgacaccaaactcgttcgacaataactattacagaaacttgatgcagaagaaaggacttttagaaagcgatcaagttttgttcggaaccggagcttctacagatagtatagtgacggagtacagcagaaatccatcacgatttgcgtctgatttctcagctgcaatgatcaaaatgggagatattcagacactcactggttcagatggacaaatccgaagaatctgcagtgccgttaattaa

SEQ ID NO: 95891 - protein, 315 aa, Arabidopsis thaliana
  peptide (1)..(315): Ceres Seq. ID no. 12730967
MAIFKILVLLLSLCCFSQAQLSPTFYDQTCQNALSTIRSSIRTAISRERRMAASLIRLHFHDCFVNGCDASVMLVATPTMESERDSLANFQSARGFEVIDQAKSAVESVCPGVVSCADIIAVAARDASEYVGGPRYDVKVGRRDSTNAFRAIADRDLPNFRASLNDLSELFLRKGLNTRDLVALSGAHTLGQAQCLTFKGRLYDNSSDIDAGFSSTRKRRCPVNGGDTTLAPLDQVTPNSFDNNYYRNLMQKKGLLESDQVLFGTGASTDSIVTEYSRNPSRFASDFSAAMIKMGDIQTLTGSDGQIRRICSAVN

SEQ ID NO: 95892 - protein, 265 aa, Arabidopsis thaliana
  peptide (1)..(265): Ceres Seq. ID no. 12730968
MAASLIRLHFHDCFVNGCDASVMLVATPTMESERDSLANFQSARGFEVIDQAKSAVESVCPGVVSCADIIAVAARDASEYVGGPRYDVKVGRRDSTNAFRAIADRDLPNFRASLNDLSELFLRKGLNTRDLVALSGAHTLGQAQCLTFKGRLYDNSSDIDAGFSSTRKRRCPVNGGDTTLAPLDQVTPNSFDNNYYRNLMQKKGLLESDQVLFGTGASTDSIVTEYSRNPSRFASDFSAAMIKMGDIQTLTGSDGQIRRICSAVN

SEQ ID NO: 95893 - protein, 243 aa, Arabidopsis thaliana
  peptide (1)..(243): Ceres Seq. ID no. 12730969
MLVATPTMESERDSLANFQSARGFEVIDQAKSAVESVCPGVVSCADIIAVAARDASEYVGGPRYDVKVGRRDSTNAFRAIADRDLPNFRASLNDLSELFLRKGLNTRDLVALSGAHTLGQAQCLTFKGRLYDNSSDIDAGFSSTRKRRCPVNGGDTTLAPLDQVTPNSFDNNYYRNLMQKKGLLESDQVLFGTGASTDSIVTEYSRNPSRFASDFSAAMIKMGDIQTLTGSDGQIRRICSAVN

SEQ ID NO: 95894 - DNA, 1658 bp, Arabidopsis thaliana
  misc_feature (1)..(1658): Ceres Seq. ID no. 12731044
  misc_feature (1)..(1658): Ortholog of  Ceres SEQ ID NO 13660287 as cited in SEQ ID NO 67316
  misc_feature (1)..(1658): Ortholog of  Ceres SEQ ID NO 14307892 as cited in SEQ ID NO 67490
acttcacgattatcactcaccactttccgtttcaactttcaaactctctctcacaagccatgcaagacgcggagagaaccaccaatgatccggtagacagaattgagaaagtgacatggagagatctgcaagacggatctttcaccgcagaactcaagaggcttatctgctttgcggctcctatggctgccgtggttatcattcagttcatgatacagataatctcaatggtgatggtgggtcacctcggtagactctccctcgctagcgcttccttcgcagtctccttctgtaacgtcactggcttcagcttcattataggattgtcatgtgccttagatactttgagtggtcaagcttatggagctaagctatatcggaaactaggtgttcaggcttacacagctatgttctgtcttactttagtgtgtctccctctctctctcctatggttcaacatgggaaagcttattgtgatccttggccaagaccctgctattgctcacgaagctggtagatatgccgcttggctcatcccaggactgttcgcttacgccgttcttcagccgctcattcgctacttcaaaaaccagagcttgatcacacctctcctcgtcacctcttctgttgtgttttgtatccacgttcctctctgctggcttttggtttataagtcagggcttggtcatattggaggagccttggctctcagcttgtcatactggctctatgccattttccttggatctttcatgtactactcctctgcctgttctgagacacgcgcgccgcttaccatggagatattcgagggcgttagagagtttatcaaatatgctcttccttctgcggctatgctttgcctggagtggtggtcatatgaactcataatattactttctggtctgttacccaacccacagctggagacttctgtgctctctatctgtttcgaaacactttcaataacttattcaataccactagcgatcgcggctgcagcaagcacaagaatctcaaatgagttaggagctggaaactctcgagcagcacatattgtggtctatgcggcaatgtctcttgcagtaatggatgcattgatggtgagtatgtctctattagccggcaggcatgttttcggccatgttttcagcagtgacaagaaaaccatcgaatatgttgcaaagatggctccgttggtctctatttctatcatactggacagtttacaaggggttctctcaggtgttgcaagcggatgcgggtggcagcatataggggcttacataaacttcggagctttctatctctgggggatacccattgcagcatctttagccttctgggttcatctgaaaggtgttggcctttggattggaatactagccggtgcagttctgcagactcttctgctggctcttgtcacaggctgcacaaactggaaaacccaggcccgtgaagcgagggagcgaatggctgtggcccatgaatcagaacttacagagtcagaacttcccatctaagattacagggacacagatgttcctcctattttaccatttttgtagcagccaaatcgttatatgttactgctggactagtggttgccgtgaataattggtcttttcttttgtaatattagcagccctcagcaatcg

SEQ ID NO: 95895 - protein, 506 aa, Arabidopsis thaliana
  peptide (1)..(506): Ceres Seq. ID no. 12731045
FTIITHHFPFQLSNSLSQAMQDAERTTNDPVDRIEKVTWRDLQDGSFTAELKRLICFAAPMAAVVIIQFMIQIISMVMVGHLGRLSLASASFAVSFCNVTGFSFIIGLSCALDTLSGQAYGAKLYRKLGVQAYTAMFCLTLVCLPLSLLWFNMGKLIVILGQDPAIAHEAGRYAAWLIPGLFAYAVLQPLIRYFKNQSLITPLLVTSSVVFCIHVPLCWLLVYKSGLGHIGGALALSLSYWLYAIFLGSFMYYSSACSETRAPLTMEIFEGVREFIKYALPSAAMLCLEWWSYELIILLSGLLPNPQLETSVLSICFETLSITYSIPLAIAAAASTRISNELGAGNSRAAHIVVYAAMSLAVMDALMVSMSLLAGRHVFGHVFSSDKKTIEYVAKMAPLVSISIILDSLQGVLSGVASGCGWQHIGAYINFGAFYLWGIPIAASLAFWVHLKGVGLWIGILAGAVLQTLLLALVTGCTNWKTQAREARERMAVAHESELTESELPI

SEQ ID NO: 95896 - protein, 487 aa, Arabidopsis thaliana
  peptide (1)..(487): Ceres Seq. ID no. 12731046
MQDAERTTNDPVDRIEKVTWRDLQDGSFTAELKRLICFAAPMAAVVIIQFMIQIISMVMVGHLGRLSLASASFAVSFCNVTGFSFIIGLSCALDTLSGQAYGAKLYRKLGVQAYTAMFCLTLVCLPLSLLWFNMGKLIVILGQDPAIAHEAGRYAAWLIPGLFAYAVLQPLIRYFKNQSLITPLLVTSSVVFCIHVPLCWLLVYKSGLGHIGGALALSLSYWLYAIFLGSFMYYSSACSETRAPLTMEIFEGVREFIKYALPSAAMLCLEWWSYELIILLSGLLPNPQLETSVLSICFETLSITYSIPLAIAAAASTRISNELGAGNSRAAHIVVYAAMSLAVMDALMVSMSLLAGRHVFGHVFSSDKKTIEYVAKMAPLVSISIILDSLQGVLSGVASGCGWQHIGAYINFGAFYLWGIPIAASLAFWVHLKGVGLWIGILAGAVLQTLLLALVTGCTNWKTQAREARERMAVAHESELTESELPI

SEQ ID NO: 95897 - protein, 446 aa, Arabidopsis thaliana
  peptide (1)..(446): Ceres Seq. ID no. 12731047
MAAVVIIQFMIQIISMVMVGHLGRLSLASASFAVSFCNVTGFSFIIGLSCALDTLSGQAYGAKLYRKLGVQAYTAMFCLTLVCLPLSLLWFNMGKLIVILGQDPAIAHEAGRYAAWLIPGLFAYAVLQPLIRYFKNQSLITPLLVTSSVVFCIHVPLCWLLVYKSGLGHIGGALALSLSYWLYAIFLGSFMYYSSACSETRAPLTMEIFEGVREFIKYALPSAAMLCLEWWSYELIILLSGLLPNPQLETSVLSICFETLSITYSIPLAIAAAASTRISNELGAGNSRAAHIVVYAAMSLAVMDALMVSMSLLAGRHVFGHVFSSDKKTIEYVAKMAPLVSISIILDSLQGVLSGVASGCGWQHIGAYINFGAFYLWGIPIAASLAFWVHLKGVGLWIGILAGAVLQTLLLALVTGCTNWKTQAREARERMAVAHESELTESELPI

SEQ ID NO: 95898 - DNA, 1440 bp, Arabidopsis thaliana
  misc_feature (1)..(1440): Ceres Seq. ID no. 12731072
  misc_feature (1)..(1440): Ortholog of  Ceres SEQ ID NO 15175849 as cited in SEQ ID NO 55644
atggtgttggcggagctcggcggccggataacccgcgccatacagcagatgaacaatgtgacaataatcgatgaaaaggttttgaatgatttcttaaacgagattactcgcgctttgctccagtccgatgtttcttttggccttgtggaaaagatgcagaccaatattaagaagatcgttaacctcgacgatctagcagctggccacaacaaacgcctgatcatcgagcaggctatcttcaaggaactctgtaggatgctggatccaggaaagcctgcctttgcccccaaaaaggccaaacctagtgtagtgatgttcgtcggtttacaaggtgctggaaaaaccacaacatgtaccaagtatgcttactatcatcagaagaaagggtacaaagcagctctagtgtgtgcggatactttcagggccggtgcttttgatcagctgaaacagaatgccaccaaggctaagatccccttttatggaagctacacagaatccgatcctgtgaaaattgctgttgagggagttgataggttcaagaaagaaaagtgtgatcttattattgttgacaccagtggtcgccataaacaagcagcttctctctttgaagaaatgcgtcaagttgctgaagcaacggaaccagatcttgttatatttgttatggatagcagtattggtcaagctgcatttgaacaagctgaagcttttaaggaaactgtatctgttggagctgtaattattactaagatggacggccatgccaagggaggtggtgctcttagcgctgttgcagctacaaaaagtcctgtgatattcattggaacaggagagcatatggatgagtttgaagtgtttgacgttaaaccatttgtcagccgtctcttaggaaagggtgattggtctggactcgtggataaactacaagaggtggtacctaaagatctacagaatgaacttgtagaaaatctctctcagggtaactttacgttgagaagtatgtacgaccagttccagtgctctctgcggattccacttaatcagcttttctcgatgctgcctggaattagtgctgaaatgatgccgaaaggacatggtgaagaaagccgagtgaagatgaagcgatacatgacaatgatggattctatgacaaataaagaacttgacagcccaaacccaaagatttttaacgagtcaaggataatgaggatagcgagagggtcagggaggttagtaagagaagtgatggagatgttggaagagtacaagaggatagcaaagacaatgaaagggatcaagatcccaaagaacggagacatgagcaaggtcataccgcctcagatgctaaaacagatgggcggcatgagcggtctgcagagtctcatgaagcagatgggttcggctaaggacatgatgggaatgtttggtggcggaggcaagtag

SEQ ID NO: 95899 - protein, 479 aa, Arabidopsis thaliana; identical to SEQ ID NO: 35253
  peptide (1)..(479): Ceres Seq. ID no. 12731073

SEQ ID NO: 95900 - protein, 463 aa, Arabidopsis thaliana; identical to SEQ ID NO: 35254
  peptide (1)..(463): Ceres Seq. ID no. 12731074

SEQ ID NO: 95901 - protein, 428 aa, Arabidopsis thaliana; identical to SEQ ID NO: 35255
  peptide (1)..(428): Ceres Seq. ID no. 12731075

SEQ ID NO: 95902 - DNA, 2649 bp, Arabidopsis thaliana
  misc_feature (1)..(2649): Ceres Seq. ID no. 12731090
  misc_feature (1)..(2649): Ortholog of  Ceres SEQ ID NO 14302351 as cited in SEQ ID NO 66690
aaacaaaaaaaagaacagaagaaaacggaagtttttgtttctggagagaaaaccaaaaagttcattttgtttttctctatttcgtctttcctgcgattctgaatatcactcttcttcaatctctttgtcagaatcgtagcattggcttgtgagctttgatccttctttctttttttcttcccgtttgtgaaaaaagagagactagtatttatcatcgttgtcaccgccgatctgtcgtcggcagatggcaaaaccattacttttacctccaattaataacccggattcgttggattgttggacgtctctgtttcttctatctagtgtttcaactccggcatagaaaggatctgatttggttaatctcagagccctttttgtagacacattgtaaaatttgaattggtgaggaggagttagagccgtccgattggggtttgacccgattgaagcggagaggatggcaaaaagttggtttttggttgagaaggcgagaagatgtttgaggacggtgttcttcatggttgctatgttggcttcgctgctagtttcctcgttgccattgttagtagctataggtgatgtgttggttcccagcttcttgttgtcgagctttacttgtgtgacgtgttacggcgccaaggagcatctgaggcgatacggtttcaagagatctttgactgatattcctatcgtctctgttgtcagatctttccttgtcatctgtatctatttactctcggacgttcctgctctctcgcacggtccttaccttggaactgtatctctgtgttctgtggtttcggttcttcttctttcagttaaagcttgccttttcactgttaattctcaactcaacaacgaagcctcgttctctccatctaggaaacggctccacctgaagaagtcgtgggggatgccggttttgttcctctcatctgtggtttttgcccttggtcatacggttgtagcatacaggacaagttgcagagcgaggaggaaaattttgtatcaccgagttgaccctgaagctgttctttcatgcaaaagcatcttctctggccaccagaaagtcccgcggtcacccactcctgtggttggaaaggcctccaagtttgatggagaagcaaggcgaaagcctttgtcccacgatgaaggagagcttccagtgagattgcttgctgatgttgacagtttattcgttacaatccgaggcctcactgtgcattacaagctttgttcacctggttcacctcggcagtctatctcctcaaatgttctcgaagccaattctagttacaatacgccagagataatggcaggaaggtcgaagtttgacagaaaagtgttgagtatggtcaccaaaagccagcatcatcatcaccacaggagctacaacagtttgtttaacaattcttccttgcacgaccctcttctggatggttctcctacttctcctcttcttttcaaagagattaaggaaggaacgggactagtggatgacatgaatgtattcaattttggagctgaggagcaagacttgggtgaaagtggtcagtttggtgtggtcctggttcatggatttggaggaggagtgttttcttggaggcatgtgatgggttcactggctcagcagcttggttgtgttgtcactgcatttgataggcctggttggggattaacggccaggccacataagaatgatttggaagaaagacagctgctcaatccttattcactcgaaaatcaggtagagatgcttattgctttctgttatgagatggggttctcttcagtagtatttgttggtcatgatgacggaggtctacttgctctcaaagctgcacaaagattgatggcaacaaacgatcccatcaaagtcgtggtcaaaggagttgtcttgcttaatactagcttatcaagggaagtagttccagcttttgcaagaatacttctgcacacatcactagggaagaagcacctcgttcgccctcttttacgcactgagatagctcaggtggtgaatcgccgtgcttggtatgatcctgccaagatgactacagacgtcctacggctatacaaggccccattacacgtagaaggctgggatgaggcacttcatgagataggtagactttcatctgagatggtgcttgcacctcaaaatgcagcttcgcttctgaaggctgttgaaaacctgccagtgctagtcattgctggggccgaagacgcccttgtgccattgaagtcctcccaaggaatggcttctaaactccttaactctagactagtagcaatctcaggatgtgggcatttaccacatgaggagtgtcccaaggcgcttcttgcagccatgtccccgttcatcactagacttgtaattaggccagatctccagagtcaatagccagatcacttgtttttcttgtcgtcttcttagcttacaatcgattagtgtcgcccaaaaatttgaggccctgctaggtaaattcatctaatgagtgttgtaacctttcccttctcttgtgttttgtatgattcgagggtgattttatttattaaacacttgaagatgagtgtggcacagaatcgtgcaagtctctgtaaatttatccggtttggaatacgaagtaaattgctttcgtttgc

SEQ ID NO: 95903 - protein, 648 aa, Arabidopsis thaliana
  peptide (1)..(648): Ceres Seq. ID no. 12731091
MAKSWFLVEKARRCLRTVFFMVAMLASLLVSSLPLLVAIGDVLVPSFLLSSFTCVTCYGAKEHLRRYGFKRSLTDIPIVSVVRSFLVICIYLLSDVPALSHGPYLGTVSLCSVVSVLLLSVKACLFTVNSQLNNEASFSPSRKRLHLKKSWGMPVLFLSSVVFALGHTVVAYRTSCRARRKILYHRVDPEAVLSCKSIFSGHQKVPRSPTPVVGKASKFDGEARRKPLSHDEGELPVRLLADVDSLFVTIRGLTVHYKLCSPGSPRQSISSNVLEANSSYNTPEIMAGRSKFDRKVLSMVTKSQHHHHHRSYNSLFNNSSLHDPLLDGSPTSPLLFKEIKEGTGLVDDMNVFNFGAEEQDLGESGQFGVVLVHGFGGGVFSWRHVMGSLAQQLGCVVTAFDRPGWGLTARPHKNDLEERQLLNPYSLENQVEMLIAFCYEMGFSSVVFVGHDDGGLLALKAAQRLMATNDPIKVVVKGVVLLNTSLSREVVPAFARILLHTSLGKKHLVRPLLRTEIAQVVNRRAWYDPAKMTTDVLRLYKAPLHVEGWDEALHEIGRLSSEMVLAPQNAASLLKAVENLPVLVIAGAEDALVPLKSSQGMASKLLNSRLVAISGCGHLPHEECPKALLAAMSPFITRLVIRPDLQSQ

SEQ ID NO: 95904 - protein, 628 aa, Arabidopsis thaliana
  peptide (1)..(628): Ceres Seq. ID no. 12731092
MVAMLASLLVSSLPLLVAIGDVLVPSFLLSSFTCVTCYGAKEHLRRYGFKRSLTDIPIVSVVRSFLVICIYLLSDVPALSHGPYLGTVSLCSVVSVLLLSVKACLFTVNSQLNNEASFSPSRKRLHLKKSWGMPVLFLSSVVFALGHTVVAYRTSCRARRKILYHRVDPEAVLSCKSIFSGHQKVPRSPTPVVGKASKFDGEARRKPLSHDEGELPVRLLADVDSLFVTIRGLTVHYKLCSPGSPRQSISSNVLEANSSYNTPEIMAGRSKFDRKVLSMVTKSQHHHHHRSYNSLFNNSSLHDPLLDGSPTSPLLFKEIKEGTGLVDDMNVFNFGAEEQDLGESGQFGVVLVHGFGGGVFSWRHVMGSLAQQLGCVVTAFDRPGWGLTARPHKNDLEERQLLNPYSLENQVEMLIAFCYEMGFSSVVFVGHDDGGLLALKAAQRLMATNDPIKVVVKGVVLLNTSLSREVVPAFARILLHTSLGKKHLVRPLLRTEIAQVVNRRAWYDPAKMTTDVLRLYKAPLHVEGWDEALHEIGRLSSEMVLAPQNAASLLKAVENLPVLVIAGAEDALVPLKSSQGMASKLLNSRLVAISGCGHLPHEECPKALLAAMSPFITRLVIRPDLQSQ

SEQ ID NO: 95905 - protein, 625 aa, Arabidopsis thaliana
  peptide (1)..(625): Ceres Seq. ID no. 12731093
MLASLLVSSLPLLVAIGDVLVPSFLLSSFTCVTCYGAKEHLRRYGFKRSLTDIPIVSVVRSFLVICIYLLSDVPALSHGPYLGTVSLCSVVSVLLLSVKACLFTVNSQLNNEASFSPSRKRLHLKKSWGMPVLFLSSVVFALGHTVVAYRTSCRARRKILYHRVDPEAVLSCKSIFSGHQKVPRSPTPVVGKASKFDGEARRKPLSHDEGELPVRLLADVDSLFVTIRGLTVHYKLCSPGSPRQSISSNVLEANSSYNTPEIMAGRSKFDRKVLSMVTKSQHHHHHRSYNSLFNNSSLHDPLLDGSPTSPLLFKEIKEGTGLVDDMNVFNFGAEEQDLGESGQFGVVLVHGFGGGVFSWRHVMGSLAQQLGCVVTAFDRPGWGLTARPHKNDLEERQLLNPYSLENQVEMLIAFCYEMGFSSVVFVGHDDGGLLALKAAQRLMATNDPIKVVVKGVVLLNTSLSREVVPAFARILLHTSLGKKHLVRPLLRTEIAQVVNRRAWYDPAKMTTDVLRLYKAPLHVEGWDEALHEIGRLSSEMVLAPQNAASLLKAVENLPVLVIAGAEDALVPLKSSQGMASKLLNSRLVAISGCGHLPHEECPKALLAAMSPFITRLVIRPDLQSQ

SEQ ID NO: 95906 - DNA, 2601 bp, Arabidopsis thaliana
  misc_feature (1)..(2601): Ceres Seq. ID no. 12731094
  misc_feature (1)..(2601): Ortholog of  Ceres SEQ ID NO 12586556 as cited in SEQ ID NO 64667
  misc_feature (1)..(2601): Ortholog of  Ceres SEQ ID NO 13660894 as cited in SEQ ID NO 67475
atggcgtcttctgctcaaagtcctcatttttatctcaatccaggcaagtccaactcttttcagagcaaagcttataaacagagaaacgttaatttctattggaattttggaattcggagacttttcttgagaaaatctcaaggactatctgttcttagctcgagttcgagtagtacccacttttcgaattctcagttacatggactctgcgcgaatgggaagctggaggaagctatgaagcttctcaattctatgcaggagttgcgggttgcggtagacgaagatgtgtttgtggctttggttaggctgtgcgagtggaagagagcacaggaggaaggttctaaggtttattctattgctctcagttccatgagcagtcttggtgttgaactcggtaacgcgtttctcgctatgtttgtgaggtttggtaatttggttgatgcctggtatgtttttggtaaaatgtctgagagaaacttgttttcttggaatgtgttggttggtggctatgcaaagcaaggctatttcgatgaggctatgtgtttgtatcatagaatgttgtgggttggtggtgtgaagcctgatgtctatacgttcccctgtgtgttgagaacctgtggaggtatacctgatctagctcgaggaaaagaggttcatgttcatgtggttcgatacggatatgaattggatattgatgtggttaacgctttgattactatgtatgtgaagtgtggtgatgtgaagagcgcgaggttgctttttgatagaatgcctaggagagatataatctcatggaacgcaatgatctcagggtattttgagaatgggatgtgtcatgaaggattggagttattctttgcaatgcgtgggctttccgttgatcctgatttgatgaccttgactagtgttatctctgcctgtgagcttcttggagatagaaggttaggaagggatattcatgcgtatgtgataaccacgggtttcgctgttgacatatctgtctgcaactctttaacgcagatgtacttaaatgctgggtcatggcgtgaagctgaaaaactgttcagcagaatggagcgcaaagacattgtgtcatggaccactatgatttcaggctatgaatataattttctgcccgataaggccatagacacttacagaatgatggatcaagattctgtgaagccagacgagataacagtagctgctgttctatctgcttgtgctactctaggtgatcttgacactggtgttgagctccataagcttgcgattaaggcaaggctcatatcctatgtgattgtcgcaaacaatctcattaatatgtactcaaagtgcaaatgcattgataaggccttggatatcttccataacatcccccgcaagaatgtaatatcttggacatcgattattgcagggcttcgactcaacaaccggtgttttgaggccttgatattcctccggcaaatgaaaatgacgttgcagccaaatgcaataaccttaacagctgcattagcagcttgtgctagaatcggggctctgatgtgtgggaaagagattcatgcccatgtactgagaacaggagtggggcttgatgattttcttccaaatgcactcttagacatgtatgtacggtgcgggagaatgaacactgcttggagtcagttcaactcacagaaaaaagatgtcacatcatggaacattcttcttactggatattcagagcggggtcaagggtcgatggtggtagagttatttgatagaatggttaagtccagagtaaggccagatgagattacattcatctcattgttatgtggttgtagcaaatcccaaatggtgagacaaggtttgatgtactttagcaaaatggaggattatggtgttaccccaaacttgaagcactatgcgtgcgtggttgatttgctaggccgtgcaggcgagttacaagaagcacacaagtttattcagaaaatgccagtaacaccagatccagccgtatggggagctttgcttaatgcatgcaggattcaccacaaaattgatcttggtgagctatcagcgcaacatatatttgagctggacaagaaaagtgttggctattacattctgttatgtaatctgtatgctgattgtggaaaatggagagaagttgcaaaagtgagaagaatgatgaaagaaaacgggctaacagttgatgcaggatgcagttgggttgaagtaaagggtaaagttcacgcctttcttagcgatgacaagtaccatcctcaaacaaaagagatcaacactgttttagaggggttctatgagaaaatgagtgaagttgggcttactaaaatttcagaatcgagttctatggatgagacagagatttcgagagatgagatattctgtggacatagcgagagaaaggccattgcatttggtctgatcaacacggtcccaggaatgccaatttgggtaacaaagaatctcagtatgtgtgaaaattgccatgatacagtaaagttcatctccaaaacagtaagaagagaaatctcagtaagagatgctgagcatttccaccactttaaagatggagaatgttcatgtggagattag

SEQ ID NO: 95907 - protein, 866 aa, Arabidopsis thaliana
  peptide (1)..(866): Ceres Seq. ID no. 12731095
MASSAQSPHFYLNPGKSNSFQSKAYKQRNVNFYWNFGIRRLFLRKSQGLSVLSSSSSSTHFSNSQLHGLCANGKLEEAMKLLNSMQELRVAVDEDVFVALVRLCEWKRAQEEGSKVYSIALSSMSSLGVELGNAFLAMFVRFGNLVDAWYVFGKMSERNLFSWNVLVGGYAKQGYFDEAMCLYHRMLWVGGVKPDVYTFPCVLRTCGGIPDLARGKEVHVHVVRYGYELDIDVVNALITMYVKCGDVKSARLLFDRMPRRDIISWNAMISGYFENGMCHEGLELFFAMRGLSVDPDLMTLTSVISACELLGDRRLGRDIHAYVITTGFAVDISVCNSLTQMYLNAGSWREAEKLFSRMERKDIVSWTTMISGYEYNFLPDKAIDTYRMMDQDSVKPDEITVAAVLSACATLGDLDTGVELHKLAIKARLISYVIVANNLINMYSKCKCIDKALDIFHNIPRKNVISWTSIIAGLRLNNRCFEALIFLRQMKMTLQPNAITLTAALAACARIGALMCGKEIHAHVLRTGVGLDDFLPNALLDMYVRCGRMNTAWSQFNSQKKDVTSWNILLTGYSERGQGSMVVELFDRMVKSRVRPDEITFISLLCGCSKSQMVRQGLMYFSKMEDYGVTPNLKHYACVVDLLGRAGELQEAHKFIQKMPVTPDPAVWGALLNACRIHHKIDLGELSAQHIFELDKKSVGYYILLCNLYADCGKWREVAKVRRMMKENGLTVDAGCSWVEVKGKVHAFLSDDKYHPQTKEINTVLEGFYEKMSEVGLTKISESSSMDETEISRDEIFCGHSERKAIAFGLINTVPGMPIWVTKNLSMCENCHDTVKFISKTVRREISVRDAEHFHHFKDGECSCGD

SEQ ID NO: 95908 - protein, 788 aa, Arabidopsis thaliana
  peptide (1)..(788): Ceres Seq. ID no. 12731096
MKLLNSMQELRVAVDEDVFVALVRLCEWKRAQEEGSKVYSIALSSMSSLGVELGNAFLAMFVRFGNLVDAWYVFGKMSERNLFSWNVLVGGYAKQGYFDEAMCLYHRMLWVGGVKPDVYTFPCVLRTCGGIPDLARGKEVHVHVVRYGYELDIDVVNALITMYVKCGDVKSARLLFDRMPRRDIISWNAMISGYFENGMCHEGLELFFAMRGLSVDPDLMTLTSVISACELLGDRRLGRDIHAYVITTGFAVDISVCNSLTQMYLNAGSWREAEKLFSRMERKDIVSWTTMISGYEYNFLPDKAIDTYRMMDQDSVKPDEITVAAVLSACATLGDLDTGVELHKLAIKARLISYVIVANNLINMYSKCKCIDKALDIFHNIPRKNVISWTSIIAGLRLNNRCFEALIFLRQMKMTLQPNAITLTAALAACARIGALMCGKEIHAHVLRTGVGLDDFLPNALLDMYVRCGRMNTAWSQFNSQKKDVTSWNILLTGYSERGQGSMVVELFDRMVKSRVRPDEITFISLLCGCSKSQMVRQGLMYFSKMEDYGVTPNLKHYACVVDLLGRAGELQEAHKFIQKMPVTPDPAVWGALLNACRIHHKIDLGELSAQHIFELDKKSVGYYILLCNLYADCGKWREVAKVRRMMKENGLTVDAGCSWVEVKGKVHAFLSDDKYHPQTKEINTVLEGFYEKMSEVGLTKISESSSMDETEISRDEIFCGHSERKAIAFGLINTVPGMPIWVTKNLSMCENCHDTVKFISKTVRREISVRDAEHFHHFKDGECSCGD

SEQ ID NO: 95909 - protein, 782 aa, Arabidopsis thaliana
  peptide (1)..(782): Ceres Seq. ID no. 12731097
MQELRVAVDEDVFVALVRLCEWKRAQEEGSKVYSIALSSMSSLGVELGNAFLAMFVRFGNLVDAWYVFGKMSERNLFSWNVLVGGYAKQGYFDEAMCLYHRMLWVGGVKPDVYTFPCVLRTCGGIPDLARGKEVHVHVVRYGYELDIDVVNALITMYVKCGDVKSARLLFDRMPRRDIISWNAMISGYFENGMCHEGLELFFAMRGLSVDPDLMTLTSVISACELLGDRRLGRDIHAYVITTGFAVDISVCNSLTQMYLNAGSWREAEKLFSRMERKDIVSWTTMISGYEYNFLPDKAIDTYRMMDQDSVKPDEITVAAVLSACATLGDLDTGVELHKLAIKARLISYVIVANNLINMYSKCKCIDKALDIFHNIPRKNVISWTSIIAGLRLNNRCFEALIFLRQMKMTLQPNAITLTAALAACARIGALMCGKEIHAHVLRTGVGLDDFLPNALLDMYVRCGRMNTAWSQFNSQKKDVTSWNILLTGYSERGQGSMVVELFDRMVKSRVRPDEITFISLLCGCSKSQMVRQGLMYFSKMEDYGVTPNLKHYACVVDLLGRAGELQEAHKFIQKMPVTPDPAVWGALLNACRIHHKIDLGELSAQHIFELDKKSVGYYILLCNLYADCGKWREVAKVRRMMKENGLTVDAGCSWVEVKGKVHAFLSDDKYHPQTKEINTVLEGFYEKMSEVGLTKISESSSMDETEISRDEIFCGHSERKAIAFGLINTVPGMPIWVTKNLSMCENCHDTVKFISKTVRREISVRDAEHFHHFKDGECSCGD

SEQ ID NO: 95910 - DNA, 1971 bp, Arabidopsis thaliana
  misc_feature (1)..(1971): Ceres Seq. ID no. 12731102
  misc_feature (1)..(1971): Ortholog of  Ceres SEQ ID NO 13655640 as cited in SEQ ID NO 63844
atgtcgtggcaatggcggcgacggcagtggccatcccctctcctccttatcctcatcgttcttcatctcgtctcttcctcttccgccattgattttctctacaattccttcagctccgtaactaacagaaccgacgtaatcctcatcgaagattcccgcgtagaatccaccgtaatcagcctcatcaacgactccgatccactctctttcggccgtgttttttacccacaaaaactcacaattatacccgatccaacccgaaacccgacccgactctcatctttctcaacttccttcgtcttctccattctccctgacatatccacaagtcctggcttcggcctctgcttcgtcctctccaattccacctctcctccaaatgctatctccagccaatacttcggtctcttcactaacgccacagtcagattcaacgctcctctcctcgccgtcgaattcgacaccggtagaaactctgaagtaaacgatatcgacgataaccacgtcggaattgatcttaacaacattgaatccaccacatccgtaaccgctggctactacgattctgttaatggaagcttcgttcgctttaatatgcgtaacggaaacaacgttcgagcttggatcgatttcgatggccctaactttcagatcaacgtttccgtcgctcccgtcggtgtgcttcgacctcgccggccaactcttactttccgtgatcctgttattgctaattatgtctcggcagatatgtatgctggcttctctgcttccaaaaccaattggaatgaagctcgaaggattctagcttggagcttgagtgatacaggagctcttcgagagatcaacactacgaatttacctgttttcttcctggaaaactcttcttcttctctttccactggagcaatcgctgggatcgttatcggttgtgttgtcttcgtagctctaatcggatttgggggttatttgatttggaagaaactaatgagagaggaagaagaagaagagatcgaggagtgggagttagagttttggcctcaccgtttcagctacgaagaactcgctgcagctacggaggttttctctaacgatcgtctgcttggatctggaggatttggtaaagtttacagaggaattttgtcaaacaacagtgagattgctgttaaatgcgtgaatcacgattcgaagcaaggtttgagagaatttatggcggagatctcgagtatgggtaggttacagcataagaatctagttcaaatgagaggatggtgtcgccggaaaaacgagctgatgcttgtctacgattacatgccaaacggaagtcttaatcagtggatctttgataatcctaaagagccaatgccgtggaggagaaggcgtcaggtgattaacgatgttgcggaagggcttaattatctccaccatggatgggatcaagtggtgattcatagagatatcaaatcaagtaacattcttttggattctgagatgcgtgggaggcttggggacttcggtttagctaagttatatgagcacggtggggctccaaacacgactcgcgtggtgggcacgttagggtatttggctccggagcttgcgtctgcttcggcgcctacggaggcgagtgatgtgtatagttttggtgtggtggtgttggaggttgttagtgggaggagaccgatagagtacgcggaggaggaagatatggtgcttgtggattgggttagggatttgtacggtggaggaagagtggttgatgcagcggacgagagagtaaggagcgagtgtgagacgatggaggaagttgaattgttactcaagttaggtctggcttgttgtcaccctgatccagctaagcggccgaatatgagagagatcgtttcactactgcttggctcaccacaagaggatttgttgactgggctcacgccggccgccgccgcggcagactccacggctgctcacgcatga

SEQ ID NO: 95911 - protein, 656 aa, Arabidopsis thaliana
  peptide (1)..(656): Ceres Seq. ID no. 12731103
MSWQWRRRQWPSPLLLILIVLHLVSSSSAIDFLYNSFSSVTNRTDVILIEDSRVESTVISLINDSDPLSFGRVFYPQKLTIIPDPTRNPTRLSSFSTSFVFSILPDISTSPGFGLCFVLSNSTSPPNAISSQYFGLFTNATVRFNAPLLAVEFDTGRNSEVNDIDDNHVGIDLNNIESTTSVTAGYYDSVNGSFVRFNMRNGNNVRAWIDFDGPNFQINVSVAPVGVLRPRRPTLTFRDPVIANYVSADMYAGFSASKTNWNEARRILAWSLSDTGALREINTTNLPVFFLENSSSSLSTGAIAGIVIGCVVFVALIGFGGYLIWKKLMREEEEEEIEEWELEFWPHRFSYEELAAATEVFSNDRLLGSGGFGKVYRGILSNNSEIAVKCVNHDSKQGLREFMAEISSMGRLQHKNLVQMRGWCRRKNELMLVYDYMPNGSLNQWIFDNPKEPMPWRRRRQVINDVAEGLNYLHHGWDQVVIHRDIKSSNILLDSEMRGRLGDFGLAKLYEHGGAPNTTRVVGTLGYLAPELASASAPTEASDVYSFGVVVLEVVSGRRPIEYAEEEDMVLVDWVRDLYGGGRVVDAADERVRSECETMEEVELLLKLGLACCHPDPAKRPNMREIVSLLLGSPQEDLLTGLTPAAAAADSTAAHA

SEQ ID NO: 95912 - protein, 458 aa, Arabidopsis thaliana
  peptide (1)..(458): Ceres Seq. ID no. 12731104
MRNGNNVRAWIDFDGPNFQINVSVAPVGVLRPRRPTLTFRDPVIANYVSADMYAGFSASKTNWNEARRILAWSLSDTGALREINTTNLPVFFLENSSSSLSTGAIAGIVIGCVVFVALIGFGGYLIWKKLMREEEEEEIEEWELEFWPHRFSYEELAAATEVFSNDRLLGSGGFGKVYRGILSNNSEIAVKCVNHDSKQGLREFMAEISSMGRLQHKNLVQMRGWCRRKNELMLVYDYMPNGSLNQWIFDNPKEPMPWRRRRQVINDVAEGLNYLHHGWDQVVIHRDIKSSNILLDSEMRGRLGDFGLAKLYEHGGAPNTTRVVGTLGYLAPELASASAPTEASDVYSFGVVVLEVVSGRRPIEYAEEEDMVLVDWVRDLYGGGRVVDAADERVRSECETMEEVELLLKLGLACCHPDPAKRPNMREIVSLLLGSPQEDLLTGLTPAAAAADSTAAHA

SEQ ID NO: 95913 - protein, 407 aa, Arabidopsis thaliana
  peptide (1)..(407): Ceres Seq. ID no. 12731105
MYAGFSASKTNWNEARRILAWSLSDTGALREINTTNLPVFFLENSSSSLSTGAIAGIVIGCVVFVALIGFGGYLIWKKLMREEEEEEIEEWELEFWPHRFSYEELAAATEVFSNDRLLGSGGFGKVYRGILSNNSEIAVKCVNHDSKQGLREFMAEISSMGRLQHKNLVQMRGWCRRKNELMLVYDYMPNGSLNQWIFDNPKEPMPWRRRRQVINDVAEGLNYLHHGWDQVVIHRDIKSSNILLDSEMRGRLGDFGLAKLYEHGGAPNTTRVVGTLGYLAPELASASAPTEASDVYSFGVVVLEVVSGRRPIEYAEEEDMVLVDWVRDLYGGGRVVDAADERVRSECETMEEVELLLKLGLACCHPDPAKRPNMREIVSLLLGSPQEDLLTGLTPAAAAADSTAAHA

SEQ ID NO: 95914 - DNA, 1228 bp, Arabidopsis thaliana
  misc_feature (1)..(1228): Ceres Seq. ID no. 12731106
  misc_feature (1)..(1228): Ortholog of  Ceres SEQ ID NO 12636774 as cited in SEQ ID NO 372
  misc_feature (1)..(1228): Ortholog of  Ceres SEQ ID NO 14311866 as cited in SEQ ID NO 51178
  misc_feature (1)..(1228): Ortholog of  Ceres SEQ ID NO 14313583 as cited in SEQ ID NO 55431
  misc_feature (1)..(1228): Ortholog of  Ceres SEQ ID NO 13582350 as cited in SEQ ID NO 56734
  misc_feature (1)..(1228): Ortholog of  Ceres SEQ ID NO 12615466 as cited in SEQ ID NO 62761
  misc_feature (1)..(1228): Ortholog of  Ceres SEQ ID NO 13597295 as cited in SEQ ID NO 63743
  misc_feature (1)..(1228): Ortholog of  Ceres SEQ ID NO 12617090 as cited in SEQ ID NO 64005
  misc_feature (1)..(1228): Ortholog of  Ceres SEQ ID NO 13597233 as cited in SEQ ID NO 64370
ataagaaaaaaaacacaaacatctatcaaatttacaaagttttaaaactaattaaaaaagagcaagatgcctgctatgttaacagatgtgtttagaggccatcccattcacctcccacactctcacatacctgacttcacatctctccgggagctcccggattcttacaagtggacccctaaagacgatctcctcttctccgctgctccttctcctccggccaccggtgaaaacatccctctcatcgacctcgaccacccggacgcgactaaccaaatcggtcatgcatgtagaacttggggtgccttccaaatctcaaaccacggcgtgcctttgggacttctccaagacattgagtttctcaccggtagtctcttcgggctacctgtccaacgcaagcttaagtctgctcggtcggagacaggtgtgtccggctacggcgtcgctcgtatcgcatctttcttcaataagcaaatgtggtccgaaggtttcaccatcactggctcgcctctcaacgatttccgtaaactttggccccaacatcacctcaactactgcgatatcgttgaagagtacgaggaacatatgaaaaagttggcatcgaaattgatgtggttagcactaaattcacttggggtcagcgaagaagacattgaatgggccagtctcagttcagatttaaactgggcccaagctgctctccagctaaatcactacccggtttgtcctgaaccggaccgagccatgggtctagcagctcataccgactccaccctcctaaccattctgtaccagaacaataccgccggtctacaagtatttcgcgatgatcttggttgggtcaccgtgccaccgtttcctggctcgctcgtggttaacgttggtgacctcttccacatcctatccaatggattgtttaaaagcgtgttgcaccgcgctcgggttaaccaaaccagagcccggttatctgtagcattcctttggggtccgcaatctgatatcaagatatcacctgtaccgaagctggttagtcccgttgaatcgcctctataccaatcggtgacatggaaagagtatcttcgaacaaaagcaactcacttcaacaaagctctttcaatgattagaaatcacagagaagaatgattagataataatagttgtgatctactagttagtttgattaataaattgttgtaaatgatttcagcaatatgatttgtttgtcctc

SEQ ID NO: 95915 - protein, 358 aa, Arabidopsis thaliana
  peptide (1)..(358): Ceres Seq. ID no. 12731107
MPAMLTDVFRGHPIHLPHSHIPDFTSLRELPDSYKWTPKDDLLFSAAPSPPATGENIPLIDLDHPDATNQIGHACRTWGAFQISNHGVPLGLLQDIEFLTGSLFGLPVQRKLKSARSETGVSGYGVARIASFFNKQMWSEGFTITGSPLNDFRKLWPQHHLNYCDIVEEYEEHMKKLASKLMWLALNSLGVSEEDIEWASLSSDLNWAQAALQLNHYPVCPEPDRAMGLAAHTDSTLLTILYQNNTAGLQVFRDDLGWVTVPPFPGSLVVNVGDLFHILSNGLFKSVLHRARVNQTRARLSVAFLWGPQSDIKISPVPKLVSPVESPLYQSVTWKEYLRTKATHFNKALSMIRNHREE

SEQ ID NO: 95916 - protein, 355 aa, Arabidopsis thaliana
  peptide (1)..(355): Ceres Seq. ID no. 12731108
MLTDVFRGHPIHLPHSHIPDFTSLRELPDSYKWTPKDDLLFSAAPSPPATGENIPLIDLDHPDATNQIGHACRTWGAFQISNHGVPLGLLQDIEFLTGSLFGLPVQRKLKSARSETGVSGYGVARIASFFNKQMWSEGFTITGSPLNDFRKLWPQHHLNYCDIVEEYEEHMKKLASKLMWLALNSLGVSEEDIEWASLSSDLNWAQAALQLNHYPVCPEPDRAMGLAAHTDSTLLTILYQNNTAGLQVFRDDLGWVTVPPFPGSLVVNVGDLFHILSNGLFKSVLHRARVNQTRARLSVAFLWGPQSDIKISPVPKLVSPVESPLYQSVTWKEYLRTKATHFNKALSMIRNHREE

SEQ ID NO: 95917 - protein, 222 aa, Arabidopsis thaliana
  peptide (1)..(222): Ceres Seq. ID no. 12731109
MWSEGFTITGSPLNDFRKLWPQHHLNYCDIVEEYEEHMKKLASKLMWLALNSLGVSEEDIEWASLSSDLNWAQAALQLNHYPVCPEPDRAMGLAAHTDSTLLTILYQNNTAGLQVFRDDLGWVTVPPFPGSLVVNVGDLFHILSNGLFKSVLHRARVNQTRARLSVAFLWGPQSDIKISPVPKLVSPVESPLYQSVTWKEYLRTKATHFNKALSMIRNHREE

SEQ ID NO: 95918 - DNA, 1152 bp, Arabidopsis thaliana
  misc_feature (1)..(1152): Ceres Seq. ID no. 12731148
  misc_feature (1)..(1152): Ortholog of  Ceres SEQ ID NO 15178096 as cited in SEQ ID NO 52497
atgccagagacagaatattcgtttggaaggtcattccttagtttgcgccgagaccaagcacacttaatggatccaacatccttctctgagcctatgaccatggaggtagagttagattcttttcaaagacaagttgcggaaaaattcatcgatcttaatgcctccgcggatgaggctgagatcctctcacttgaatggatagggaaacttcttgattcttttctttgttgccaagaagatttccgagttataatattcaaccacaaacctcagctcctcaaacaaccaatggaccgcttgatagaagaatacttcgagaggagtgtaaaagctcttgatgtatgcaatgcgatacgtgatggcatcgagcaaatccgacagtggcagaaactaattgaaatcgtaatatcggctttggacacgaaccaaagacaacttggagaaggagaaatccaccgtgcaaagaaagctttgattgatttggcaattggaatgctcgacgagaaagactcttctaacacccaccgtaatcgctctttcacacgcaacaaggaccataatcaacacattggctatatcaggtcactttcttggagtgtttctcggtcgtggtcggcatcaaggcagttacaaggcattggaaataacttagcaacccctcgagccagcgatgttatggcgactaatggcctagctctcacagtgtatacaatgacatcaatactgttgtttgtaacttgggttcttgtcgcagccataccttgtcaagatcgtggtttacatgtccatttctatttccctaggcatttccaatgggcagtaccagtcatgtccttgcacgataagattatggacgaatcaaagaaaagagacaaaaagaagaagggttgtggactacttagggagattaatcaaatcgagagaaactcgagaatgttaagtgatttgattgattcggacaatttctcattaacagatgaaaaatgtactttagaggtgaaggagagagttcaagaattgatgaatgtgtgtgaagctataaaggagggtttagatccatttgataggaaagtgagggatgtcttccaccaaattgttcgtactcgcaccgaagctcttgattcacttggaaagcttcaaaatcaagaatag

SEQ ID NO: 95919 - protein, 383 aa, Arabidopsis thaliana
  peptide (1)..(383): Ceres Seq. ID no. 12731149
MPETEYSFGRSFLSLRRDQAHLMDPTSFSEPMTMEVELDSFQRQVAEKFIDLNASADEAEILSLEWIGKLLDSFLCCQEDFRVIIFNHKPQLLKQPMDRLIEEYFERSVKALDVCNAIRDGIEQIRQWQKLIEIVISALDTNQRQLGEGEIHRAKKALIDLAIGMLDEKDSSNTHRNRSFTRNKDHNQHIGYIRSLSWSVSRSWSASRQLQGIGNNLATPRASDVMATNGLALTVYTMTSILLFVTWVLVAAIPCQDRGLHVHFYFPRHFQWAVPVMSLHDKIMDESKKRDKKKKGCGLLREINQIERNSRMLSDLIDSDNFSLTDEKCTLEVKERVQELMNVCEAIKEGLDPFDRKVRDVFHQIVRTRTEALDSLGKLQNQE

SEQ ID NO: 95920 - protein, 361 aa, Arabidopsis thaliana
  peptide (1)..(361): Ceres Seq. ID no. 12731150
MDPTSFSEPMTMEVELDSFQRQVAEKFIDLNASADEAEILSLEWIGKLLDSFLCCQEDFRVIIFNHKPQLLKQPMDRLIEEYFERSVKALDVCNAIRDGIEQIRQWQKLIEIVISALDTNQRQLGEGEIHRAKKALIDLAIGMLDEKDSSNTHRNRSFTRNKDHNQHIGYIRSLSWSVSRSWSASRQLQGIGNNLATPRASDVMATNGLALTVYTMTSILLFVTWVLVAAIPCQDRGLHVHFYFPRHFQWAVPVMSLHDKIMDESKKRDKKKKGCGLLREINQIERNSRMLSDLIDSDNFSLTDEKCTLEVKERVQELMNVCEAIKEGLDPFDRKVRDVFHQIVRTRTEALDSLGKLQNQE

SEQ ID NO: 95921 - protein, 352 aa, Arabidopsis thaliana
  peptide (1)..(352): Ceres Seq. ID no. 12731151
MTMEVELDSFQRQVAEKFIDLNASADEAEILSLEWIGKLLDSFLCCQEDFRVIIFNHKPQLLKQPMDRLIEEYFERSVKALDVCNAIRDGIEQIRQWQKLIEIVISALDTNQRQLGEGEIHRAKKALIDLAIGMLDEKDSSNTHRNRSFTRNKDHNQHIGYIRSLSWSVSRSWSASRQLQGIGNNLATPRASDVMATNGLALTVYTMTSILLFVTWVLVAAIPCQDRGLHVHFYFPRHFQWAVPVMSLHDKIMDESKKRDKKKKGCGLLREINQIERNSRMLSDLIDSDNFSLTDEKCTLEVKERVQELMNVCEAIKEGLDPFDRKVRDVFHQIVRTRTEALDSLGKLQNQE

SEQ ID NO: 95922 - DNA, 1440 bp, Arabidopsis thaliana
  misc_feature (1)..(1440): Ceres Seq. ID no. 12731163
  misc_feature (1)..(1440): Ortholog of  Ceres SEQ ID NO 15176457 as cited in SEQ ID NO 55547
  misc_feature (1)..(1440): Ortholog of  Ceres SEQ ID NO 13594349 as cited in SEQ ID NO 58161
  misc_feature (1)..(1440): Ortholog of  Ceres SEQ ID NO 13663419 as cited in SEQ ID NO 66561
atggtgggaggtaagtggcggttcctagaagtagcagtcgtagtaatggtgttgcagtggtcgtgcgattataatggtaatttagctgaaggatttccagtacaagatcttgtgacaaagctgcctggacaacctgaagtggcattcagacaatttgcgggctatgtcgatatcgatgtcaaagctggtcggagtctcttttattacttcgtcgaagctgagaagcaaccccactctaaaccgttaactctttggctcaatggaggaccaggctgttcttccataggaggaggagctttcacagagttgggcccattttaccccaccggagatgctcgtggcctccgcagaaatcccaaatcttggaacaaagcctcaaatctattgtttgtggattcacctgctggagtaggatggtcttattctaacacaacttctgattacaccactggcgatgaatccaccgccaaggatatgttggtgttcatgttaagatggttagaaaaatttccacaattcaagactcgaaacctatttctcgcgggcgaaagctacgcaggacactatgtacctcaactagccgatgtgatactcgaatacaacgcacaacggtcaaatagattcaagttcaatctcaaagggattgcaattggaaatccgcttttgaagcttgaccgcgatgttccagcgatatatgagttcttctggtcacacgggatgatctctgatgaacttggcctcactatcatgaaccaatgcgactttgaagattacacattcacagattcacacaacataagcaaactttgcgaagctgcagtgaatcaagctggaaccatcatcactcaatatgttaattactacgacattctcctcgatgtatgctacccgtctctcttcgagcaagagcttaggctcaagaaaatgggtacaaggatgagttttggggtggacgtgtgcatgagctttgaagagcaattgtatttaaatcttcctgaggttcaaaaggctctccatgctaaccgaactaaactaccgtatgaatggtctatgtgcagcagcctcttgaactacaaatacactgacgggaacgccaacatgcttccaattcttaaaagaatcgtgaagagcaaagtccctgtttgggtcttcagtggagatgaagattctgtaattccacttcttggttcaagaactttggtaaaagaacttgcagatgatctcaacttcaataccacagttccttatggagcttggttcgacaaaggacaggttggcggatgggtagtagagtatgggaatctactgacattcgcaacggtgagaggagcggctcatatggtgccgtactcgcagccttcacgagctttacatttgttcaccagctttgtgcttggccggaaattgccacacaagtcgcctcctgctcttcatgattga

SEQ ID NO: 95923 - protein, 479 aa, Arabidopsis thaliana
  peptide (1)..(479): Ceres Seq. ID no. 12731164
MVGGKWRFLEVAVVVMVLQWSCDYNGNLAEGFPVQDLVTKLPGQPEVAFRQFAGYVDIDVKAGRSLFYYFVEAEKQPHSKPLTLWLNGGPGCSSIGGGAFTELGPFYPTGDARGLRRNPKSWNKASNLLFVDSPAGVGWSYSNTTSDYTTGDESTAKDMLVFMLRWLEKFPQFKTRNLFLAGESYAGHYVPQLADVILEYNAQRSNRFKFNLKGIAIGNPLLKLDRDVPAIYEFFWSHGMISDELGLTIMNQCDFEDYTFTDSHNISKLCEAAVNQAGTIITQYVNYYDILLDVCYPSLFEQELRLKKMGTRMSFGVDVCMSFEEQLYLNLPEVQKALHANRTKLPYEWSMCSSLLNYKYTDGNANMLPILKRIVKSKVPVWVFSGDEDSVIPLLGSRTLVKELADDLNFNTTVPYGAWFDKGQVGGWVVEYGNLLTFATVRGAAHMVPYSQPSRALHLFTSFVLGRKLPHKSPPALHD

SEQ ID NO: 95924 - protein, 464 aa, Arabidopsis thaliana
  peptide (1)..(464): Ceres Seq. ID no. 12731165
MVLQWSCDYNGNLAEGFPVQDLVTKLPGQPEVAFRQFAGYVDIDVKAGRSLFYYFVEAEKQPHSKPLTLWLNGGPGCSSIGGGAFTELGPFYPTGDARGLRRNPKSWNKASNLLFVDSPAGVGWSYSNTTSDYTTGDESTAKDMLVFMLRWLEKFPQFKTRNLFLAGESYAGHYVPQLADVILEYNAQRSNRFKFNLKGIAIGNPLLKLDRDVPAIYEFFWSHGMISDELGLTIMNQCDFEDYTFTDSHNISKLCEAAVNQAGTIITQYVNYYDILLDVCYPSLFEQELRLKKMGTRMSFGVDVCMSFEEQLYLNLPEVQKALHANRTKLPYEWSMCSSLLNYKYTDGNANMLPILKRIVKSKVPVWVFSGDEDSVIPLLGSRTLVKELADDLNFNTTVPYGAWFDKGQVGGWVVEYGNLLTFATVRGAAHMVPYSQPSRALHLFTSFVLGRKLPHKSPPALHD

SEQ ID NO: 95925 - protein, 321 aa, Arabidopsis thaliana
  peptide (1)..(321): Ceres Seq. ID no. 12731166
MLVFMLRWLEKFPQFKTRNLFLAGESYAGHYVPQLADVILEYNAQRSNRFKFNLKGIAIGNPLLKLDRDVPAIYEFFWSHGMISDELGLTIMNQCDFEDYTFTDSHNISKLCEAAVNQAGTIITQYVNYYDILLDVCYPSLFEQELRLKKMGTRMSFGVDVCMSFEEQLYLNLPEVQKALHANRTKLPYEWSMCSSLLNYKYTDGNANMLPILKRIVKSKVPVWVFSGDEDSVIPLLGSRTLVKELADDLNFNTTVPYGAWFDKGQVGGWVVEYGNLLTFATVRGAAHMVPYSQPSRALHLFTSFVLGRKLPHKSPPALHD

SEQ ID NO: 95926 - DNA, 1218 bp, Arabidopsis thaliana
  misc_feature (1)..(1218): Ceres Seq. ID no. 12731192
  misc_feature (1)..(1218): Ortholog of  Ceres SEQ ID NO 13660024 as cited in SEQ ID NO 67241
atgatatcaagattttctcttcttctgttcttgttcttggtcatagttcctctatcaaaatcttcaatcttcaaaaccttcatcaaatcctctccttcctcagtcgtcttccctctctccggcaacgtcttccctctcggatactactcagtcttaatgcaaataggaagccctccaaaggcatttcaatttgatattgataccggaagcgatctcacttgggttcaatgtgatgctccttgcagtggttgcactttgcctcctaatcttcagtacaagcctaaaggaaacattatcccgtgctcaaacccgatctgtacagctcttcactggcctaacaagcctcattgcccaaacccgcaagaacaatgtgactatgaagttaaatatgctgatcaaggttcatcaatgggtgcacttgttaccgatcagtttcctttaaaactcgtaaatggctcgttcatgcaacctcctgtagcattcgggtgtggttatgatcagagttaccctagtgcacatcctccgcccgcgactgctggagttttgggacttggaagagggaaaatcggtctcttgacacagcttgtctccgcgggactaacaagaaatgtggttggacattgcttaagttctaaaggtggaggctttttgttctttggagacaatcttgttccttccattggtgtggcatggacaccattattatcacaagacaaccactacacgaccggaccagccgatcttctcttcaacggaaagccaacaggtttaaaaggacttaaactcatttttgacaccggaagctcttacacttacttcaacagcaaggcataccaaacaataattaacctgatcggaaatgatctgaaagtctcaccgttgaaggttgcgaaagaagataagaccttaccaatctgctggaaaggagctaagccctttaaatctgttcttgaggtcaagaactttttcaagaccataacaatcaacttcaccaatgggagaagaaacactcagctctatcttgcacccgaattatatctcattgtctctaaaactggaaacgtatgcttgggactactaaatggaagtgaagtaggattacaaaactccaacgtaatcggagatatctctatgcaagggctaatgatgatctacgacaacgagaagcaacaactcggatgggtttcttcagattgcaataagcttcccaaaacatga

SEQ ID NO: 95927 - protein, 405 aa, Arabidopsis thaliana
  peptide (1)..(405): Ceres Seq. ID no. 12731193
MISRFSLLLFLFLVIVPLSKSSIFKTFIKSSPSSVVFPLSGNVFPLGYYSVLMQIGSPPKAFQFDIDTGSDLTWVQCDAPCSGCTLPPNLQYKPKGNIIPCSNPICTALHWPNKPHCPNPQEQCDYEVKYADQGSSMGALVTDQFPLKLVNGSFMQPPVAFGCGYDQSYPSAHPPPATAGVLGLGRGKIGLLTQLVSAGLTRNVVGHCLSSKGGGFLFFGDNLVPSIGVAWTPLLSQDNHYTTGPADLLFNGKPTGLKGLKLIFDTGSSYTYFNSKAYQTIINLIGNDLKVSPLKVAKEDKTLPICWKGAKPFKSVLEVKNFFKTITINFTNGRRNTQLYLAPELYLIVSKTGNVCLGLLNGSEVGLQNSNVIGDISMQGLMMIYDNEKQQLGWVSSDCNKLPKT

SEQ ID NO: 95928 - protein, 353 aa, Arabidopsis thaliana
  peptide (1)..(353): Ceres Seq. ID no. 12731194
MQIGSPPKAFQFDIDTGSDLTWVQCDAPCSGCTLPPNLQYKPKGNIIPCSNPICTALHWPNKPHCPNPQEQCDYEVKYADQGSSMGALVTDQFPLKLVNGSFMQPPVAFGCGYDQSYPSAHPPPATAGVLGLGRGKIGLLTQLVSAGLTRNVVGHCLSSKGGGFLFFGDNLVPSIGVAWTPLLSQDNHYTTGPADLLFNGKPTGLKGLKLIFDTGSSYTYFNSKAYQTIINLIGNDLKVSPLKVAKEDKTLPICWKGAKPFKSVLEVKNFFKTITINFTNGRRNTQLYLAPELYLIVSKTGNVCLGLLNGSEVGLQNSNVIGDISMQGLMMIYDNEKQQLGWVSSDCNKLPKT

SEQ ID NO: 95929 - protein, 269 aa, Arabidopsis thaliana
  peptide (1)..(269): Ceres Seq. ID no. 12731195
MGALVTDQFPLKLVNGSFMQPPVAFGCGYDQSYPSAHPPPATAGVLGLGRGKIGLLTQLVSAGLTRNVVGHCLSSKGGGFLFFGDNLVPSIGVAWTPLLSQDNHYTTGPADLLFNGKPTGLKGLKLIFDTGSSYTYFNSKAYQTIINLIGNDLKVSPLKVAKEDKTLPICWKGAKPFKSVLEVKNFFKTITINFTNGRRNTQLYLAPELYLIVSKTGNVCLGLLNGSEVGLQNSNVIGDISMQGLMMIYDNEKQQLGWVSSDCNKLPKT

SEQ ID NO: 95930 - DNA, 1034 bp, Arabidopsis thaliana
  misc_feature (1)..(1034): Ceres Seq. ID no. 12731212
  misc_feature (1)..(1034): Ortholog of  Ceres SEQ ID NO 15173035 as cited in SEQ ID NO 56029
  misc_feature (1)..(1034): Ortholog of  Ceres SEQ ID NO 12608745 as cited in SEQ ID NO 58289
actaccaattaaatctctctttttcttctcttaccattttcacattttcgagttttacaccaaagcctcttcactttctctctctctctactatagtctcctactacctactactacttcttctctctctctttcattcactacataaaaagcttcgagctcccatcactatataccctccaaagatgcaattttcaagaaactcaatccttaggcaactaagccgaaaagaaggttggagatcggcttctaaaaggtggacttccggagatagctcaacagccttcaacgacgacacaagtggtggtggttactcatcaatggagggtctttatggagtttactccggtggagacacggcggcgagaagtaagagagtgatggttgtagttgatgaaagttcgaggtctaagcatgctatgatgtgggctttgactcatttgactaacaaaggagatttagtgactcttcttcatgttgtgtctcctgatgatgaagctactccttctttggctcaatctcttggttctctttgcaaagcttgtaaacccgaggtggatgtggaggcattggtgattcaaggaccaaagctagcaacagtgttaagccaagtaaagaaacttgaagtctctgttcttgtgttgggtcagaagaaatctgcaccactcatctcttgcttatgtggacctagcagatcagaggagctcgtgaatcgttgcatcaacggtgcagattgtttaacgattggtgtgagaaaacaatgcaaaggtgttggtgggtacttgatcaatacacgatggcagaagaatttctggctcttggcctaatcacaattctaatcttattagataatttgtgttaattctgtgtttattgtagtttaataaactctatgtagtctctttgttgtcttatgttaacctaacttgtcttatatgtcttgtaagaaaaattaaagttgaatctttttatcccactacatcgattcctccgtagtctccaaattcttgtcccatataaacaaatacgttttc

SEQ ID NO: 95931 - protein, 274 aa, Arabidopsis thaliana
  peptide (1)..(274): Ceres Seq. ID no. 12731213
YQLNLSFSSLTIFTFSSFTPKPLHFLSLSTIVSYYLLLLLLSLFHSLHKKLRAPITIYPPKMQFSRNSILRQLSRKEGWRSASKRWTSGDSSTAFNDDTSGGGYSSMEGLYGVYSGGDTAARSKRVMVVVDESSRSKHAMMWALTHLTNKGDLVTLLHVVSPDDEATPSLAQSLGSLCKACKPEVDVEALVIQGPKLATVLSQVKKLEVSVLVLGQKKSAPLISCLCGPSRSEELVNRCINGADCLTIGVRKQCKGVGGYLINTRWQKNFWLLA

SEQ ID NO: 95932 - protein, 213 aa, Arabidopsis thaliana
  peptide (1)..(213): Ceres Seq. ID no. 12731214
MQFSRNSILRQLSRKEGWRSASKRWTSGDSSTAFNDDTSGGGYSSMEGLYGVYSGGDTAARSKRVMVVVDESSRSKHAMMWALTHLTNKGDLVTLLHVVSPDDEATPSLAQSLGSLCKACKPEVDVEALVIQGPKLATVLSQVKKLEVSVLVLGQKKSAPLISCLCGPSRSEELVNRCINGADCLTIGVRKQCKGVGGYLINTRWQKNFWLLA

SEQ ID NO: 95933 - protein, 168 aa, Arabidopsis thaliana; identical to SEQ ID NO: 28118
  peptide (1)..(168): Ceres Seq. ID no. 12731215

SEQ ID NO: 95934 - DNA, 636 bp, Arabidopsis thaliana
  misc_feature (1)..(636): Ceres Seq. ID no. 12731219
  misc_feature (1)..(636): Ortholog of  Ceres SEQ ID NO 13594435 as cited in SEQ ID NO 57977
atggtgaaaacacttcaaaagacaccaaagagaatgtcatctccatcatcatcatcttcatcatcctcatcaacatcatcatcatccataaggatgaagaagtacaagggagtgagaatgagaagttggggttcatgggtttcagagatcagagctcctaatcaaaagacaaggatctggcttggttcttactcaactgctgaagccgcggctagagcctacgacgcagcactcctatgtcttaaaggatcctcagctaataatctcaacttcccagagatctcaacttctctctaccatattatcaacaatggtgataacaacaatgacatgtcccctaagtctatacaaagagtagcagctgcagctgctgctgccaacacagatccttcctcatcatcagtctctacttcatctccattgctttcctctccatctgaagatctctatgatgttgtctccatgtcacagtatgaccaacaagtctccttgtctgaatcatcatcatggtacaactgctttgatggtgatgatcagttcatgttcattaatggagtctccgcgccgtatttgacaacatcactttctgatgatttctttgaggaaggagatatcagattatggaacttctgctga

SEQ ID NO: 95935 - protein, 211 aa, Arabidopsis thaliana
  peptide (1)..(211): Ceres Seq. ID no. 12731220
MVKTLQKTPKRMSSPSSSSSSSSSTSSSSIRMKKYKGVRMRSWGSWVSEIRAPNQKTRIWLGSYSTAEAAARAYDAALLCLKGSSANNLNFPEISTSLYHIINNGDNNNDMSPKSIQRVAAAAAAANTDPSSSSVSTSSPLLSSPSEDLYDVVSMSQYDQQVSLSESSSWYNCFDGDDQFMFINGVSAPYLTTSLSDDFFEEGDIRLWNFC

SEQ ID NO: 95936 - protein, 200 aa, Arabidopsis thaliana
  peptide (1)..(200): Ceres Seq. ID no. 12731221
MSSPSSSSSSSSSTSSSSIRMKKYKGVRMRSWGSWVSEIRAPNQKTRIWLGSYSTAEAAARAYDAALLCLKGSSANNLNFPEISTSLYHIINNGDNNNDMSPKSIQRVAAAAAAANTDPSSSSVSTSSPLLSSPSEDLYDVVSMSQYDQQVSLSESSSWYNCFDGDDQFMFINGVSAPYLTTSLSDDFFEEGDIRLWNFC

SEQ ID NO: 95937 - protein, 180 aa, Arabidopsis thaliana
  peptide (1)..(180): Ceres Seq. ID no. 12731222
MKKYKGVRMRSWGSWVSEIRAPNQKTRIWLGSYSTAEAAARAYDAALLCLKGSSANNLNFPEISTSLYHIINNGDNNNDMSPKSIQRVAAAAAAANTDPSSSSVSTSSPLLSSPSEDLYDVVSMSQYDQQVSLSESSSWYNCFDGDDQFMFINGVSAPYLTTSLSDDFFEEGDIRLWNFC

SEQ ID NO: 95938 - DNA, 2787 bp, Arabidopsis thaliana
  misc_feature (1)..(2787): Ceres Seq. ID no. 12731223
  misc_feature (1)..(2787): Ortholog of  Ceres SEQ ID NO 13584744 as cited in SEQ ID NO 69137
atggaggctcctacgcctctcctccttctcgtcctcctcacaaccataaccttcttcaccacctccgtcgctgatgaccaaacagcaatgctcgctttagctaaatcattcaatcctccgccgtcagattggtcttccaccaccgatttctgcaaatggtccggcgtacgatgtaccggcggtcgtgtcacaaccatcagcctcgctgataaatctctcaccggattcatcgcacctgagatctcgactctttcagagctcaaatctgtttctattcaacgtaacaaactctccggtacaatcccttcgtttgctaaactctcgtctcttcaagagatctatatggatgagaataatttcgtcggagttgaaaccggagctttcgccggacttactagtctccagatcttgagtttaagcgataacaacaacattactacttggagtttcccatcggagctcgtcgattcgacttctctcactacgatttatctcgataacacaaacatcgccggagttttgcctgacattttcgattccttagcttctcttcaaaatctccggttatcttacaacaacatcaccggcgttttaccaccgtcgcttggaaaatcttcgattcagaatctttggatcaacaatcaagacctaggaatgtcaggaacgatcgaagttctttcgagtatgacgtccttgtcacaagcttggcttcacaagaatcacttctttggaccgattccagatctctccaagagcgagaatctcttcgatctacagctccgggataatgatttaaccggaatagtacctccgacgcttcttacactcgctagcttgaagaatatttctctagataacaataaatttcaaggacctcttcctttgttttcaccggaggttaaagtaacaatagaccacaacgttttttgtactactaaagctggacaaagctgtagtcctcaggtgatgacgcttttagcggtggctggaggtttgggatatccttcaatgttggctgagtcttggcaaggtgatgatgcttgtagtggttgggcttatgttagttgtgattcagctgggaagaatgttgtcacgttgaatcttgggaaacatggattcaccgggtttatatctccggcgattgcgaatcttacttcattgaagagtctttatcttaatggtaacgatttgactggtgttattcctaaggagttgacatttatgactagtttgcagttaattgatgtctcgaataacaatcttagaggggagatacctaagtttccggctacggtgaagtttagttacaaaccggggaatgctttgttgggaactaatggtggagatggttcgagtcctggaactggtggtgctagtggtggtcctggtgggtcttctggtggtggtggtagtaaggttggtgtgattgttggtgtgattgtggcggttttagtgtttcttgccattttaggatttgtggtttataaatttgttatgaagaggaagtatgggaggtttaataggacggatcctgagaaggttgggaagattttggttagtgatgctgtatctaatggtggtagtggtaatggtggatatgctaatgggcatggagctaataacttcaatgctttgaatagtcctagtagtggtgacaatagtgatcgtttccttcttgaaggtggaagtgttaccattccaatggaggttcttcgccaggttacaaataatttcagtgaggataacatattgggcagagggggtttcggtgtcgtgtatgctggagaattacacgatggaacaaagactgctgttaagaggatggaatgtgcagcaatgggtaataaaggaatgagcgagtttcaggctgagatagcggtacttactaaggtcaggcatagacatttggttgctctattgggttactgtgtgaacgggaacgagaggttgcttgtctatgagtacatgccacagggaaatcttggacagcatttgtttgagtggagtgaactcggttactctcctttgacatggaaacagagagtgagcattgctttagacgtggcaagaggtgtggaatatctccatagcttggctcaacaaagcttcatccacagagatttaaagccctctaacatccttctaggagatgacatgagagccaaggttgctgattttggattggtcaagaacgcacctgatggtaaatactctgttgaaacaagattagcaggcacattcggttatctagcaccagaatacgccgctactggaagagtaacgacgaaagtggatgtgtatgcatttggtgtggttctcatggaaatactaactggaagaaaagctttagatgattcattaccagacgagagatctcatctagtcacatggttcagaagaatcctaatcaacaaagaaaacatcccaaaggcactcgaccaaaccttagaagcagacgaggaaacaatggagagcatttacagagttgctgagctagctggacactgcacagcccgcgaacctcaacaaagacccgacatgggccacgcagtaaacgtgctaggtccacttgtagagaagtggaaaccgtcgtgccaagaagaagaagagagtttcggaatcgatgtgaacatgagtttacctcaagctctacaaagatggcaaaacgaaggaacatcgtcatcaacaatgttccatggagacttctcttattctcagacacagtctagtattcctcctaaagcctctggctttcctaatactttcgattcagctgatggtcggtga

SEQ ID NO: 95939 - protein, 928 aa, Arabidopsis thaliana
  peptide (1)..(928): Ceres Seq. ID no. 12731224
MEAPTPLLLLVLLTTITFFTTSVADDQTAMLALAKSFNPPPSDWSSTTDFCKWSGVRCTGGRVTTISLADKSLTGFIAPEISTLSELKSVSIQRNKLSGTIPSFAKLSSLQEIYMDENNFVGVETGAFAGLTSLQILSLSDNNNITTWSFPSELVDSTSLTTIYLDNTNIAGVLPDIFDSLASLQNLRLSYNNITGVLPPSLGKSSIQNLWINNQDLGMSGTIEVLSSMTSLSQAWLHKNHFFGPIPDLSKSENLFDLQLRDNDLTGIVPPTLLTLASLKNISLDNNKFQGPLPLFSPEVKVTIDHNVFCTTKAGQSCSPQVMTLLAVAGGLGYPSMLAESWQGDDACSGWAYVSCDSAGKNVVTLNLGKHGFTGFISPAIANLTSLKSLYLNGNDLTGVIPKELTFMTSLQLIDVSNNNLRGEIPKFPATVKFSYKPGNALLGTNGGDGSSPGTGGASGGPGGSSGGGGSKVGVIVGVIVAVLVFLAILGFVVYKFVMKRKYGRFNRTDPEKVGKILVSDAVSNGGSGNGGYANGHGANNFNALNSPSSGDNSDRFLLEGGSVTIPMEVLRQVTNNFSEDNILGRGGFGVVYAGELHDGTKTAVKRMECAAMGNKGMSEFQAEIAVLTKVRHRHLVALLGYCVNGNERLLVYEYMPQGNLGQHLFEWSELGYSPLTWKQRVSIALDVARGVEYLHSLAQQSFIHRDLKPSNILLGDDMRAKVADFGLVKNAPDGKYSVETRLAGTFGYLAPEYAATGRVTTKVDVYAFGVVLMEILTGRKALDDSLPDERSHLVTWFRRILINKENIPKALDQTLEADEETMESIYRVAELAGHCTAREPQQRPDMGHAVNVLGPLVEKWKPSCQEEEESFGIDVNMSLPQALQRWQNEGTSSSTMFHGDFSYSQTQSSIPPKASGFPNTFDSADGR

SEQ ID NO: 95940 - protein, 899 aa, Arabidopsis thaliana
  peptide (1)..(899): Ceres Seq. ID no. 12731225
MLALAKSFNPPPSDWSSTTDFCKWSGVRCTGGRVTTISLADKSLTGFIAPEISTLSELKSVSIQRNKLSGTIPSFAKLSSLQEIYMDENNFVGVETGAFAGLTSLQILSLSDNNNITTWSFPSELVDSTSLTTIYLDNTNIAGVLPDIFDSLASLQNLRLSYNNITGVLPPSLGKSSIQNLWINNQDLGMSGTIEVLSSMTSLSQAWLHKNHFFGPIPDLSKSENLFDLQLRDNDLTGIVPPTLLTLASLKNISLDNNKFQGPLPLFSPEVKVTIDHNVFCTTKAGQSCSPQVMTLLAVAGGLGYPSMLAESWQGDDACSGWAYVSCDSAGKNVVTLNLGKHGFTGFISPAIANLTSLKSLYLNGNDLTGVIPKELTFMTSLQLIDVSNNNLRGEIPKFPATVKFSYKPGNALLGTNGGDGSSPGTGGASGGPGGSSGGGGSKVGVIVGVIVAVLVFLAILGFVVYKFVMKRKYGRFNRTDPEKVGKILVSDAVSNGGSGNGGYANGHGANNFNALNSPSSGDNSDRFLLEGGSVTIPMEVLRQVTNNFSEDNILGRGGFGVVYAGELHDGTKTAVKRMECAAMGNKGMSEFQAEIAVLTKVRHRHLVALLGYCVNGNERLLVYEYMPQGNLGQHLFEWSELGYSPLTWKQRVSIALDVARGVEYLHSLAQQSFIHRDLKPSNILLGDDMRAKVADFGLVKNAPDGKYSVETRLAGTFGYLAPEYAATGRVTTKVDVYAFGVVLMEILTGRKALDDSLPDERSHLVTWFRRILINKENIPKALDQTLEADEETMESIYRVAELAGHCTAREPQQRPDMGHAVNVLGPLVEKWKPSCQEEEESFGIDVNMSLPQALQRWQNEGTSSSTMFHGDFSYSQTQSSIPPKASGFPNTFDSADGR

SEQ ID NO: 95941 - protein, 814 aa, Arabidopsis thaliana
  peptide (1)..(814): Ceres Seq. ID no. 12731226
MDENNFVGVETGAFAGLTSLQILSLSDNNNITTWSFPSELVDSTSLTTIYLDNTNIAGVLPDIFDSLASLQNLRLSYNNITGVLPPSLGKSSIQNLWINNQDLGMSGTIEVLSSMTSLSQAWLHKNHFFGPIPDLSKSENLFDLQLRDNDLTGIVPPTLLTLASLKNISLDNNKFQGPLPLFSPEVKVTIDHNVFCTTKAGQSCSPQVMTLLAVAGGLGYPSMLAESWQGDDACSGWAYVSCDSAGKNVVTLNLGKHGFTGFISPAIANLTSLKSLYLNGNDLTGVIPKELTFMTSLQLIDVSNNNLRGEIPKFPATVKFSYKPGNALLGTNGGDGSSPGTGGASGGPGGSSGGGGSKVGVIVGVIVAVLVFLAILGFVVYKFVMKRKYGRFNRTDPEKVGKILVSDAVSNGGSGNGGYANGHGANNFNALNSPSSGDNSDRFLLEGGSVTIPMEVLRQVTNNFSEDNILGRGGFGVVYAGELHDGTKTAVKRMECAAMGNKGMSEFQAEIAVLTKVRHRHLVALLGYCVNGNERLLVYEYMPQGNLGQHLFEWSELGYSPLTWKQRVSIALDVARGVEYLHSLAQQSFIHRDLKPSNILLGDDMRAKVADFGLVKNAPDGKYSVETRLAGTFGYLAPEYAATGRVTTKVDVYAFGVVLMEILTGRKALDDSLPDERSHLVTWFRRILINKENIPKALDQTLEADEETMESIYRVAELAGHCTAREPQQRPDMGHAVNVLGPLVEKWKPSCQEEEESFGIDVNMSLPQALQRWQNEGTSSSTMFHGDFSYSQTQSSIPPKASGFPNTFDSADGR

SEQ ID NO: 95942 - DNA, 1008 bp, Arabidopsis thaliana
  misc_feature (1)..(1008): Ceres Seq. ID no. 12731239
  misc_feature (1)..(1008): Ortholog of  Ceres SEQ ID NO 14302216 as cited in SEQ ID NO 66456
atggatcaaatgtcacctgataacataaatggagtcattttagcagtgtcttcaagtatctttattggttctagcttcatcatcaagaaaaaaggtctcaagaaagccggtgcaagcggtgtccgagcaggtgaaggagggtatggatacttgaaggagccatggtggtgggctggaatgataacaatgattgttggggaagtagctaattttgcagcctatgcatttgcaccggctattttggtaacacctttgggagctttaagtattatattcagcgcagtgctcgcgcattttattttgaaagagaaattgcatatgtttgggatacttggttgcattctctgtgttgttgggtctacaactatagtcttacacgcaccacatgaacagaaaatagaatcagtcaagcaaatatggcagcttgctattgaaccaggtttccttgtgtattctgctgtgattgtgattgtggtggctatactgatcttctactatgaaccgcgctacgggaagactcatatgatcgtatatgtcggaatctgctccttaatgggttctcttactgttatgagtgtcaaagctgtggcgattgcgattaaactgacattttcagggacgaatcagtttaaatacttcaacacttggattttcattttagtagttgcaacttgttgcattttgcagatcaactacttgaacaaggcattggatacattcaacacagcggttatttctccggtttactacgttatgttcacaacattcacaatcatagctagtatgatcatgttcaaggattgggcttctcagagtggattaaagattgcaacagagttgtgtggttttgtgacgattttatcaggaacttttctgcttcacaagaccaaagatatgggaaacagtgcaagtggtcgtggttctatctcaatgcctactagagacactcctgtcttcactaattcaggatccggtcggagctccagctctgataaagtagcttcctga

SEQ ID NO: 95943 - protein, 335 aa, Arabidopsis thaliana
  peptide (1)..(335): Ceres Seq. ID no. 12731240
MDQMSPDNINGVILAVSSSIFIGSSFIIKKKGLKKAGASGVRAGEGGYGYLKEPWWWAGMITMIVGEVANFAAYAFAPAILVTPLGALSIIFSAVLAHFILKEKLHMFGILGCILCVVGSTTIVLHAPHEQKIESVKQIWQLAIEPGFLVYSAVIVIVVAILIFYYEPRYGKTHMIVYVGICSLMGSLTVMSVKAVAIAIKLTFSGTNQFKYFNTWIFILVVATCCILQINYLNKALDTFNTAVISPVYYVMFTTFTIIASMIMFKDWASQSGLKIATELCGFVTILSGTFLLHKTKDMGNSASGRGSISMPTRDTPVFTNSGSGRSSSSDKVAS

SEQ ID NO: 95944 - protein, 332 aa, Arabidopsis thaliana
  peptide (1)..(332): Ceres Seq. ID no. 12731241
MSPDNINGVILAVSSSIFIGSSFIIKKKGLKKAGASGVRAGEGGYGYLKEPWWWAGMITMIVGEVANFAAYAFAPAILVTPLGALSIIFSAVLAHFILKEKLHMFGILGCILCVVGSTTIVLHAPHEQKIESVKQIWQLAIEPGFLVYSAVIVIVVAILIFYYEPRYGKTHMIVYVGICSLMGSLTVMSVKAVAIAIKLTFSGTNQFKYFNTWIFILVVATCCILQINYLNKALDTFNTAVISPVYYVMFTTFTIIASMIMFKDWASQSGLKIATELCGFVTILSGTFLLHKTKDMGNSASGRGSISMPTRDTPVFTNSGSGRSSSSDKVAS

SEQ ID NO: 95945 - protein, 276 aa, Arabidopsis thaliana
  peptide (1)..(276): Ceres Seq. ID no. 12731242
MITMIVGEVANFAAYAFAPAILVTPLGALSIIFSAVLAHFILKEKLHMFGILGCILCVVGSTTIVLHAPHEQKIESVKQIWQLAIEPGFLVYSAVIVIVVAILIFYYEPRYGKTHMIVYVGICSLMGSLTVMSVKAVAIAIKLTFSGTNQFKYFNTWIFILVVATCCILQINYLNKALDTFNTAVISPVYYVMFTTFTIIASMIMFKDWASQSGLKIATELCGFVTILSGTFLLHKTKDMGNSASGRGSISMPTRDTPVFTNSGSGRSSSSDKVAS

SEQ ID NO: 95946 - DNA, 1197 bp, Arabidopsis thaliana
  misc_feature (1)..(1197): Ceres Seq. ID no. 12731298
  misc_feature (1)..(1197): Ortholog of  Ceres SEQ ID NO 13654989 as cited in SEQ ID NO 63117
  misc_feature (1)..(1197): Ortholog of  Ceres SEQ ID NO 13655640 as cited in SEQ ID NO 63844
  misc_feature (1)..(1197): Ortholog of  Ceres SEQ ID NO 13584744 as cited in SEQ ID NO 69137
atgaaacgtttcttatgctgtctcaaaggaggaagctcaagtaacgcagcgcaaggtaacgacgagaacgacgaagtagatgtcgagcgcctatttgggaataacgagcgcctcaatcatctttggagaaatcatctccgactccctgacgatcgtgaagttgcagatccgactgctgctctgttaccagtatctccacctctacctgataattgtggagaatcatttctatggcgtgagctcgtaaacggaaccataaacttccgggacgaattttatctcggcaaaggcaacttcggcgaagtccatcgctgctatttctcaagacttaatgtggatggagcggtaaaggttcaaaatccacagaatccaactggtcatgttgagttcttggcagaggttacaacgttacgtgcaactaatcatccaaatgtgattagacttcttggcaactgttacggccaaaggaaccgtgctataatttacgaattcatggccaacggagatcttgagcgtcacatctttgcacacaaaacgatggtggagggtccgcgacctaagggtctaacactaccaattagggttttggattggtacacgaggatgaaaattgctgtgggtgtagccaagggcctggtttatctacacgaggagctgaaagtgattaacagagatgtcaaggccggaaacatattacttgatgcagattttgttccgaagctgacagattttggattggcgactaaaatcgttgaagatgaaaacggtgttgagcagcagcaacggatcattccgatgaaggcatctatgggatacattgcaccggaaggagagatttcctggttggtttcgactaagactgatgtctatagctatggagcttttctgttagtgcttttcaccggaaggaaacctttttattcggataatcctgctgggaaaaagaatctcactgattggtttttgagagtatgggataggatcgaggatgcgcctgtgaaagctgatgttgcgctcggtaataggtactcggttgaaggtttaaagaagatatttgatactgcgaggatgtgtataaaggcagagagacttgaacggcctaccatgagtgaagtggaagcgatggttctcgaagctgcagctttcccggtccaagtgccgcgccaggtgacaaggaggcgttcggcttcaacataa

SEQ ID NO: 95947 - protein, 398 aa, Arabidopsis thaliana
  peptide (1)..(398): Ceres Seq. ID no. 12731299
MKRFLCCLKGGSSSNAAQGNDENDEVDVERLFGNNERLNHLWRNHLRLPDDREVADPTAALLPVSPPLPDNCGESFLWRELVNGTINFRDEFYLGKGNFGEVHRCYFSRLNVDGAVKVQNPQNPTGHVEFLAEVTTLRATNHPNVIRLLGNCYGQRNRAIIYEFMANGDLERHIFAHKTMVEGPRPKGLTLPIRVLDWYTRMKIAVGVAKGLVYLHEELKVINRDVKAGNILLDADFVPKLTDFGLATKIVEDENGVEQQQRIIPMKASMGYIAPEGEISWLVSTKTDVYSYGAFLLVLFTGRKPFYSDNPAGKKNLTDWFLRVWDRIEDAPVKADVALGNRYSVEGLKKIFDTARMCIKAERLERPTMSEVEAMVLEAAAFPVQVPRQVTRRRSAST

SEQ ID NO: 95948 - protein, 234 aa, Arabidopsis thaliana
  peptide (1)..(234): Ceres Seq. ID no. 12731300
MANGDLERHIFAHKTMVEGPRPKGLTLPIRVLDWYTRMKIAVGVAKGLVYLHEELKVINRDVKAGNILLDADFVPKLTDFGLATKIVEDENGVEQQQRIIPMKASMGYIAPEGEISWLVSTKTDVYSYGAFLLVLFTGRKPFYSDNPAGKKNLTDWFLRVWDRIEDAPVKADVALGNRYSVEGLKKIFDTARMCIKAERLERPTMSEVEAMVLEAAAFPVQVPRQVTRRRSAST

SEQ ID NO: 95949 - protein, 219 aa, Arabidopsis thaliana
  peptide (1)..(219): Ceres Seq. ID no. 12731301
MVEGPRPKGLTLPIRVLDWYTRMKIAVGVAKGLVYLHEELKVINRDVKAGNILLDADFVPKLTDFGLATKIVEDENGVEQQQRIIPMKASMGYIAPEGEISWLVSTKTDVYSYGAFLLVLFTGRKPFYSDNPAGKKNLTDWFLRVWDRIEDAPVKADVALGNRYSVEGLKKIFDTARMCIKAERLERPTMSEVEAMVLEAAAFPVQVPRQVTRRRSAST

SEQ ID NO: 95950 - DNA, 1488 bp, Arabidopsis thaliana
  misc_feature (1)..(1488): Ceres Seq. ID no. 12731302
  misc_feature (1)..(1488): Ortholog of  Ceres SEQ ID NO 13623250 as cited in SEQ ID NO 0
atgtgttttaataacattgaaactggtgatgaagtggaaaccgagaggcaagtgtttggttcatctgaagaagatgaatttcgagttgaagatactgctagaaataccaacaatgtacagatttctcaacaacagcagcaaccgctagctcatgttgtgaagtgggagaggtatctcccagttagatcgcttaaggttcttctggtggagaatgatgactcaacacgccatattgttactgcccttttaaagaattgcagctatgaagttactgctgttccggatgtccttgaagcctggagaattctagaagatgagaaaagttgcattgatcttgtcttaacagaggttgacatgcctgtgcattcaggaaccggtctgctgtccaagattatgagccataagacacttaagaacatccccgtcataatgatgtcatcacatgattctatggttctggtctttaagtgtttgtcgaatggtgctgttgattttctcgtgaaacccattagaaagaacgaactaaagaatctttggcaacatgtctggagaagatgtcacagctctagcggaagcggaagtgagagtggaatacatgacaagaagtcggtgaaacctgaaagcacccaagggtcagaaaatgatgccagcatcagtgatgaacacaggaatgaaagtgggagtagtggtggtttgagtaaccaagatggtgggagtgataacgggagtggaactcagagttcttggacaaaaagagccagtgatactaagagcacctcgccttcaaatcaatttcccgatgcacccaacaagaaaggaacctatgaaaatggatgtgcacatgttaatagactgaaggaggctgaagatcagaaggaacaaataggcacgggatcacagacaggaatgtctatgagtaagaaagctgaagaaccaggagatcttgaaaagaatgcaaagtattctgttcaagctttggagagaaacaatgatgacacgctgaatcgctcttctggtaactcacaagtagaaagcaaagcaccttcatctaaccgagaagatttgcaatcactcgagcaaactctgaaaaaaacaagagaggatagagattacaaagtcggtgatcgaagtgtgttgaggcattcaaatctctctgcattctcaaaatacaataatggtgctacttctgctaagaaggctccagaagaaaatgtggaaagttgttctcctcatgacagtcctattgcaaaactgttgggttcgagttcaagcagtgacaatcctttaaagcagcagtctagtggaagtgaccgatgggcacaaagagaagctgctttgatgaagtttcgccttaaacgtaaagagcgatgttttgagaaaaaggttaggtaccatagcaggaagaaactagctgagcaacggcctcacgtcaaaggtcaattcattcgcaagagggatgatcataaatcaggaagtgaagacaattga

SEQ ID NO: 95951 - protein, 495 aa, Arabidopsis thaliana
  peptide (1)..(495): Ceres Seq. ID no. 12731303
MCFNNIETGDEVETERQVFGSSEEDEFRVEDTARNTNNVQISQQQQQPLAHVVKWERYLPVRSLKVLLVENDDSTRHIVTALLKNCSYEVTAVPDVLEAWRILEDEKSCIDLVLTEVDMPVHSGTGLLSKIMSHKTLKNIPVIMMSSHDSMVLVFKCLSNGAVDFLVKPIRKNELKNLWQHVWRRCHSSSGSGSESGIHDKKSVKPESTQGSENDASISDEHRNESGSSGGLSNQDGGSDNGSGTQSSWTKRASDTKSTSPSNQFPDAPNKKGTYENGCAHVNRLKEAEDQKEQIGTGSQTGMSMSKKAEEPGDLEKNAKYSVQALERNNDDTLNRSSGNSQVESKAPSSNREDLQSLEQTLKKTREDRDYKVGDRSVLRHSNLSAFSKYNNGATSAKKAPEENVESCSPHDSPIAKLLGSSSSSDNPLKQQSSGSDRWAQREAALMKFRLKRKERCFEKKVRYHSRKKLAEQRPHVKGQFIRKRDDHKSGSEDN

SEQ ID NO: 95952 - protein, 377 aa, Arabidopsis thaliana
  peptide (1)..(377): Ceres Seq. ID no. 12731304
MPVHSGTGLLSKIMSHKTLKNIPVIMMSSHDSMVLVFKCLSNGAVDFLVKPIRKNELKNLWQHVWRRCHSSSGSGSESGIHDKKSVKPESTQGSENDASISDEHRNESGSSGGLSNQDGGSDNGSGTQSSWTKRASDTKSTSPSNQFPDAPNKKGTYENGCAHVNRLKEAEDQKEQIGTGSQTGMSMSKKAEEPGDLEKNAKYSVQALERNNDDTLNRSSGNSQVESKAPSSNREDLQSLEQTLKKTREDRDYKVGDRSVLRHSNLSAFSKYNNGATSAKKAPEENVESCSPHDSPIAKLLGSSSSSDNPLKQQSSGSDRWAQREAALMKFRLKRKERCFEKKVRYHSRKKLAEQRPHVKGQFIRKRDDHKSGSEDN

SEQ ID NO: 95953 - protein, 364 aa, Arabidopsis thaliana
  peptide (1)..(364): Ceres Seq. ID no. 12731305
MSHKTLKNIPVIMMSSHDSMVLVFKCLSNGAVDFLVKPIRKNELKNLWQHVWRRCHSSSGSGSESGIHDKKSVKPESTQGSENDASISDEHRNESGSSGGLSNQDGGSDNGSGTQSSWTKRASDTKSTSPSNQFPDAPNKKGTYENGCAHVNRLKEAEDQKEQIGTGSQTGMSMSKKAEEPGDLEKNAKYSVQALERNNDDTLNRSSGNSQVESKAPSSNREDLQSLEQTLKKTREDRDYKVGDRSVLRHSNLSAFSKYNNGATSAKKAPEENVESCSPHDSPIAKLLGSSSSSDNPLKQQSSGSDRWAQREAALMKFRLKRKERCFEKKVRYHSRKKLAEQRPHVKGQFIRKRDDHKSGSEDN

SEQ ID NO: 95954 - DNA, 2007 bp, Arabidopsis thaliana
  misc_feature (1)..(2007): Ceres Seq. ID no. 12731328
  misc_feature (1)..(2007): Ortholog of  Ceres SEQ ID NO 13654989 as cited in SEQ ID NO 63117
  misc_feature (1)..(2007): Ortholog of  Ceres SEQ ID NO 13655640 as cited in SEQ ID NO 63844
atgattcgaggattgcttttgggaatcatctggatgatattttgtgtttgttcatcatttcagcaagagacgccgtttgtttacaacaactttggtcacgtagatcatcttcaccttgacggtagtgcaagaatcattcccagtggtggtatcctgcaactgacaaatgcaaccaatagccaaataggtcatgttttctacgagaagccgattgagttcaaatcatctgaatcagtctcgttctcgacatattttgtgtgtgcactgctccctgctggtgatccgagtggccatggcatgaccttttttgtgtctcattccactgatttcaaaggcgcagaagcaactcgatacttcgggattttcaacagaaatggttctacttccacacgtgtgttggctgtagagcttgacacttctctagcttcagatgtgaaagacatcagcgataatcatgttgggattgatgtgaacagcgcagagtctattacatctgccaatgcttcttatttttcagacaaagaagggaagaagattgacataaaactcttgagtggtgatcctatccaggtttgggtggactatgaaggaacaacgctcaacgtttcattggctcctcttagaaacaagaaaccaagccgacctcttttgtcatcaacatccatcaatctaactgatattttgcaaggtagaagaatgtttgttgggttttctggctcaaccggatcaagcatgagttaccagtacatactcgggtggagtttcagcaaaagcatggcgtctctgccgaacattgacatctcaaaacttcccaaagttcctcactctagcactaaaaagaagtctacatctcctgtgctcagtgttctgcttggtttaatagctttcatagttttggggattcttgttgtagcttatttgtataggagaaacttgtactctgaagtaagagaggaatgggaaaaagagtatggtccaattaggtattcctacaaatctctatacaaagcaaccaaaggattcaataggagtgaatttcttgggagaggaggttttggtgaagtctacaaaggaactctccctcggagcagagaactgagagaagtagcagtgaagcgagtatcacatgatggtgagcacggtatgaagcaatttgttgctgagatcgtgagcatgaggagtttaaaacaccggagcttggttccacttcttgggtattgcaggagaaaacatgagttattactggtgtctgagtacatgccaaatggtagtcttgaccattacttgtttaatcatgatagattgtctcttccctggtggagaagacttgcgatccttagggacatcgcatcagctcttagttacttacatacagaagctgaccaagttgttatacacagagacatcaaagctgcaaatgttatgttggatgcagagttcaatggaaggttgggagattttggtatgtccaggttatatgacagaggggctgatccaagcacaacagctgcagtgggaactgttggttacatggcacctgagcttacaacaatgggagcttctactggaactgatgtgtacgcgtttggtgttttcttgcttgaagtaacttgtgggaggagacctgtggaacccggcttacctgaagcaaaacgttttctgatcaaatgggttagtgaatgctggaaaaggtcttctttgattgatgctagagatccaaggttgacagaattctcatcccaggaagtcgagaaggttctgaaactcggtttgctatgtgcaaaccttgctccagattcaagaccggccatggaacaagtggtgcaatacttaaatggaaacctagctttacccgagttttggcccaattctccagggattggagttctgtctccaatggcgctttccccagcaccactcgtgatcccttcactatcattttcgtcttcctcctccaacaactctatgtttattactcactcagtcctctacgggagtgggcgatga

SEQ ID NO: 95955 - protein, 668 aa, Arabidopsis thaliana
  peptide (1)..(668): Ceres Seq. ID no. 12731329
MIRGLLLGIIWMIFCVCSSFQQETPFVYNNFGHVDHLHLDGSARIIPSGGILQLTNATNSQIGHVFYEKPIEFKSSESVSFSTYFVCALLPAGDPSGHGMTFFVSHSTDFKGAEATRYFGIFNRNGSTSTRVLAVELDTSLASDVKDISDNHVGIDVNSAESITSANASYFSDKEGKKIDIKLLSGDPIQVWVDYEGTTLNVSLAPLRNKKPSRPLLSSTSINLTDILQGRRMFVGFSGSTGSSMSYQYILGWSFSKSMASLPNIDISKLPKVPHSSTKKKSTSPVLSVLLGLIAFIVLGILVVAYLYRRNLYSEVREEWEKEYGPIRYSYKSLYKATKGFNRSEFLGRGGFGEVYKGTLPRSRELREVAVKRVSHDGEHGMKQFVAEIVSMRSLKHRSLVPLLGYCRRKHELLLVSEYMPNGSLDHYLFNHDRLSLPWWRRLAILRDIASALSYLHTEADQVVIHRDIKAANVMLDAEFNGRLGDFGMSRLYDRGADPSTTAAVGTVGYMAPELTTMGASTGTDVYAFGVFLLEVTCGRRPVEPGLPEAKRFLIKWVSECWKRSSLIDARDPRLTEFSSQEVEKVLKLGLLCANLAPDSRPAMEQVVQYLNGNLALPEFWPNSPGIGVLSPMALSPAPLVIPSLSFSSSSSNNSMFITHSVLYGSGR

SEQ ID NO: 95956 - protein, 657 aa, Arabidopsis thaliana
  peptide (1)..(657): Ceres Seq. ID no. 12731330
MIFCVCSSFQQETPFVYNNFGHVDHLHLDGSARIIPSGGILQLTNATNSQIGHVFYEKPIEFKSSESVSFSTYFVCALLPAGDPSGHGMTFFVSHSTDFKGAEATRYFGIFNRNGSTSTRVLAVELDTSLASDVKDISDNHVGIDVNSAESITSANASYFSDKEGKKIDIKLLSGDPIQVWVDYEGTTLNVSLAPLRNKKPSRPLLSSTSINLTDILQGRRMFVGFSGSTGSSMSYQYILGWSFSKSMASLPNIDISKLPKVPHSSTKKKSTSPVLSVLLGLIAFIVLGILVVAYLYRRNLYSEVREEWEKEYGPIRYSYKSLYKATKGFNRSEFLGRGGFGEVYKGTLPRSRELREVAVKRVSHDGEHGMKQFVAEIVSMRSLKHRSLVPLLGYCRRKHELLLVSEYMPNGSLDHYLFNHDRLSLPWWRRLAILRDIASALSYLHTEADQVVIHRDIKAANVMLDAEFNGRLGDFGMSRLYDRGADPSTTAAVGTVGYMAPELTTMGASTGTDVYAFGVFLLEVTCGRRPVEPGLPEAKRFLIKWVSECWKRSSLIDARDPRLTEFSSQEVEKVLKLGLLCANLAPDSRPAMEQVVQYLNGNLALPEFWPNSPGIGVLSPMALSPAPLVIPSLSFSSSSSNNSMFITHSVLYGSGR

SEQ ID NO: 95957 - protein, 569 aa, Arabidopsis thaliana
  peptide (1)..(569): Ceres Seq. ID no. 12731331
MTFFVSHSTDFKGAEATRYFGIFNRNGSTSTRVLAVELDTSLASDVKDISDNHVGIDVNSAESITSANASYFSDKEGKKIDIKLLSGDPIQVWVDYEGTTLNVSLAPLRNKKPSRPLLSSTSINLTDILQGRRMFVGFSGSTGSSMSYQYILGWSFSKSMASLPNIDISKLPKVPHSSTKKKSTSPVLSVLLGLIAFIVLGILVVAYLYRRNLYSEVREEWEKEYGPIRYSYKSLYKATKGFNRSEFLGRGGFGEVYKGTLPRSRELREVAVKRVSHDGEHGMKQFVAEIVSMRSLKHRSLVPLLGYCRRKHELLLVSEYMPNGSLDHYLFNHDRLSLPWWRRLAILRDIASALSYLHTEADQVVIHRDIKAANVMLDAEFNGRLGDFGMSRLYDRGADPSTTAAVGTVGYMAPELTTMGASTGTDVYAFGVFLLEVTCGRRPVEPGLPEAKRFLIKWVSECWKRSSLIDARDPRLTEFSSQEVEKVLKLGLLCANLAPDSRPAMEQVVQYLNGNLALPEFWPNSPGIGVLSPMALSPAPLVIPSLSFSSSSSNNSMFITHSVLYGSGR

SEQ ID NO: 95958 - DNA, 2442 bp, Arabidopsis thaliana
  misc_feature (1)..(2442): Ceres Seq. ID no. 12731332
  misc_feature (1)..(2442): Ortholog of  Ceres SEQ ID NO 13655640 as cited in SEQ ID NO 63844
  misc_feature (1)..(2442): Ortholog of  Ceres SEQ ID NO 13584744 as cited in SEQ ID NO 69137
aggcttgaatcactgatacagaagcttacatcctctttttgtccattttttctccagcttgcgaggttatgattcatcatcagatccagactctctgattcatcatctgcaatggctcgttggttgcttcagatcctgatcatctcttctcttcatctgagctctgtatcaagtcaacaagagacaagctttgtctatgaaagcttcctcgaccgacaaaatctttatcttgacaaatctgcaatagtacttcccagtggattattgcagttgacaaatgcttcagagcaccagatgggtcatgctttccacaagaaaccaattgagttcagttcatctggaccactctccttctcaacacactttgtgtgtgctttggtgcctaagccaggttttgaaggtggccatggtattgtctttgtattgtctccttctatggactttactcacgcagaatcaactagatacttggggattttcaatgcttcaacaaatggatcttcctcttatcacgtacttgctgttgagcttgacactatttggaacccagatttcaaagatattgaccacaatcatgtggggattgatgtgaacagtcctatatctgtcgcaatagcttcagcatcttactattccgacatgaaagggagtaatgaaagcataaacctcttgagtggaaaccctatacaggtctgggtggattatgaaggcactttgctcaatgtttcggttgctcctcttgaagtccagaagccaactcgacctcttttatcacaccccatcaaccttacagaactttttccaaatagatcaagtctgtttgctgggttctctgcagcaacagggacagcgatcagtgatcaatatattctctggtggagttttagcatagacagaggatcgctgcagcgacttgatatctcaaaacttcctgaagttcctcatcctagagctccacataagaaagtatctacactgattattctcctacccgtttgtctggctattttggtgttggctgttcttgcaggactttatttccgcaggagacgcaagtattcagaagtatctgaaacatgggaaaaggagtttgatgcgcatcggttctcttacaggtccttgttcaaagcaacaaaggggttcagcaaagatgaatttctgggaaaaggaggttttggagaagtttatagaggaaatctcccacaaggcagagaaatagcagtgaaaagagtgtcccataatggtgatgaaggtgtgaagcagtttgtggctgaagtcgtgagcatgagatgtctgaaacacaggaatcttgtaccactgtttgggtattgcagaagaaaacgagaacttcttcttgtctcagagtacatgcccaatggtagtcttgacgagcatttgtttgatgaccagaaaccggttctttcttggtcacagagacttgtggtcgttaagggtatagcctctgctctctggtacctgcatacaggtgctgaccaagttgttctgcaccgagatgtcaaagcttccaacattatgttagacgcggagttccatggaaggttaggggattttggcatggccaggtttcatgagcacggaggcaatgcagctacaacagcagctgttgggactgtagggtacatggccccggagctaatcacaatgggagcttccactggaactgatgtttacgcatttggtgttttcatgcttgaagtaacctgtgggaggagacccgtggaaccgcagttgcaagttgagaaacgacatatgatcaaatgggtttgtgagtgctggaaaaaggattctttgcttgatgctactgacccgagattgggaggtaaatttgtagctgaggaagtcgagatggttatgaaactgggtctgctctgttcaaatatagtgccagaatccagacccacaatggaacaagtggtcctgtacctaaacaaaaacctacctttgccagatttctcaccatacactttggggattggcacatttgctccggttctggtagatgcatcctcccttgtagtctcttccgcttcatggagtttgtcaggtccatcgatgtcttcatcctcgcccaaccactcaccttacgcttggcagtcaacagatcagccatggggacagacaatagacactaagaactctcttcacatagttgcagaaccagagaagccctcacccgctgtcaaaatggtcacattgcctgcagaagatcctcagtccaatcattccagcatcagcagtcagaggtaaattagtgatgtacatatcagcaagaagatatcattattagctctcaatattgttttcatctgtctcacttgtcgcaacaaaatctgtttgttcgttgtataatcagttaatgattatacaattctcatattacaacttgtactcctcaatatgattttatacatgatttggtcc

SEQ ID NO: 95959 - protein, 718 aa, Arabidopsis thaliana; identical to SEQ ID NO: 76993
  peptide (1)..(718): Ceres Seq. ID no. 12731333

SEQ ID NO: 95960 - protein, 657 aa, Arabidopsis thaliana; identical to SEQ ID NO: 76994
  peptide (1)..(657): Ceres Seq. ID no. 12731334

SEQ ID NO: 95961 - protein, 610 aa, Arabidopsis thaliana; identical to SEQ ID NO: 76995
  peptide (1)..(610): Ceres Seq. ID no. 12731335

SEQ ID NO: 95962 - DNA, 1226 bp, Arabidopsis thaliana
  misc_feature (1)..(1226): Ceres Seq. ID no. 12731371
  misc_feature (1)..(1226): Ortholog of  Ceres SEQ ID NO 13594412 as cited in SEQ ID NO 58236
aagtctttgttcttccttctcgacgacggtgtcacttgcgatgaatctctccacgaggctcgctgaaaaacttcccggaatcttaccggcgccgtcttctcctctcctgcgtaaaggagtctccgagttaagatgcttttcaattgctaaccaaagtagaagattgagatggggattacaaaagaagatggtttggagtttggagagagctgagacctgtgtagtgagcaaatcatgtttagttcatcctgcaactgaagcctatgcacaagaagctattgaagctatcaaatccgaaaaagttattgctgtgcctaccgatacgctttatggcttcgcttgtgatgcttgttctttagaagcggttagccggatttatgagatcaaagggcgtaaacttacaagccctttagctatctgcgttggtgatgtattagatatcaagagagtggctaccacaagtcacttacctcacggtttacttgattcgctcttgcccggtccagtcactcttgtacttcaacgagtgttttaaacaggtgaatcaagcattcttgaaaagtccttgaacccagggattggtactattggagtacgggttccagattgtgaattcattagagaagtatcgagaggttcgggcagtgtgttggctcttacaagtgctaatttaagcggtgatagaagcagcgtttgtgttaaagattttgagaatctttggcagcattgtgcttatgtctatgatggtggtttacttccatcgggccgcgcaggatctacaatagtcgatctgactaaagttggaaagtacaagatcattaggcccggaagcgcgaaacaagcaacagtggcaattcttgagaagtatttgctggaagaagaagaagaagaagaccataaagagaagagagctagttaaactctgaatcatctgatctgacttgcaaaaatttgaggttttgctttggttcttactaaatttttgatattgggttaagatatgtttgtttttagtgcaatacgagaagattgttagtgttgagggggtatgctaatgctacctcccattcccatggtacgcatgtgtaatttgaagaaacttggtggaccatttcgtaatttttacttaagtttcttattattgctccatttggaaattaaactttgttgtaatcttattaaaaaattatcaaatattagtggaaatttttcctatttttaagaac

SEQ ID NO: 95963 - protein, 177 aa, Arabidopsis thaliana
  peptide (1)..(177): Ceres Seq. ID no. 12731372
SLCSSFSTTVSLAMNLSTRLAEKLPGILPAPSSPLLRKGVSELRCFSIANQSRRLRWGLQKKMVWSLERAETCVVSKSCLVHPATEAYAQEAIEAIKSEKVIAVPTDTLYGFACDACSLEAVSRIYEIKGRKLTSPLAICVGDVLDIKRVATTSHLPHGLLDSLLPGPVTLVLQRVF

SEQ ID NO: 95964 - protein, 164 aa, Arabidopsis thaliana
  peptide (1)..(164): Ceres Seq. ID no. 12731373
MNLSTRLAEKLPGILPAPSSPLLRKGVSELRCFSIANQSRRLRWGLQKKMVWSLERAETCVVSKSCLVHPATEAYAQEAIEAIKSEKVIAVPTDTLYGFACDACSLEAVSRIYEIKGRKLTSPLAICVGDVLDIKRVATTSHLPHGLLDSLLPGPVTLVLQRVF

SEQ ID NO: 95965 - protein, 115 aa, Arabidopsis thaliana
  peptide (1)..(115): Ceres Seq. ID no. 12731374
MVWSLERAETCVVSKSCLVHPATEAYAQEAIEAIKSEKVIAVPTDTLYGFACDACSLEAVSRIYEIKGRKLTSPLAICVGDVLDIKRVATTSHLPHGLLDSLLPGPVTLVLQRVF

SEQ ID NO: 95966 - DNA, 2199 bp, Arabidopsis thaliana
  misc_feature (1)..(2199): Ceres Seq. ID no. 12731390
  misc_feature (1)..(2199): Ortholog of  Ceres SEQ ID NO 12607856 as cited in SEQ ID NO 55419
aacctccttcattaccattaccttcctcctgattttaaccactctttccggctctgtctcactgctccatcttcctctcgctggtctagtcccgacgattactgctccatcttagccatgcccaccacaactctccctggctctatctctcccttcaatgtccctcatagtgttaggacgaaaaagccaaatgggcagcagaaaaaggaagaaatagagaaagaggtgtggatgttacgagagatgctggatcaagaagaaaagacacgtgagatattggaacaagtccaaaaacatcaacttccttcttcttcctcttcccttactcttcctgcttctctccctcccaagatgaaggaacttataacggaactatcaatcgtagaaggagaaatctcaagactagaaattcaaataagccatcttcagataaatctcaagcaagaacaagacgaaactttgaaacaagctacaacaagttcttcaagacgagcatggcaaactagtgagacttacaaggatgacaacataaacccttatcaagctccaacattaccaaaataccctaagctcccacctccaagccctatggtaaacaaaggcatgatgaagagtgaaaacaacaacaccaaatctactactagtcatcatcaagagaatgcaacatttggtacaaagacattgcatttcatcaacaaagctataaaaggtgattacgcgattgaaagcttccgcaagtctaacgagaaagttggagttgttgagaaggaaaatcatcggtcggtccaacatgaaaataaggtgcaagagaatatgaaaatgaaaaagattaggacgatgaaatcgccttcgcctctacgtgaacctagatatacctctcctaataagcctaataaggatcgtgtagcagcacttgatgcatcactagacattccaccaaaatctttatcaagcacaatcttgatggaagacggccaaaacattcagaagtggcacccaaacaagctcgccgagaacatcatgaagtgtctcaatttcatctacgttcgtcttcttagaaccacaagagtcatggagctagagaaaacaggacccatctcgagatccactaatttctctttgagctcaagaagctttagggtcgacaatgcaacctcaagcttgtcaaaatcgatgaatcttgtgtcttataaggaatcaagacaacaagatccttatggaatatttgatgtagaatcatctttggcaagagacattggtccttacaagaatcttgttatcttcacttcgagttctatggattccaagtgcatttcaagctctagctcggtttctttaatccagaaactcagggtactgatgaacaatcttgagactgtggatctaaaagtgttgagccatcaacaaaagctagcgttttggatcaacatgttcaatgcttgtgttatgcatggatatctacaacatggagttccaaaaactgctgagagattgcaatctcttgtatacaataaggctacaatgaatgtcggaggcaaaaacataagtgctcataccatagagcattgtatcctaaggaagtctacatcttctacaatgactcaggatcgacacgaagaaatgattattcgtaaactatatggcgtagaagcaacggatcctaacatcacatttgctctatcttgtggaactcgatcttctcctgcagtgaggatatacactggagaaggagtgacaacggagctagagaaatcaaagctggagtatctgcaagcctcgctggtggttaccgcggctaaacggataggcttgccggaacttctcctgaaacatgccaccgatttcgtggtgctcacggcggatggtggtactggagagatggagcagttaggatctttggtgaaatgggtttgcaaccaattaccaacctctggatcattgagaaaatcaatggtggattgttttaagaatccaaattccaaagcttcttcgtcctcctccgccgttgagaagataccttatgacttcgagtttcagtatcttttagccatttagggtactactactaattttttattcgtttatttgtgaaaatgttgtgtttcaaataaaaatatcaaaatttgtttgtttttttattatgaatatgtttgattgtaatatgacgtgtatatgtttgaacataatcatcgtatatct

SEQ ID NO: 95967 - protein, 684 aa, Arabidopsis thaliana
  peptide (1)..(684): Ceres Seq. ID no. 12731391
NLLHYHYLPPDFNHSFRLCLTAPSSSRWSSPDDYCSILAMPTTTLPGSISPFNVPHSVRTKKPNGQQKKEEIEKEVWMLREMLDQEEKTREILEQVQKHQLPSSSSSLTLPASLPPKMKELITELSIVEGEISRLEIQISHLQINLKQEQDETLKQATTSSSRRAWQTSETYKDDNINPYQAPTLPKYPKLPPPSPMVNKGMMKSENNNTKSTTSHHQENATFGTKTLHFINKAIKGDYAIESFRKSNEKVGVVEKENHRSVQHENKVQENMKMKKIRTMKSPSPLREPRYTSPNKPNKDRVAALDASLDIPPKSLSSTILMEDGQNIQKWHPNKLAENIMKCLNFIYVRLLRTTRVMELEKTGPISRSTNFSLSSRSFRVDNATSSLSKSMNLVSYKESRQQDPYGIFDVESSLARDIGPYKNLVIFTSSSMDSKCISSSSSVSLIQKLRVLMNNLETVDLKVLSHQQKLAFWINMFNACVMHGYLQHGVPKTAERLQSLVYNKATMNVGGKNISAHTIEHCILRKSTSSTMTQDRHEEMIIRKLYGVEATDPNITFALSCGTRSSPAVRIYTGEGVTTELEKSKLEYLQASLVVTAAKRIGLPELLLKHATDFVVLTADGGTGEMEQLGSLVKWVCNQLPTSGSLRKSMVDCFKNPNSKASSSSSAVEKIPYDFEFQYLLAI

SEQ ID NO: 95968 - protein, 645 aa, Arabidopsis thaliana
  peptide (1)..(645): Ceres Seq. ID no. 12731392
MPTTTLPGSISPFNVPHSVRTKKPNGQQKKEEIEKEVWMLREMLDQEEKTREILEQVQKHQLPSSSSSLTLPASLPPKMKELITELSIVEGEISRLEIQISHLQINLKQEQDETLKQATTSSSRRAWQTSETYKDDNINPYQAPTLPKYPKLPPPSPMVNKGMMKSENNNTKSTTSHHQENATFGTKTLHFINKAIKGDYAIESFRKSNEKVGVVEKENHRSVQHENKVQENMKMKKIRTMKSPSPLREPRYTSPNKPNKDRVAALDASLDIPPKSLSSTILMEDGQNIQKWHPNKLAENIMKCLNFIYVRLLRTTRVMELEKTGPISRSTNFSLSSRSFRVDNATSSLSKSMNLVSYKESRQQDPYGIFDVESSLARDIGPYKNLVIFTSSSMDSKCISSSSSVSLIQKLRVLMNNLETVDLKVLSHQQKLAFWINMFNACVMHGYLQHGVPKTAERLQSLVYNKATMNVGGKNISAHTIEHCILRKSTSSTMTQDRHEEMIIRKLYGVEATDPNITFALSCGTRSSPAVRIYTGEGVTTELEKSKLEYLQASLVVTAAKRIGLPELLLKHATDFVVLTADGGTGEMEQLGSLVKWVCNQLPTSGSLRKSMVDCFKNPNSKASSSSSAVEKIPYDFEFQYLLAI

SEQ ID NO: 95969 - protein, 607 aa, Arabidopsis thaliana
  peptide (1)..(607): Ceres Seq. ID no. 12731393
MLREMLDQEEKTREILEQVQKHQLPSSSSSLTLPASLPPKMKELITELSIVEGEISRLEIQISHLQINLKQEQDETLKQATTSSSRRAWQTSETYKDDNINPYQAPTLPKYPKLPPPSPMVNKGMMKSENNNTKSTTSHHQENATFGTKTLHFINKAIKGDYAIESFRKSNEKVGVVEKENHRSVQHENKVQENMKMKKIRTMKSPSPLREPRYTSPNKPNKDRVAALDASLDIPPKSLSSTILMEDGQNIQKWHPNKLAENIMKCLNFIYVRLLRTTRVMELEKTGPISRSTNFSLSSRSFRVDNATSSLSKSMNLVSYKESRQQDPYGIFDVESSLARDIGPYKNLVIFTSSSMDSKCISSSSSVSLIQKLRVLMNNLETVDLKVLSHQQKLAFWINMFNACVMHGYLQHGVPKTAERLQSLVYNKATMNVGGKNISAHTIEHCILRKSTSSTMTQDRHEEMIIRKLYGVEATDPNITFALSCGTRSSPAVRIYTGEGVTTELEKSKLEYLQASLVVTAAKRIGLPELLLKHATDFVVLTADGGTGEMEQLGSLVKWVCNQLPTSGSLRKSMVDCFKNPNSKASSSSSAVEKIPYDFEFQYLLAI

SEQ ID NO: 95970 - DNA, 2250 bp, Arabidopsis thaliana
  misc_feature (1)..(2250): Ceres Seq. ID no. 12731394
  misc_feature (1)..(2250): Ortholog of  Ceres SEQ ID NO 13661594 as cited in SEQ ID NO 61098
atgacggagacgacgaaggtgatgtacatagtggtggtcgatggaacggatacggcggagacggtggaagaagacgggaccgggacttggaaagattcgtttaggtatacacgtcctgttttgcagagtactcttcagcttatgggatgcaaagcccgtcacgccttcaagattagccgcagggtgtttgagttaataagaagtgagggatctttaatcctttctccctcgctttcgccctcgcatagtaaagaatctgaatttcagaagacaggtgatgcttcagcttgtgctaatgtagaaaaggctaacaaagttaacagtttggctactgatgatgttgataagagtaaaagtaagccgtttgaggtgtacaaaaggcgaacaaccgttgttgtttctcgtgaaatatttgtaaacgttgtctgtgatgccctggctgagtacaagtatgtgggtcatgaccaaagggcagacttgattctgtcgtgcagaatccgagaaaggaaagaatctgtgactgttctactgtgcggtactagtggctgtggcaaatctacactctccgcacttctggctttacaatactggattctgttttccttacagggaagtaggcttgggattacaacggtggtctcaaccgactcaatccgtcacatgatgaggagtttcgttgatgaaaagcagaatcctttgctatgggcttcaacataccatgctggagagtaccttgaccctgtggcagttgctgagtcaaaagccagaagaagaagagccaaaaaaatggatagtattgaggacgaaaaagcgaaagcctctgaaggtgggaaggctaagaatactcaacagactgatgttggatcaacaaaaaacacccctgtattgttaagtcccaagcaaatggctgtagaaggatttaaggctcaaagtgaaatggttattgacaatctcgataggctcattaccgcatgggaagaaaggaaagagtctgttattgttgaaggtgtccatttaagcctcaactttgtgatgggactgatgaaaaagcatccttctatagttcctttcatggtatacatcgcaaacgaggagaaacatttggaacgatttgcagttagagctaagtacatgaccctggacccagagaaaaacaagtatgtaaaatatatacgtaacatcagaacaatacaggattacttgtgtaaacgagctgacaaacatctcgtccccaagataaacaataccaatgtcgacaagagtgtggctgcgatccacgctacagtcttcagttgcctgcgtaggcgagaagcaggagagcatctctatgatgctactacaaatactgtctcagtgattgacgatgagtatagaaaccagtgtacagctaattcattgagctccaaaggaatgtttcagctgatccaaagaaaaggttcttctaggcatcttatggctcttctcaatactgatggcactttcgcaagaacttggcccgttactggtaaggtcgatgagagtggaaagccagtcttttgtaatgagatgattgaagaaaatggaatggagcacccggtctatggatacctacagaaagctgaaccggtgaatcttcagtttggtctatttgggatcagtgcttggcctagtgatggagccactagccgcgctgggagtgtagatgactgtaaagctgacatggctgaaaccagcagtcggtattactcttcttgctgcagctcgcctaggatgtctgaaggaacttctaaagagcttaaggaggatcagtcagtccatgggagcgatgaagaagtcgaggatgatcctcccgagccagatacagattttagcgatgacgataacaagcgagaccatgacgaggtgggttcggttgatgagcaatcaacaaagtcagatgaggagtacgatgatcttgctatggaagacaaaagctactggacagatgaagaggaagagtcacgagatacgattgcaataatgtctgaaaaaaacaacaagcaagcaacaaaagaagacaagtacatacagaacttagacctttttctacggaccgcaaaccagcagcttgtcgagccacttcagctatgtgcatcactgctcacatgcgagaatgggaacacaagactctggttgggtaaagaaaagatgaggaaacgttctttaagcatctcggccattggcaaacatgggtcgggtttgggtgatgcgattctcttgggtgccccatga

SEQ ID NO: 95971 - protein, 749 aa, Arabidopsis thaliana
  peptide (1)..(749): Ceres Seq. ID no. 12731395
MTETTKVMYIVVVDGTDTAETVEEDGTGTWKDSFRYTRPVLQSTLQLMGCKARHAFKISRRVFELIRSEGSLILSPSLSPSHSKESEFQKTGDASACANVEKANKVNSLATDDVDKSKSKPFEVYKRRTTVVVSREIFVNVVCDALAEYKYVGHDQRADLILSCRIRERKESVTVLLCGTSGCGKSTLSALLALQYWILFSLQGSRLGITTVVSTDSIRHMMRSFVDEKQNPLLWASTYHAGEYLDPVAVAESKARRRRAKKMDSIEDEKAKASEGGKAKNTQQTDVGSTKNTPVLLSPKQMAVEGFKAQSEMVIDNLDRLITAWEERKESVIVEGVHLSLNFVMGLMKKHPSIVPFMVYIANEEKHLERFAVRAKYMTLDPEKNKYVKYIRNIRTIQDYLCKRADKHLVPKINNTNVDKSVAAIHATVFSCLRRREAGEHLYDATTNTVSVIDDEYRNQCTANSLSSKGMFQLIQRKGSSRHLMALLNTDGTFARTWPVTGKVDESGKPVFCNEMIEENGMEHPVYGYLQKAEPVNLQFGLFGISAWPSDGATSRAGSVDDCKADMAETSSRYYSSCCSSPRMSEGTSKELKEDQSVHGSDEEVEDDPPEPDTDFSDDDNKRDHDEVGSVDEQSTKSDEEYDDLAMEDKSYWTDEEEESRDTIAIMSEKNNKQATKEDKYIQNLDLFLRTANQQLVEPLQLCASLLTCENGNTRLWLGKEKMRKRSLSISAIGKHGSGLGDAILLGAP

SEQ ID NO: 95972 - protein, 742 aa, Arabidopsis thaliana
  peptide (1)..(742): Ceres Seq. ID no. 12731396
MYIVVVDGTDTAETVEEDGTGTWKDSFRYTRPVLQSTLQLMGCKARHAFKISRRVFELIRSEGSLILSPSLSPSHSKESEFQKTGDASACANVEKANKVNSLATDDVDKSKSKPFEVYKRRTTVVVSREIFVNVVCDALAEYKYVGHDQRADLILSCRIRERKESVTVLLCGTSGCGKSTLSALLALQYWILFSLQGSRLGITTVVSTDSIRHMMRSFVDEKQNPLLWASTYHAGEYLDPVAVAESKARRRRAKKMDSIEDEKAKASEGGKAKNTQQTDVGSTKNTPVLLSPKQMAVEGFKAQSEMVIDNLDRLITAWEERKESVIVEGVHLSLNFVMGLMKKHPSIVPFMVYIANEEKHLERFAVRAKYMTLDPEKNKYVKYIRNIRTIQDYLCKRADKHLVPKINNTNVDKSVAAIHATVFSCLRRREAGEHLYDATTNTVSVIDDEYRNQCTANSLSSKGMFQLIQRKGSSRHLMALLNTDGTFARTWPVTGKVDESGKPVFCNEMIEENGMEHPVYGYLQKAEPVNLQFGLFGISAWPSDGATSRAGSVDDCKADMAETSSRYYSSCCSSPRMSEGTSKELKEDQSVHGSDEEVEDDPPEPDTDFSDDDNKRDHDEVGSVDEQSTKSDEEYDDLAMEDKSYWTDEEEESRDTIAIMSEKNNKQATKEDKYIQNLDLFLRTANQQLVEPLQLCASLLTCENGNTRLWLGKEKMRKRSLSISAIGKHGSGLGDAILLGAP

SEQ ID NO: 95973 - protein, 702 aa, Arabidopsis thaliana
  peptide (1)..(702): Ceres Seq. ID no. 12731397
MGCKARHAFKISRRVFELIRSEGSLILSPSLSPSHSKESEFQKTGDASACANVEKANKVNSLATDDVDKSKSKPFEVYKRRTTVVVSREIFVNVVCDALAEYKYVGHDQRADLILSCRIRERKESVTVLLCGTSGCGKSTLSALLALQYWILFSLQGSRLGITTVVSTDSIRHMMRSFVDEKQNPLLWASTYHAGEYLDPVAVAESKARRRRAKKMDSIEDEKAKASEGGKAKNTQQTDVGSTKNTPVLLSPKQMAVEGFKAQSEMVIDNLDRLITAWEERKESVIVEGVHLSLNFVMGLMKKHPSIVPFMVYIANEEKHLERFAVRAKYMTLDPEKNKYVKYIRNIRTIQDYLCKRADKHLVPKINNTNVDKSVAAIHATVFSCLRRREAGEHLYDATTNTVSVIDDEYRNQCTANSLSSKGMFQLIQRKGSSRHLMALLNTDGTFARTWPVTGKVDESGKPVFCNEMIEENGMEHPVYGYLQKAEPVNLQFGLFGISAWPSDGATSRAGSVDDCKADMAETSSRYYSSCCSSPRMSEGTSKELKEDQSVHGSDEEVEDDPPEPDTDFSDDDNKRDHDEVGSVDEQSTKSDEEYDDLAMEDKSYWTDEEEESRDTIAIMSEKNNKQATKEDKYIQNLDLFLRTANQQLVEPLQLCASLLTCENGNTRLWLGKEKMRKRSLSISAIGKHGSGLGDAILLGAP

SEQ ID NO: 95974 - DNA, 615 bp, Arabidopsis thaliana
  misc_feature (1)..(615): Ceres Seq. ID no. 12731434
  misc_feature (1)..(615): Ortholog of  Ceres SEQ ID NO 15171245 as cited in SEQ ID NO 52264
  misc_feature (1)..(615): Ortholog of  Ceres SEQ ID NO 14303576 as cited in SEQ ID NO 68428
atggagtctctcttctccacgatgattgtcctgctcttggtttctttttcctgtctcatttctacagaagctctcaccagcaactatggaaacatcacagtcaaatgggatctcttgaactggacgcctgatggctacgttgcagtggttacagcctacaattaccagaagcaacgttcgattccaggatggaaaatgagctggagagggaccaagaaagaagtgatctggaacatgttgggtgcaaaaacgacagggcaaggaggttgttccatgttcaaaggaaatatcccgcagtcctgcgttcgtaagccaacagttgtcgatttgcttcccggaactcctttcaatcagcagatcgctaattgctgcaaaagcggtgtcttaaaacctggttcagaaagtgcattccagttatctgttggtagcgctggtaactcggttaagactgctcggatgccggcaaacttcatgttcacggcacctaaacaacagtacatatgtggaccgagtaagaacgttagaccaacgaggtttacaaccgccgacaaaaggagaataactgcagccctaatgacctggaacattacttgcgtcttccacaaagcaacatga

SEQ ID NO: 95975 - protein, 204 aa, Arabidopsis thaliana
  peptide (1)..(204): Ceres Seq. ID no. 12731435
MESLFSTMIVLLLVSFSCLISTEALTSNYGNITVKWDLLNWTPDGYVAVVTAYNYQKQRSIPGWKMSWRGTKKEVIWNMLGAKTTGQGGCSMFKGNIPQSCVRKPTVVDLLPGTPFNQQIANCCKSGVLKPGSESAFQLSVGSAGNSVKTARMPANFMFTAPKQQYICGPSKNVRPTRFTTADKRRITAALMTWNITCVFHKAT

SEQ ID NO: 95976 - protein, 197 aa, Arabidopsis thaliana
  peptide (1)..(197): Ceres Seq. ID no. 12731436
MIVLLLVSFSCLISTEALTSNYGNITVKWDLLNWTPDGYVAVVTAYNYQKQRSIPGWKMSWRGTKKEVIWNMLGAKTTGQGGCSMFKGNIPQSCVRKPTVVDLLPGTPFNQQIANCCKSGVLKPGSESAFQLSVGSAGNSVKTARMPANFMFTAPKQQYICGPSKNVRPTRFTTADKRRITAALMTWNITCVFHKAT

SEQ ID NO: 95977 - protein, 139 aa, Arabidopsis thaliana
  peptide (1)..(139): Ceres Seq. ID no. 12731437
MSWRGTKKEVIWNMLGAKTTGQGGCSMFKGNIPQSCVRKPTVVDLLPGTPFNQQIANCCKSGVLKPGSESAFQLSVGSAGNSVKTARMPANFMFTAPKQQYICGPSKNVRPTRFTTADKRRITAALMTWNITCVFHKAT

SEQ ID NO: 95978 - DNA, 1083 bp, Arabidopsis thaliana
  misc_feature (1)..(1083): Ceres Seq. ID no. 12731438
  misc_feature (1)..(1083): Ortholog of  Ceres SEQ ID NO 13598579 as cited in SEQ ID NO 65523
atgagatcaggagaatgtgatgaagaggagattcaagcaaagcaagaaagagatcaaaatcaaaatcatcaagtaaacttaaaccacatgttgcaacaacaacagccgagttcggtatcatcttcaaggcaatggacttcagcttttaggaatccaagaatcgttcgagtctcaagaacattcggtggcaaagacagacacagcaaagtatgtacagtccgtggtcttcgagaccggaggataaggttgtccgtacctacagctattcaactctacgaccttcaagatcgattagggctgagtcagccaagcaaagtcattgattggttactcgaagcagcaaaagatgacgtagacaagctacctcctctacaattcccacatggatttaaccagatgtatccaaatctcatcttcggaaactccgggtttggagaatctccatcttcaactacatcaacaacgtttccaggaaccaatctcgggttcttggaaaattgggatcttggtggttcttcaagaacaagagcaagattaaccgatacaactacgacccaaagagaaagttttgatcttgataaaggaaaatggatcaaaaacgacgagaatagtaatcaagatcatcaagggtttaacaccaatcatcaacaacaatttcctctgaccaatccgtacaacaacacttcagcttattacaaccttggacatcttcaacaatcgttagaccaatctggtaataacgttactgtcgcaatatctaatgttgctgctaataataacaataatctcaatttgcatcctccttcctcgtctgccggagatggatctcagctttttttcggtcctactcctccggcaatgagctctctattcccgacatacccttcgtttcttggagcttctcatcatcatcatgtcgtcgatggagccggtcatcttcagctctttagctcgaattcaaataccgcatcgcagcaacacatgatgccgggtaatacgagtttgattagaccatttcatcatttgatgagctcgaatcatgatacggatcatcatagtagcgataatgaatcagattcttga

SEQ ID NO: 95979 - protein, 360 aa, Arabidopsis thaliana
  peptide (1)..(360): Ceres Seq. ID no. 12731439
MRSGECDEEEIQAKQERDQNQNHQVNLNHMLQQQQPSSVSSSRQWTSAFRNPRIVRVSRTFGGKDRHSKVCTVRGLRDRRIRLSVPTAIQLYDLQDRLGLSQPSKVIDWLLEAAKDDVDKLPPLQFPHGFNQMYPNLIFGNSGFGESPSSTTSTTFPGTNLGFLENWDLGGSSRTRARLTDTTTTQRESFDLDKGKWIKNDENSNQDHQGFNTNHQQQFPLTNPYNNTSAYYNLGHLQQSLDQSGNNVTVAISNVAANNNNNLNLHPPSSSAGDGSQLFFGPTPPAMSSLFPTYPSFLGASHHHHVVDGAGHLQLFSSNSNTASQQHMMPGNTSLIRPFHHLMSSNHDTDHHSSDNESDS

SEQ ID NO: 95980 - protein, 331 aa, Arabidopsis thaliana
  peptide (1)..(331): Ceres Seq. ID no. 12731440
MLQQQQPSSVSSSRQWTSAFRNPRIVRVSRTFGGKDRHSKVCTVRGLRDRRIRLSVPTAIQLYDLQDRLGLSQPSKVIDWLLEAAKDDVDKLPPLQFPHGFNQMYPNLIFGNSGFGESPSSTTSTTFPGTNLGFLENWDLGGSSRTRARLTDTTTTQRESFDLDKGKWIKNDENSNQDHQGFNTNHQQQFPLTNPYNNTSAYYNLGHLQQSLDQSGNNVTVAISNVAANNNNNLNLHPPSSSAGDGSQLFFGPTPPAMSSLFPTYPSFLGASHHHHVVDGAGHLQLFSSNSNTASQQHMMPGNTSLIRPFHHLMSSNHDTDHHSSDNESDS

SEQ ID NO: 95981 - protein, 228 aa, Arabidopsis thaliana
  peptide (1)..(228): Ceres Seq. ID no. 12731441
MYPNLIFGNSGFGESPSSTTSTTFPGTNLGFLENWDLGGSSRTRARLTDTTTTQRESFDLDKGKWIKNDENSNQDHQGFNTNHQQQFPLTNPYNNTSAYYNLGHLQQSLDQSGNNVTVAISNVAANNNNNLNLHPPSSSAGDGSQLFFGPTPPAMSSLFPTYPSFLGASHHHHVVDGAGHLQLFSSNSNTASQQHMMPGNTSLIRPFHHLMSSNHDTDHHSSDNESDS

SEQ ID NO: 95982 - DNA, 2792 bp, Arabidopsis thaliana
  misc_feature (1)..(2792): Ceres Seq. ID no. 12731446
  misc_feature (1)..(2792): Ortholog of  Ceres SEQ ID NO 13598865 as cited in SEQ ID NO 0
tctttcccttcttcttccccaataatctcgctgaaactctcttgctcttgcttctaaaaatctgttctttgagactttgatcacacagttatcaaaatcataatctcttctttcctggtttttttttttttcttcttcttcttcccgtttcacggtacgtttactctgttcgatcaccgagtgtatgataaaatgtttctgtgaaatcaaataacatatcactttctaataaacatcaaaatttctccttttttacagaaacaagaagtttttttgggaaagccgttgacttgactttttctttggggtgttgtgtgggagcttatagtatggtaccataagtgggagcttatagtttggggtgttgtgtgggagcttatagtatgaggaaaaatgttagatttgaagaatgcttcactgattttttaccataagtatgtcaactggattaagcttaagtagtaatggtttttactatgttcatgtggggatttctcttcctctctgtttacttcattccgagatgacttgagattttttcaaagtatagttcttggagttaagcttacctagtaatcactttatataacatcccttcgtttacatttgtgctttcacctggaaacactttagacttttctctcttctgccgtgtgtatttagttgtctagtcaaatttaagttgagtttaggctctagtctttggttttggttatggcagagtttgattccaaggttcctgtttccggaatgaacaatcatgtctttgaggcatgtcaccatgttgttaaggcactgagggcatctgataacaacctggatgccaatttgagaaagctcctaagtgacctagagatgcatttgtcaacatttgggattgctgataccaaagttgaagatgcaggattctctgagatcaagaagagattcaaagaagctgtgaagagaatccgcagttgggagacaaaccagtcgacgatgtttgaagctggtctgtctgaagctgatcagttctttcaagccctgtatgacgttcaaacagttcttgtgggtttcaaagctttgcccatgaaaactaaccagatggagaaagatgtttacaaccaagctacggttgctcttgacatcgcgatgttgaggcttgagaaagagctctgtgatgttctgcatcagcacaaacggcatgtacagcctgattacttggctgttagttcccgtagaaaagatattgtgtacgacgagtcctttgtctccctagatgatgaagttattgtcgaagcttcttcacatgaagatgatgaacagatatcggacttttataattctgatttggttgatcccatcgtacttcctcacatcaaagctattgcaaacgccatgtttgcttgcgagtatgatcaaccattctgtgaagctttcatcggcgttcaaagagaagctctggaggagtatatggttactctcgaaatggaaagattcagctgcgttgatgttctcagaatggactgggaggatttgaatggtgcaatgagaaaatggacaaaggttgttaagatcattactcaggtctatctcgccagtgaaaaacagctatgtgatcagattttgggagactttgagtcaatttctacagcttgcttcattgaaatctcaaaagatgcaattctatcactcctcaactttggagaagctgtggtgctgagatcttgcaagccagaaatgcttgagcgcttccttagtatgtatgaggtttcagcagagattctcgtggatgtcgataacctcttccccgatgaaacaggctcgtctttaagaattgcatttcacaacctgtcaaaaaaactagctgatcatacaaccacaaccttcttaaagttcaaagacgcaatagcctcagatgaatccacacgcccctttcatggaggcgggattcatcacctgaccaggtatgtaatgaactacttgaagcttctcccggagtataccgactcactaaactcactgcttcagaacatacacgttgacgactccatccccgagaaaacaggagaagatgtcctcccttcgacattctctccaatggctagacacctcaggtcaatcgtcacaactctagaatccagccttgagcgaaaagctcagctgtacgcagacgaagcactgaaatccattttcctgatgaacaacttccgttacatggtccagaaggtaaagggatcagagctgagacgcttgtttggagacgaatggatcaggaagcacattgcaagctaccaatgcaatgtcactaactacgagagatccacatggagctccatactcgctttgctcagagacaacaacgactctgtaagaaccctgagagaaagatgcagacttttcagccttgcatttgatgatgtttacaagaaccaaacccgttggtcagtccctgattcagagctccgcgatgatcttcacatctcgacctctgtcaaggttgttcagtcttacagaggatttcttggaagaaatgcagttcgcataggcgaaaaacacatccgatacacttgtgaagacattgagaatatgctccttgatctctttgaatgtttgccatctccaagatcactgcgcagctctcgtaagagatgatgatgatgatgacttgagcctaatggactccatctttgttcttttgatcttttgttatttactcacttatgcaatgttttgtgattgcttacatgcaaataaagttgtagaatttttatactccattgtggggatgtaatagtaattggctatcttgt

SEQ ID NO: 95983 - protein, 639 aa, Arabidopsis thaliana
  peptide (1)..(639): Ceres Seq. ID no. 12731447
MAEFDSKVPVSGMNNHVFEACHHVVKALRASDNNLDANLRKLLSDLEMHLSTFGIADTKVEDAGFSEIKKRFKEAVKRIRSWETNQSTMFEAGLSEADQFFQALYDVQTVLVGFKALPMKTNQMEKDVYNQATVALDIAMLRLEKELCDVLHQHKRHVQPDYLAVSSRRKDIVYDESFVSLDDEVIVEASSHEDDEQISDFYNSDLVDPIVLPHIKAIANAMFACEYDQPFCEAFIGVQREALEEYMVTLEMERFSCVDVLRMDWEDLNGAMRKWTKVVKIITQVYLASEKQLCDQILGDFESISTACFIEISKDAILSLLNFGEAVVLRSCKPEMLERFLSMYEVSAEILVDVDNLFPDETGSSLRIAFHNLSKKLADHTTTTFLKFKDAIASDESTRPFHGGGIHHLTRYVMNYLKLLPEYTDSLNSLLQNIHVDDSIPEKTGEDVLPSTFSPMARHLRSIVTTLESSLERKAQLYADEALKSIFLMNNFRYMVQKVKGSELRRLFGDEWIRKHIASYQCNVTNYERSTWSSILALLRDNNDSVRTLRERCRLFSLAFDDVYKNQTRWSVPDSELRDDLHISTSVKVVQSYRGFLGRNAVRIGEKHIRYTCEDIENMLLDLFECLPSPRSLRSSRKR

SEQ ID NO: 95984 - protein, 627 aa, Arabidopsis thaliana
  peptide (1)..(627): Ceres Seq. ID no. 12731448
MNNHVFEACHHVVKALRASDNNLDANLRKLLSDLEMHLSTFGIADTKVEDAGFSEIKKRFKEAVKRIRSWETNQSTMFEAGLSEADQFFQALYDVQTVLVGFKALPMKTNQMEKDVYNQATVALDIAMLRLEKELCDVLHQHKRHVQPDYLAVSSRRKDIVYDESFVSLDDEVIVEASSHEDDEQISDFYNSDLVDPIVLPHIKAIANAMFACEYDQPFCEAFIGVQREALEEYMVTLEMERFSCVDVLRMDWEDLNGAMRKWTKVVKIITQVYLASEKQLCDQILGDFESISTACFIEISKDAILSLLNFGEAVVLRSCKPEMLERFLSMYEVSAEILVDVDNLFPDETGSSLRIAFHNLSKKLADHTTTTFLKFKDAIASDESTRPFHGGGIHHLTRYVMNYLKLLPEYTDSLNSLLQNIHVDDSIPEKTGEDVLPSTFSPMARHLRSIVTTLESSLERKAQLYADEALKSIFLMNNFRYMVQKVKGSELRRLFGDEWIRKHIASYQCNVTNYERSTWSSILALLRDNNDSVRTLRERCRLFSLAFDDVYKNQTRWSVPDSELRDDLHISTSVKVVQSYRGFLGRNAVRIGEKHIRYTCEDIENMLLDLFECLPSPRSLRSSRKR

SEQ ID NO: 95985 - protein, 592 aa, Arabidopsis thaliana
  peptide (1)..(592): Ceres Seq. ID no. 12731449
MHLSTFGIADTKVEDAGFSEIKKRFKEAVKRIRSWETNQSTMFEAGLSEADQFFQALYDVQTVLVGFKALPMKTNQMEKDVYNQATVALDIAMLRLEKELCDVLHQHKRHVQPDYLAVSSRRKDIVYDESFVSLDDEVIVEASSHEDDEQISDFYNSDLVDPIVLPHIKAIANAMFACEYDQPFCEAFIGVQREALEEYMVTLEMERFSCVDVLRMDWEDLNGAMRKWTKVVKIITQVYLASEKQLCDQILGDFESISTACFIEISKDAILSLLNFGEAVVLRSCKPEMLERFLSMYEVSAEILVDVDNLFPDETGSSLRIAFHNLSKKLADHTTTTFLKFKDAIASDESTRPFHGGGIHHLTRYVMNYLKLLPEYTDSLNSLLQNIHVDDSIPEKTGEDVLPSTFSPMARHLRSIVTTLESSLERKAQLYADEALKSIFLMNNFRYMVQKVKGSELRRLFGDEWIRKHIASYQCNVTNYERSTWSSILALLRDNNDSVRTLRERCRLFSLAFDDVYKNQTRWSVPDSELRDDLHISTSVKVVQSYRGFLGRNAVRIGEKHIRYTCEDIENMLLDLFECLPSPRSLRSSRKR

SEQ ID NO: 95986 - DNA, 2175 bp, Arabidopsis thaliana
  misc_feature (1)..(2175): Ceres Seq. ID no. 12731454
  misc_feature (1)..(2175): Ortholog of  Ceres SEQ ID NO 14302828 as cited in SEQ ID NO 65549
atgcttttgaagtttgaagcttcttcagagttgagactagttgacccttcagtttctctcactgttcttcgaaagataagactgtcacatctcccggatatgacaatgaccagcgaatcttccggcaagaaatgcggagagggtgacggcaaagtcgccggtaaaagccagcgaaaggtgggtcttgtttatgacgagaccatgtgcaaacacgacacacctaacggtaaggttgacgtagagtgtcccgatcgtatcagagttatctgggagaagcttcagctcgccggagtcactcaaagatgtgtggttcttggtggtagtaaagctgaagataagcatctcaaattggttcacacaaagaaacatgttaatttagtgaagagtattagcacaaaaaagaaagattctcggagaaacaagattgcttcacagttggattcgatttatctgaatggaggttcatctgaagctgcatatcttgcagctggatctgttgtaaaggtggcagagaaagttgcagaaggagagttagattgtggctttgctattgtcaggcccccaggacaccatgccgagtcagatgaagccatgggtttttgtttattcaacaatgttgccgttgctgctagttttttactaaacgaaagacctgatctagatgtcaagaaaattctgattgtcgattgggatatccatcacggaaatggtacacagaagatgttctggaaagattctcgcgtactaatattctctgttcataggcatgatcacggaagtttctatccatttggcgatgatggagactttaacatggttggcgaaggtccaggtgaagggtttaacattaacgttccatgggagcaaggaggatgtggagatgcagactatcttgccgtatggaaccacatcttgatccctgtgaccaaggaattcaaaccagatattattttgctttcagctggatttgatgcagctattggtgatccgcttgggggttgttgtgttaccccatatggatattcagttatgttgaagaagctgatggagtttgcacatggaaagatagtgctggcattagagggaggatacaatcttgagtcattgggaaagtcttcactcgcatgtgtccaagttttgcttgaagacaaacaaattcatggttcatctgaaacatacccattagaatctacacggcgtgtcatacaagcggtacgcgagagactatgcacatattggccttcacttgacgcgtcaatggcgtctaatgagaatttaaagaacccaagtgcagaaagaaactccgctgacgccctccttcgtgaagtggaagagttaaagtctctaatggctgcccgagatggagaactggaggcaaggagaaaagagttaaaggccaaaaataaggagctagaagcgaacgagaaggagctagaagcgggactaatgttgattcgcgctcgggaggatgtaatctgtggtcttcatgcaaaaatagagagtttgcagcaggagcgagatgaggcggtagcgaaagctgaacgcatagataaggaactccaagaggatagggcaagaagccaggagttcaaagaagacacagagttttgcttgagtacgttaaggagggagaaggagcttgccatcatggccaaaaataaggacctagaagcgaaagagaaggagctagaagcgcggctaatgttggttcacgctcgggaggataaaattcatgccaaaatagagaggttgcagcaggagcgagatgaggccgtagcaaaagctgaacgcatagataaggaactccaagaggataggtcaagaagccgagttgggaatggatcttttgccttttctcaggagttctatgaagacatggacttagacgagctcgaacctctgtctccggagttcaatgaagacatggactcggaagagcttgaaccgtttcaggtcatcaagaaaaacatggagcgttcccacaagaagttcataaaagatatggagtgtatcaagtttatcgccagtgagagagccagggtactttaggttgggagcttgaggccgtagcagaagactaccacaagtttcgcgagatggttgataagctcgggaagagcaacatatacccttcttagaaagtacaatggtgtttcattgtaaccacagaacctt

SEQ ID NO: 95987 - protein, 682 aa, Arabidopsis thaliana
  peptide (1)..(682): Ceres Seq. ID no. 12731455
MLLKFEASSELRLVDPSVSLTVLRKIRLSHLPDMTMTSESSGKKCGEGDGKVAGKSQRKVGLVYDETMCKHDTPNGKVDVECPDRIRVIWEKLQLAGVTQRCVVLGGSKAEDKHLKLVHTKKHVNLVKSISTKKKDSRRNKIASQLDSIYLNGGSSEAAYLAAGSVVKVAEKVAEGELDCGFAIVRPPGHHAESDEAMGFCLFNNVAVAASFLLNERPDLDVKKILIVDWDIHHGNGTQKMFWKDSRVLIFSVHRHDHGSFYPFGDDGDFNMVGEGPGEGFNINVPWEQGGCGDADYLAVWNHILIPVTKEFKPDIILLSAGFDAAIGDPLGGCCVTPYGYSVMLKKLMEFAHGKIVLALEGGYNLESLGKSSLACVQVLLEDKQIHGSSETYPLESTRRVIQAVRERLCTYWPSLDASMASNENLKNPSAERNSADALLREVEELKSLMAARDGELEARRKELKAKNKELEANEKELEAGLMLIRAREDVICGLHAKIESLQQERDEAVAKAERIDKELQEDRARSQEFKEDTEFCLSTLRREKELAIMAKNKDLEAKEKELEARLMLVHAREDKIHAKIERLQQERDEAVAKAERIDKELQEDRSRSRVGNGSFAFSQEFYEDMDLDELEPLSPEFNEDMDSEELEPFQVIKKNMERSHKKFIKDMECIKFIASERARVL

SEQ ID NO: 95988 - protein, 649 aa, Arabidopsis thaliana
  peptide (1)..(649): Ceres Seq. ID no. 12731456
MTMTSESSGKKCGEGDGKVAGKSQRKVGLVYDETMCKHDTPNGKVDVECPDRIRVIWEKLQLAGVTQRCVVLGGSKAEDKHLKLVHTKKHVNLVKSISTKKKDSRRNKIASQLDSIYLNGGSSEAAYLAAGSVVKVAEKVAEGELDCGFAIVRPPGHHAESDEAMGFCLFNNVAVAASFLLNERPDLDVKKILIVDWDIHHGNGTQKMFWKDSRVLIFSVHRHDHGSFYPFGDDGDFNMVGEGPGEGFNINVPWEQGGCGDADYLAVWNHILIPVTKEFKPDIILLSAGFDAAIGDPLGGCCVTPYGYSVMLKKLMEFAHGKIVLALEGGYNLESLGKSSLACVQVLLEDKQIHGSSETYPLESTRRVIQAVRERLCTYWPSLDASMASNENLKNPSAERNSADALLREVEELKSLMAARDGELEARRKELKAKNKELEANEKELEAGLMLIRAREDVICGLHAKIESLQQERDEAVAKAERIDKELQEDRARSQEFKEDTEFCLSTLRREKELAIMAKNKDLEAKEKELEARLMLVHAREDKIHAKIERLQQERDEAVAKAERIDKELQEDRSRSRVGNGSFAFSQEFYEDMDLDELEPLSPEFNEDMDSEELEPFQVIKKNMERSHKKFIKDMECIKFIASERARVL

SEQ ID NO: 95989 - protein, 647 aa, Arabidopsis thaliana
  peptide (1)..(647): Ceres Seq. ID no. 12731457
MTSESSGKKCGEGDGKVAGKSQRKVGLVYDETMCKHDTPNGKVDVECPDRIRVIWEKLQLAGVTQRCVVLGGSKAEDKHLKLVHTKKHVNLVKSISTKKKDSRRNKIASQLDSIYLNGGSSEAAYLAAGSVVKVAEKVAEGELDCGFAIVRPPGHHAESDEAMGFCLFNNVAVAASFLLNERPDLDVKKILIVDWDIHHGNGTQKMFWKDSRVLIFSVHRHDHGSFYPFGDDGDFNMVGEGPGEGFNINVPWEQGGCGDADYLAVWNHILIPVTKEFKPDIILLSAGFDAAIGDPLGGCCVTPYGYSVMLKKLMEFAHGKIVLALEGGYNLESLGKSSLACVQVLLEDKQIHGSSETYPLESTRRVIQAVRERLCTYWPSLDASMASNENLKNPSAERNSADALLREVEELKSLMAARDGELEARRKELKAKNKELEANEKELEAGLMLIRAREDVICGLHAKIESLQQERDEAVAKAERIDKELQEDRARSQEFKEDTEFCLSTLRREKELAIMAKNKDLEAKEKELEARLMLVHAREDKIHAKIERLQQERDEAVAKAERIDKELQEDRSRSRVGNGSFAFSQEFYEDMDLDELEPLSPEFNEDMDSEELEPFQVIKKNMERSHKKFIKDMECIKFIASERARVL

SEQ ID NO: 95990 - DNA, 1562 bp, Arabidopsis thaliana
  misc_feature (1)..(1562): Ceres Seq. ID no. 12731458
  misc_feature (1)..(1562): Ortholog of  Ceres SEQ ID NO 14313049 as cited in SEQ ID NO 54099
  misc_feature (1)..(1562): Ortholog of  Ceres SEQ ID NO 14314054 as cited in SEQ ID NO 56939
  misc_feature (1)..(1562): Ortholog of  Ceres SEQ ID NO 13503468 as cited in SEQ ID NO 63271
  misc_feature (1)..(1562): Ortholog of  Ceres SEQ ID NO 14303592 as cited in SEQ ID NO 68603
gaataaactcatacgtacaaaggaatattatctaaaagacgagagtacaagtgagaaatggcgttaaaggtgatcaagatctcccgagtcagccctgcaaccgcctccgtcgacccgctcattgtcccactctcgttctttgatttacagtggcttaaactcaaccctaccgagcaagtcttcttttacaaactcaccgaatcatcatcatctcgcgacgttttctactcctccatcctccccaagctcgagcgatctctttcactcatcctcactcactttcgcctattcacgggtcaccttaagtgggattcacaagatccaaagccgcatttagttgttctctcaggagacacactctctctcacagtggctgagactgatgcggatttctcacgtatctctggcagagggcttcgtccagagctagagttacgccctctaatacccgagctaccgatttattctgactcgggggctgttgtatctctgcaagtcactttgttcccgaaacaaggcttctgcattggaaccacagcccaccatgtcgtcttggacggcaaaacggctgaaaaatttaacaaagcatgggctcacacttgtaaacatggcaccataccgaaaattctaccaacggttttagatcgttctgtcgtcaatgttccagccggacttgaacaaaagatgctcgaacttctgccgtatcttacggaggacgacaaagagaacggaagaaccctaaagctacctccagtcaaagagattaacgctaaagacaacgtcctccgaatcaccatcgagataagtcctgaaaacattgagaaactcaaggagagagccaagaaagagtcaacacgcgctgagcttcacttgtcaacgttcgtagtcacgttcgcccatgtgtggacatgcatggtgaaggcacgtagtggtgacccaaaccgaccggttcgtttcatgtacgctgctgattttaggaaccggttagaaccaccagtccctgtgacatacttcgggacttgtgtcttagccatggatttctataaatacaaagctaaggagtttatgggagaagatggatttgtcaacaccgtcgagattctcagtgattcggtcaaacgtttggcttcacaaggggtagagtcaacttggaaagtgtatgaggaaggaacaaagacaatgaaatggggtacacagttgttggtcgtaaacgggtcgaaccagattgggatgtacgaaacggacttcgggtggggaagacccattcacactgagacaatgtctatctacaagaacgatgagttctctatgtccaagaggagagatggtatcggtggcgtcgagattggcatctctttgaagaaacttgagatggatacttttctgtctttattttacaaatggattggaaactgaaaacgtacggtcttaatcgatcccagcttttgcttatttgtatttttatttctagttcaataattgccctatatgtactacgcaaatttgtattgattctgtcttttgaattctattttttggggtacaataatcatccatatttg

SEQ ID NO: 95991 - protein, 452 aa, Arabidopsis thaliana
  peptide (1)..(452): Ceres Seq. ID no. 12731459
MALKVIKISRVSPATASVDPLIVPLSFFDLQWLKLNPTEQVFFYKLTESSSSRDVFYSSILPKLERSLSLILTHFRLFTGHLKWDSQDPKPHLVVLSGDTLSLTVAETDADFSRISGRGLRPELELRPLIPELPIYSDSGAVVSLQVTLFPKQGFCIGTTAHHVVLDGKTAEKFNKAWAHTCKHGTIPKILPTVLDRSVVNVPAGLEQKMLELLPYLTEDDKENGRTLKLPPVKEINAKDNVLRITIEISPENIEKLKERAKKESTRAELHLSTFVVTFAHVWTCMVKARSGDPNRPVRFMYAADFRNRLEPPVPVTYFGTCVLAMDFYKYKAKEFMGEDGFVNTVEILSDSVKRLASQGVESTWKVYEEGTKTMKWGTQLLVVNGSNQIGMYETDFGWGRPIHTETMSIYKNDEFSMSKRRDGIGGVEIGISLKKLEMDTFLSLFYKWIGN

SEQ ID NO: 95992 - protein, 243 aa, Arabidopsis thaliana
  peptide (1)..(243): Ceres Seq. ID no. 12731460
MLELLPYLTEDDKENGRTLKLPPVKEINAKDNVLRITIEISPENIEKLKERAKKESTRAELHLSTFVVTFAHVWTCMVKARSGDPNRPVRFMYAADFRNRLEPPVPVTYFGTCVLAMDFYKYKAKEFMGEDGFVNTVEILSDSVKRLASQGVESTWKVYEEGTKTMKWGTQLLVVNGSNQIGMYETDFGWGRPIHTETMSIYKNDEFSMSKRRDGIGGVEIGISLKKLEMDTFLSLFYKWIGN

SEQ ID NO: 95993 - DNA, 1354 bp, Arabidopsis thaliana
  misc_feature (1)..(1354): Ceres Seq. ID no. 12731467
  misc_feature (1)..(1354): Ortholog of  Ceres SEQ ID NO 14312328 as cited in SEQ ID NO 59022
gttgtactctcaaattcttgggtcgttctgagtcgtctccgcgttaaatcttttccctttttgatcctttcttcctttcttcttcttcttcgcattgatttggtcctccttcctcttctattctattcattaagaacctaatcttcatcttctccatcttcttcttcacggactccacttcgctcatccaggaaggtttattagtagtaaccaatccaagtgttccttttgtttgaagcaacaagctttgtgatattatcctgagagacaatgtttggtttaaggaaatcaccggcaaatcttcccaagcataactcagtcgacctcaagtcttccaagccaaatcctttcgattcagatgatgaatctgacaacaaacatacccttaacccttctaagaggactacctctgaaccctctttggctgatatgacaaacccttttggtggtgagagagttcagaaaggagatagtagttcatccaaacagtcattgttttcgaactccaaataccagtacaagaacaatttccgtgattctggtggtattgaaaaccagtcggttcaggagcttgaaggttatgctgtgtacaaggctgaagagactacgaaatctgtacaaggttgtttgaaggtagcagaagatataaggtctgatgctaccagaactttggtcatgttacacgatcagggcgagcaaatcactaggacgcaccataaagccgttgaaatcgaccatgatctcagtcgtggtgagaaacttcttggaagccttggaggcatgttttcaaagacttggaaaccaaagaagactcgtcctataaatggtcccgtcgtaaccagagatgactcaccaacgagaagagttaaccacttagagaaaagggaaaaactgggactgaactcagcacccagaggacaatcaagaacccgagaaccactccccgaatcagctgatgcttatcagagagtggagatggaaaaagctaagcaagacgatgggctttcagacttgagtgatatactcggcgagctaaagaacatggctgttgacatgggaagcgaaatcgagaagcagaacaaaggacttgaccatcttcatgatgatgttgacgaactcaacttcagagtgcaacaatcaaaccaacgtggtcgccgtttgcttggaaagtagatgaacagagggtttatatgttcattacactcattcctcgtttgttttattctctatgaagttgttctttaaaactggaaagattcttatcatgttaaatacattattgctatctgtgtttgtatttgatcttgtgacaaaaaaccaaaaaacttattgatcaaacagaagcaactttggt

SEQ ID NO: 95994 - protein, 300 aa, Arabidopsis thaliana; identical to SEQ ID NO: 29602
  peptide (1)..(300): Ceres Seq. ID no. 12731468

SEQ ID NO: 95995 - protein, 247 aa, Arabidopsis thaliana; identical to SEQ ID NO: 29603
  peptide (1)..(247): Ceres Seq. ID no. 12731469

SEQ ID NO: 95996 - protein, 165 aa, Arabidopsis thaliana; identical to SEQ ID NO: 29604
  peptide (1)..(165): Ceres Seq. ID no. 12731470

SEQ ID NO: 95997 - DNA, 1841 bp, Arabidopsis thaliana
  misc_feature (1)..(1841): Ceres Seq. ID no. 12731471
  misc_feature (1)..(1841): Ortholog of  Ceres SEQ ID NO 12605517 as cited in SEQ ID NO 20422
aagttttcttaataagtttttcctctgtaatcatcatttgcttgttaagataagcagatcaaccaatcgaaagaaaccaaaatgggcttcaacgttgttgtgttcttgagttgtctgcttctacttcctcctgttacttttggtagcaacatggaacgaaccaccttggttatagacggctcacgtcgaatcgctgagaccgatgagaactttatctgcgcaacgcttgattggtggccacctgaaaaatgcaactatgatcaatgtccttggggttacgcatctctcatcaatttgaacttagcttctcctcttcttgctaaagctattcaagcttttaggacgttgaggataagaataggtggttccttgcaagatcaagtgatctacgacgttggagacttgaagactccttgcactcagttcaagaaaactgacgacggattgttcggattctctgaaggatgtttgtatatgaaacgttgggacgaagttaaccatttcttcaacgcaacgggagctattgtgactttcggtttgaacgcgctgcacgggagaaataaactcaacggaactgcgtggggaggtgattgggatcataccaacactcaggatttcatgaactacacagtctcaaagggttatgctatagactcgtgggagtttggtaatgagcttagtggaagcgggatttgggcaagcgtgagtgtagagctttatgggaaagacttgattgtactgaaaaatgtaatcaagaacgtttacaagaattctagaaccaagcctttggttgtagctccaggtggattctttgaagaacaatggtactcggagcttcttcggctctctgggcctggtgttcttgatgtcctgactcatcatatatacaatcttggtccagggaatgatcctaagctagtgaataagatactagatccaaattacttgagcggaatttcggaattattcgcgaatgtgaaccaaacaattcaagaacatggaccttgggctgctgcttgggttggagaagctggtggagcctttaacagtggtggccgtcaggtttccgagacattcattaacagtttctggtacttagatcagctcggtatttcgtcgaagcataacaccaaagtatactgcagacaagctttggtcggaggtttctacggtctgcttgaaaaggaaacgtttgttccaaatccagattactacagcgcgcttctttggcatcgtttgatgggtaaaggcattctcggcgttcagacgactgcctcggagtatctacgagcttacgttcattgctccaaaagaagagcgggtataacgattcttctgatcaatctgagtaagcacacgacgtttacagtcgcagtcagcaatggcgtgaaggtggttttgcaagcagaatcgatgaagaggaaatcgttcttggaaacaatcaagagcaaggtttcttgggttggaaacaaagcttcggacggatatttgaacagagaagagtatcacttgagtcccaaagacggtgacttgcgtagcaagataatgctcttgaatggtaaacctttggtaccgacagccaccggagatatcccaaagcttgagccggtccgtcatggtgtgaaatctccggtttatatcaatccgctgtcgatctctttcattgtgttgcctacctttgatgctcctgcttgttcttgaagaggatggtaactggtgaaaatcaaacattgaagaactactgtaaatttcttggcaattgtatatatgatcgatgtaacacatactattgtatactggaagtggtttattccaatctaaatatatataatcatttgatt

SEQ ID NO: 95998 - protein, 539 aa, Arabidopsis thaliana
  peptide (1)..(539): Ceres Seq. ID no. 12731472
MGFNVVVFLSCLLLLPPVTFGSNMERTTLVIDGSRRIAETDENFICATLDWWPPEKCNYDQCPWGYASLINLNLASPLLAKAIQAFRTLRIRIGGSLQDQVIYDVGDLKTPCTQFKKTDDGLFGFSEGCLYMKRWDEVNHFFNATGAIVTFGLNALHGRNKLNGTAWGGDWDHTNTQDFMNYTVSKGYAIDSWEFGNELSGSGIWASVSVELYGKDLIVLKNVIKNVYKNSRTKPLVVAPGGFFEEQWYSELLRLSGPGVLDVLTHHIYNLGPGNDPKLVNKILDPNYLSGISELFANVNQTIQEHGPWAAAWVGEAGGAFNSGGRQVSETFINSFWYLDQLGISSKHNTKVYCRQALVGGFYGLLEKETFVPNPDYYSALLWHRLMGKGILGVQTTASEYLRAYVHCSKRRAGITILLINLSKHTTFTVAVSNGVKVVLQAESMKRKSFLETIKSKVSWVGNKASDGYLNREEYHLSPKDGDLRSKIMLLNGKPLVPTATGDIPKLEPVRHGVKSPVYINPLSISFIVLPTFDAPACS

SEQ ID NO: 95999 - protein, 516 aa, Arabidopsis thaliana
  peptide (1)..(516): Ceres Seq. ID no. 12731473
MERTTLVIDGSRRIAETDENFICATLDWWPPEKCNYDQCPWGYASLINLNLASPLLAKAIQAFRTLRIRIGGSLQDQVIYDVGDLKTPCTQFKKTDDGLFGFSEGCLYMKRWDEVNHFFNATGAIVTFGLNALHGRNKLNGTAWGGDWDHTNTQDFMNYTVSKGYAIDSWEFGNELSGSGIWASVSVELYGKDLIVLKNVIKNVYKNSRTKPLVVAPGGFFEEQWYSELLRLSGPGVLDVLTHHIYNLGPGNDPKLVNKILDPNYLSGISELFANVNQTIQEHGPWAAAWVGEAGGAFNSGGRQVSETFINSFWYLDQLGISSKHNTKVYCRQALVGGFYGLLEKETFVPNPDYYSALLWHRLMGKGILGVQTTASEYLRAYVHCSKRRAGITILLINLSKHTTFTVAVSNGVKVVLQAESMKRKSFLETIKSKVSWVGNKASDGYLNREEYHLSPKDGDLRSKIMLLNGKPLVPTATGDIPKLEPVRHGVKSPVYINPLSISFIVLPTFDAPACS

SEQ ID NO: 96000 - protein, 408 aa, Arabidopsis thaliana
  peptide (1)..(408): Ceres Seq. ID no. 12731474
MKRWDEVNHFFNATGAIVTFGLNALHGRNKLNGTAWGGDWDHTNTQDFMNYTVSKGYAIDSWEFGNELSGSGIWASVSVELYGKDLIVLKNVIKNVYKNSRTKPLVVAPGGFFEEQWYSELLRLSGPGVLDVLTHHIYNLGPGNDPKLVNKILDPNYLSGISELFANVNQTIQEHGPWAAAWVGEAGGAFNSGGRQVSETFINSFWYLDQLGISSKHNTKVYCRQALVGGFYGLLEKETFVPNPDYYSALLWHRLMGKGILGVQTTASEYLRAYVHCSKRRAGITILLINLSKHTTFTVAVSNGVKVVLQAESMKRKSFLETIKSKVSWVGNKASDGYLNREEYHLSPKDGDLRSKIMLLNGKPLVPTATGDIPKLEPVRHGVKSPVYINPLSISFIVLPTFDAPACS

SEQ ID NO: 96001 - DNA, 2529 bp, Arabidopsis thaliana
  misc_feature (1)..(2529): Ceres Seq. ID no. 12731487
  misc_feature (1)..(2529): Ortholog of  Ceres SEQ ID NO 12638191 as cited in SEQ ID NO 674
  misc_feature (1)..(2529): Ortholog of  Ceres SEQ ID NO 14303105 as cited in SEQ ID NO 66589
  misc_feature (1)..(2529): Ortholog of  Ceres SEQ ID NO 13584744 as cited in SEQ ID NO 69137
atgggaggagattttcgtcatttctcctcccacgtttctctcctcctcctcttccttctcatcgtcaaatccagttcttcattcactccagctgataactacctcatcgattgtggctcctccgacgaaacaaaactctccgacggtcgtaatttcaaatccgatcaacaatccgtcgcgtttcttcaaacagatgaagacatcaaaacctccgtcgactcaattccgatcaccgactctaatgccagtacccttcccttatacttaaccgctagaatcttcgccggaaaatcaacttactccttctacatttcacgacctggtcgtcactggatccgtctccatttttatcctctcaatcatcctctctacaatctaacaaactccgtcttctccgtcaccaccgacaccaccgtcctcttacacgatttctccgccggagatacttcttctatcgtcttcaaagaatatctaatctacgccgcagagaaactctctctttatttcaaaccacataaaggctccaccgcttttatcaacgccgttgaaatcgtctctgttccggacgagcttgttccggactctgcttcctctgttcctcaagctcctgatttcaaaggcttaagtagcttctctcttgagatccttcatcggataaatatcggaggagatttgatttctccgaagatagatcctctctcacgcacttggctctctgataaaccttacaatacgttccctgaaggttcgagaaatgtcactgttgatcctagtacgattacttatccagacggtggagctacggcgttgatcgctcctaatccggtttacgccaccgcggaggaaatggccgatgcacaaacctcgcaacctaatttcaatctctcatggagaatgagtgttgattttggtcatgattacttcattaggttacatttttgtgacattgtaagcaaatcgcttaacgaccttatcttcaatgttttcatcaacaagctctctgcaatctctgcacttgacctctcctcactaaccagcgctttaggtacagcgtattacgcggatttcgtgcttaatgcgtctacgatcaccaatggttcgatcttggttcaggttggtccgactccgaatcttcagtcgggtaaaccgaatgcgatacttaacggtttagagatcatgaagctgaacaatgctgctgggagtttagatggactttttggagttgatgggaaatacaaaggaccgatcggtggtatgtcatctaagaagcttgctattgcgggtattgggtttgtgatggcgctaaccgctttcttaggggttgtcgtgttgcttgttagatggcagagacgtcctaaagactggcaaaaacagaatagtttctcgtcatggttgcttcctttacacgcaagtcactcgagttacatctcgagcaaaggcgggtcaacgtcgaggcggatgagtattttcgggtcaaagaagagtaagagcaatggattctctagcttcttctcaaaccagggattaggtcggtactttccctttaccgaactacagaccgcgacacaaaattttgacgagaatgctgtgtgtggagtcggaggattcggaaaagtctacataggagaaattgatggtgggacgcaggtcgcgatcaaaagagggagtcagagttcggagcaaggaatcaacgagtttcaaacagagattcagatgttgtccaaactcagacatagacatttggtttctctaatcggattttgcgatgaaaacaaagagatgattctcgtctacgaatacatgtcaaacggtcctctgcgtgaccatctctacggctccaaagaaaatgaccctaaccctattcctaccttgtcctggaagcaacgtctagagatctgcattggatcagcgcgtggactccactatctccacacgggtgcagcgcaggggatcatccaccgcgacgtcaagaccaccaacatcctcttggacgagaacctagtcgctaaagtttctgattttggactttcaaaagatgcgcctatggatgaagggcatgtaagtaccgcggtaaagggtagtttcgggtatttagaccccgaatacttccgcagacaacaactcactgataaatccgatgtttactcattcggtgtggtgttattcgaggttctttgcgcgaggccagtgataaacccacagttacctagagaacaagttaacttagcagaatatgctatgaatttgcatagaaaaggtatgttggagaaaatcatcgacccgaaaatcgtgggaacgattagtaaaggatcgttaaggaaattcgtggaggctgcagaaaaatgtttggcagagtacggtgttgatcgaccgggaatgggagatgtgttgtggaatcttgaatatgctttgcagcttcaagaagcatcggctcaagttgatttatcggaggataagactacaatgaatattgaaatggaccttattcccggcgaggaaatgcaatctccgtcgcattcaataccgtga

SEQ ID NO: 96002 - protein, 842 aa, Arabidopsis thaliana
  peptide (1)..(842): Ceres Seq. ID no. 12731488
MGGDFRHFSSHVSLLLLFLLIVKSSSSFTPADNYLIDCGSSDETKLSDGRNFKSDQQSVAFLQTDEDIKTSVDSIPITDSNASTLPLYLTARIFAGKSTYSFYISRPGRHWIRLHFYPLNHPLYNLTNSVFSVTTDTTVLLHDFSAGDTSSIVFKEYLIYAAEKLSLYFKPHKGSTAFINAVEIVSVPDELVPDSASSVPQAPDFKGLSSFSLEILHRINIGGDLISPKIDPLSRTWLSDKPYNTFPEGSRNVTVDPSTITYPDGGATALIAPNPVYATAEEMADAQTSQPNFNLSWRMSVDFGHDYFIRLHFCDIVSKSLNDLIFNVFINKLSAISALDLSSLTSALGTAYYADFVLNASTITNGSILVQVGPTPNLQSGKPNAILNGLEIMKLNNAAGSLDGLFGVDGKYKGPIGGMSSKKLAIAGIGFVMALTAFLGVVVLLVRWQRRPKDWQKQNSFSSWLLPLHASHSSYISSKGGSTSRRMSIFGSKKSKSNGFSSFFSNQGLGRYFPFTELQTATQNFDENAVCGVGGFGKVYIGEIDGGTQVAIKRGSQSSEQGINEFQTEIQMLSKLRHRHLVSLIGFCDENKEMILVYEYMSNGPLRDHLYGSKENDPNPIPTLSWKQRLEICIGSARGLHYLHTGAAQGIIHRDVKTTNILLDENLVAKVSDFGLSKDAPMDEGHVSTAVKGSFGYLDPEYFRRQQLTDKSDVYSFGVVLFEVLCARPVINPQLPREQVNLAEYAMNLHRKGMLEKIIDPKIVGTISKGSLRKFVEAAEKCLAEYGVDRPGMGDVLWNLEYALQLQEASAQVDLSEDKTTMNIEMDLIPGEEMQSPSHSIP

SEQ ID NO: 96003 - protein, 560 aa, Arabidopsis thaliana
  peptide (1)..(560): Ceres Seq. ID no. 12731489
MADAQTSQPNFNLSWRMSVDFGHDYFIRLHFCDIVSKSLNDLIFNVFINKLSAISALDLSSLTSALGTAYYADFVLNASTITNGSILVQVGPTPNLQSGKPNAILNGLEIMKLNNAAGSLDGLFGVDGKYKGPIGGMSSKKLAIAGIGFVMALTAFLGVVVLLVRWQRRPKDWQKQNSFSSWLLPLHASHSSYISSKGGSTSRRMSIFGSKKSKSNGFSSFFSNQGLGRYFPFTELQTATQNFDENAVCGVGGFGKVYIGEIDGGTQVAIKRGSQSSEQGINEFQTEIQMLSKLRHRHLVSLIGFCDENKEMILVYEYMSNGPLRDHLYGSKENDPNPIPTLSWKQRLEICIGSARGLHYLHTGAAQGIIHRDVKTTNILLDENLVAKVSDFGLSKDAPMDEGHVSTAVKGSFGYLDPEYFRRQQLTDKSDVYSFGVVLFEVLCARPVINPQLPREQVNLAEYAMNLHRKGMLEKIIDPKIVGTISKGSLRKFVEAAEKCLAEYGVDRPGMGDVLWNLEYALQLQEASAQVDLSEDKTTMNIEMDLIPGEEMQSPSHSIP

SEQ ID NO: 96004 - protein, 544 aa, Arabidopsis thaliana
  peptide (1)..(544): Ceres Seq. ID no. 12731490
MSVDFGHDYFIRLHFCDIVSKSLNDLIFNVFINKLSAISALDLSSLTSALGTAYYADFVLNASTITNGSILVQVGPTPNLQSGKPNAILNGLEIMKLNNAAGSLDGLFGVDGKYKGPIGGMSSKKLAIAGIGFVMALTAFLGVVVLLVRWQRRPKDWQKQNSFSSWLLPLHASHSSYISSKGGSTSRRMSIFGSKKSKSNGFSSFFSNQGLGRYFPFTELQTATQNFDENAVCGVGGFGKVYIGEIDGGTQVAIKRGSQSSEQGINEFQTEIQMLSKLRHRHLVSLIGFCDENKEMILVYEYMSNGPLRDHLYGSKENDPNPIPTLSWKQRLEICIGSARGLHYLHTGAAQGIIHRDVKTTNILLDENLVAKVSDFGLSKDAPMDEGHVSTAVKGSFGYLDPEYFRRQQLTDKSDVYSFGVVLFEVLCARPVINPQLPREQVNLAEYAMNLHRKGMLEKIIDPKIVGTISKGSLRKFVEAAEKCLAEYGVDRPGMGDVLWNLEYALQLQEASAQVDLSEDKTTMNIEMDLIPGEEMQSPSHSIP

SEQ ID NO: 96005 - DNA, 1488 bp, Arabidopsis thaliana
  misc_feature (1)..(1488): Ceres Seq. ID no. 12731491
  misc_feature (1)..(1488): Ortholog of  Ceres SEQ ID NO 14314879 as cited in SEQ ID NO 54119
atggttggtctaactccagctgaggatcgttcagagattgcctttttcgacgtcgagacgacaattccgttccgagttggtcaggggtacgcgattctggagtttggatcgattctggtttgccccaagaagcttgtggagctgaaaaactactctgttctggttcgtcctgctaatctcaacctcatcacgcctcggtccgtgaagtgcaacggcatcaaacgcgaagacgtcgaatcagctcttacctttgcagatatcgccgacaccgtctacgatattctccatggaaggatatgggcaggtcataacatattgaagttcgattgtccaaggataagagaagcatttgctgagattggacgagatccaccagagccaaagggcaccattgactccttggctttgcttactcaaaggtttgggagaagagctggtgatatgaagatggcgactttggctacatactttggacttggaaaccagacgcataggagtctggacgatgtaaggatgaacttcgaggttctcaagtattgtgccactgttttgttcttggagctaattcagaaacatgccatttttcaacaggagtcaagtcttccagatgaacttatagagaactcggttactactactactcctgaaactagttcaagaaggcgtaggactataaaaaaatctcctctgcaatctcccactgatcagcagacaggagagaacatgacaactatacctattttatcatttgtttcatccgcagaagctcaaacggatccatttgatatgagcactttgaggaacgaaatagcccctgaagttcttcaatcagatgttcccatggaagaagaacaaaatcagcagtctgagactgttgcctctgaaggtaccggtgaccaggaaggattcatggagctagataaaatatctgtttcaagtatcagagcaactcatgtcccgctatatgacgggagccaaacaatgaagctgcaactcttccttggggacagaccccttcagctccattgtcctcgtctgaaagtacggtttggaatcaatgggaaatttatggataaagctggaagacggaggttgaactttgtaattgatctgtatccaagtctctgcaacgtacttcaagaatgcgacagtgctgcacagacaatatctgttgattcaggcagtggttctgactggaaccctctagtcattccaatgaaaggatttctgaactgtcccactgcaaggatacatatacccacagagttaaatggagatatagatcggtacgcagctgagatacaccagaaagagttctctggagctactgctactcagaaactcatttctagcaaccccaaggctgaagagattgagtctttgttgaatccgagaactgttcttgacgctttcttgtctctggagccatatgattatcagcagagagccggaatccgtctagttgctagaaagcttgttatacattag

SEQ ID NO: 96006 - protein, 495 aa, Arabidopsis thaliana
  peptide (1)..(495): Ceres Seq. ID no. 12731492
MVGLTPAEDRSEIAFFDVETTIPFRVGQGYAILEFGSILVCPKKLVELKNYSVLVRPANLNLITPRSVKCNGIKREDVESALTFADIADTVYDILHGRIWAGHNILKFDCPRIREAFAEIGRDPPEPKGTIDSLALLTQRFGRRAGDMKMATLATYFGLGNQTHRSLDDVRMNFEVLKYCATVLFLELIQKHAIFQQESSLPDELIENSVTTTTPETSSRRRRTIKKSPLQSPTDQQTGENMTTIPILSFVSSAEAQTDPFDMSTLRNEIAPEVLQSDVPMEEEQNQQSETVASEGTGDQEGFMELDKISVSSIRATHVPLYDGSQTMKLQLFLGDRPLQLHCPRLKVRFGINGKFMDKAGRRRLNFVIDLYPSLCNVLQECDSAAQTISVDSGSGSDWNPLVIPMKGFLNCPTARIHIPTELNGDIDRYAAEIHQKEFSGATATQKLISSNPKAEEIESLLNPRTVLDAFLSLEPYDYQQRAGIRLVARKLVIH

SEQ ID NO: 96007 - protein, 348 aa, Arabidopsis thaliana
  peptide (1)..(348): Ceres Seq. ID no. 12731493
MKMATLATYFGLGNQTHRSLDDVRMNFEVLKYCATVLFLELIQKHAIFQQESSLPDELIENSVTTTTPETSSRRRRTIKKSPLQSPTDQQTGENMTTIPILSFVSSAEAQTDPFDMSTLRNEIAPEVLQSDVPMEEEQNQQSETVASEGTGDQEGFMELDKISVSSIRATHVPLYDGSQTMKLQLFLGDRPLQLHCPRLKVRFGINGKFMDKAGRRRLNFVIDLYPSLCNVLQECDSAAQTISVDSGSGSDWNPLVIPMKGFLNCPTARIHIPTELNGDIDRYAAEIHQKEFSGATATQKLISSNPKAEEIESLLNPRTVLDAFLSLEPYDYQQRAGIRLVARKLVIH

SEQ ID NO: 96008 - protein, 346 aa, Arabidopsis thaliana
  peptide (1)..(346): Ceres Seq. ID no. 12731494
MATLATYFGLGNQTHRSLDDVRMNFEVLKYCATVLFLELIQKHAIFQQESSLPDELIENSVTTTTPETSSRRRRTIKKSPLQSPTDQQTGENMTTIPILSFVSSAEAQTDPFDMSTLRNEIAPEVLQSDVPMEEEQNQQSETVASEGTGDQEGFMELDKISVSSIRATHVPLYDGSQTMKLQLFLGDRPLQLHCPRLKVRFGINGKFMDKAGRRRLNFVIDLYPSLCNVLQECDSAAQTISVDSGSGSDWNPLVIPMKGFLNCPTARIHIPTELNGDIDRYAAEIHQKEFSGATATQKLISSNPKAEEIESLLNPRTVLDAFLSLEPYDYQQRAGIRLVARKLVIH

SEQ ID NO: 96009 - DNA, 3126 bp, Arabidopsis thaliana
  misc_feature (1)..(3126): Ceres Seq. ID no. 12731511
  misc_feature (1)..(3126): Ortholog of  Ceres SEQ ID NO 14303870 as cited in SEQ ID NO 53632
atgaaaaagaagaacatttctccttctcttgttcttcatccccttctccttcttctacttcctttctttgctttcaattccttagctctcaagttttcacctcaactcttgtctctcctttcccttaaaacatctctctctggccctccctctgcctttcaagactggaaagtccccgttaacggtcaaaacgacgccgtttggtgttcttggtccggtgtagtctgtgataatgtaacggctcaagtcatttccctcgacctctctcaccggaacctctctggtcgtattcctatacagattcgttacttgtcgagcttactctacttaaatctcagtgggaattctttggaaggttcgtttccaacttctatctttgatctcaccaagctcactaccctcgacatcagccgtaactcgttcgactcgagttttcctcccggaatctccaagcttaagttcttaaaagtcttcaatgcgttcagcaacaacttcgaaggtctattacctagtgacgtgtctcgtcttcgtttcttggaagagcttaactttggtggaagttactttgaaggagagattccagcagcttacggtggtttacagagattgaagtttattcatttagctggaaatgtcctcggaggtaaactacctcctagattaggactcttaacagagctccaacacatggaaatcggttataatcacttcaacggaaacataccttcggagtttgccttactctcaaatctcaagtactttgacgtttccaattgcagcctctctggttctctgcctcaagaactcgggaatctctcaaacctagagactttatttctattccaaaacggtttcaccggtgaaatcccagagagttatagcaacttgaaatccctcaagcttctcgatttttcgagtaatcagctttctggtagtatcccatcaggcttctcgaccttgaagaacctcacatggctaagcttaatcagcaataacctctcaggtgaagtacctgaaggaatcggtgaactccctgagcttactacattgtttctatggaacaataacttcaccggagttttgccacacaagcttggatcaaacggtaaacttgagacaatggacgtctctaacaattcattcaccggaacaatcccttcttctctctgccatggaaacaagctatacaaactcatcctcttctccaacatgtttgaaggtgagctaccaaagagcttgactcgttgcgaatctctatggcggtttcggagtcaaaacaatcgattaaacggcacaattccgatcggattcggctctctacgtaacctcactttcgttgatttaagcaacaacagattcaccgatcaaattccggcggatttcgccaccgctcctgttcttcagtacttgaatctctcaaccaatttcttccacaggaaactaccggaaaacatatggaaagctccgaatctacagatcttctcagcgagtttcagcaatttgatcggtgaaatcccaaattacgttggatgcaaaagcttctacaggattgaactacaaggaaactcactcaacggaacgattccatgggacatcggacattgcgagaagcttctctgtttgaatctcagccaaaatcatctcaacggaatcattccatgggagatttcaactcttccgtcaatcgccgacgtagatctttctcataatctcttaaccggaacaatcccttccgatttcggaagctctaagacgatcacaaccttcaacgtttcgtataatcagctaatcggtccgattccaagtggttctttcgctcatctgaatccgtcgttcttctcctcaaacgaaggactctgtggagatctcgtcggaaaaccttgcaattctgataggtttaacgccggaaatgcagatatagacggtcatcataaagaggaacgacctaagaaaacagccggagctattgtttggatattggcggcggcgattggggttggattcttcgtccttgtagccgccactagatgcttccagaaaagctacggaaacagagtcgacggtggtggaagaaacggcggagatataggaccgtggaagctaacggcttttcagagactaaacttcacggcggatgatgtggttgagtgtctctcaaagactgataacatcctcggaatgggatcaacaggaacagtgtacaaagcagagatgcctaatggagaaataatcgccgtgaaaaaactttggggaaaaaacaaagagaacggcaaaatccggcggcggaagagcggcgtattggcggaggttgatgttctagggaacgtacgtcaccggaacatcgttcgtctccttggatgttgcacgaatcgagattgcacgatgcttttatacgaatacatgcctaatggaagcttagacgatcttcttcacggtggggataagacgatgaccgcggcggcggaatggacggctttgtatcagatcgcgattggagtggctcaagggatctgttatctccaccatgattgtgatccggtgattgtacaccgtgacctgaaacctagcaatatcctcctcgacgccgatttcgaggcgcgtgtggcggacttcggcgtcgcgaagcttattcaaaccgacgaatccatgtccgtcgtcgccggttcgtacggttacattgcaccagaatatgcttacactttacaagtggataaaaagagtgatatctatagctatggagtgattttattagagataatcaccggaaaaagatcggtggaaccggaatttggagaaggtaacagtatcgtggattgggttagatcaaagttgaagacgaaagaagatgtagaagaagttctagacaaaagcatgggtaggtcgtgtagtcttataagagaagagatgaaacaaatgttgagaattgcgttgttgtgtacaagccggagtccgacagacagaccgccgatgagagatgtgttgttgattcttcaagaggcaaagccaaagaggaagacagtaggggataatgtgatcgtcgttggtgatgttaatgatgtcaatttcgaagatgtttgtagtgttgatgttggtcatgatgttaaatgtcaaaggattggggtgtga

SEQ ID NO: 96010 - protein, 1041 aa, Arabidopsis thaliana
  peptide (1)..(1041): Ceres Seq. ID no. 12731512
MKKKNISPSLVLHPLLLLLLPFFAFNSLALKFSPQLLSLLSLKTSLSGPPSAFQDWKVPVNGQNDAVWCSWSGVVCDNVTAQVISLDLSHRNLSGRIPIQIRYLSSLLYLNLSGNSLEGSFPTSIFDLTKLTTLDISRNSFDSSFPPGISKLKFLKVFNAFSNNFEGLLPSDVSRLRFLEELNFGGSYFEGEIPAAYGGLQRLKFIHLAGNVLGGKLPPRLGLLTELQHMEIGYNHFNGNIPSEFALLSNLKYFDVSNCSLSGSLPQELGNLSNLETLFLFQNGFTGEIPESYSNLKSLKLLDFSSNQLSGSIPSGFSTLKNLTWLSLISNNLSGEVPEGIGELPELTTLFLWNNNFTGVLPHKLGSNGKLETMDVSNNSFTGTIPSSLCHGNKLYKLILFSNMFEGELPKSLTRCESLWRFRSQNNRLNGTIPIGFGSLRNLTFVDLSNNRFTDQIPADFATAPVLQYLNLSTNFFHRKLPENIWKAPNLQIFSASFSNLIGEIPNYVGCKSFYRIELQGNSLNGTIPWDIGHCEKLLCLNLSQNHLNGIIPWEISTLPSIADVDLSHNLLTGTIPSDFGSSKTITTFNVSYNQLIGPIPSGSFAHLNPSFFSSNEGLCGDLVGKPCNSDRFNAGNADIDGHHKEERPKKTAGAIVWILAAAIGVGFFVLVAATRCFQKSYGNRVDGGGRNGGDIGPWKLTAFQRLNFTADDVVECLSKTDNILGMGSTGTVYKAEMPNGEIIAVKKLWGKNKENGKIRRRKSGVLAEVDVLGNVRHRNIVRLLGCCTNRDCTMLLYEYMPNGSLDDLLHGGDKTMTAAAEWTALYQIAIGVAQGICYLHHDCDPVIVHRDLKPSNILLDADFEARVADFGVAKLIQTDESMSVVAGSYGYIAPEYAYTLQVDKKSDIYSYGVILLEIITGKRSVEPEFGEGNSIVDWVRSKLKTKEDVEEVLDKSMGRSCSLIREEMKQMLRIALLCTSRSPTDRPPMRDVLLILQEAKPKRKTVGDNVIVVGDVNDVNFEDVCSVDVGHDVKCQRIGV

SEQ ID NO: 96011 - protein, 812 aa, Arabidopsis thaliana
  peptide (1)..(812): Ceres Seq. ID no. 12731513
MEIGYNHFNGNIPSEFALLSNLKYFDVSNCSLSGSLPQELGNLSNLETLFLFQNGFTGEIPESYSNLKSLKLLDFSSNQLSGSIPSGFSTLKNLTWLSLISNNLSGEVPEGIGELPELTTLFLWNNNFTGVLPHKLGSNGKLETMDVSNNSFTGTIPSSLCHGNKLYKLILFSNMFEGELPKSLTRCESLWRFRSQNNRLNGTIPIGFGSLRNLTFVDLSNNRFTDQIPADFATAPVLQYLNLSTNFFHRKLPENIWKAPNLQIFSASFSNLIGEIPNYVGCKSFYRIELQGNSLNGTIPWDIGHCEKLLCLNLSQNHLNGIIPWEISTLPSIADVDLSHNLLTGTIPSDFGSSKTITTFNVSYNQLIGPIPSGSFAHLNPSFFSSNEGLCGDLVGKPCNSDRFNAGNADIDGHHKEERPKKTAGAIVWILAAAIGVGFFVLVAATRCFQKSYGNRVDGGGRNGGDIGPWKLTAFQRLNFTADDVVECLSKTDNILGMGSTGTVYKAEMPNGEIIAVKKLWGKNKENGKIRRRKSGVLAEVDVLGNVRHRNIVRLLGCCTNRDCTMLLYEYMPNGSLDDLLHGGDKTMTAAAEWTALYQIAIGVAQGICYLHHDCDPVIVHRDLKPSNILLDADFEARVADFGVAKLIQTDESMSVVAGSYGYIAPEYAYTLQVDKKSDIYSYGVILLEIITGKRSVEPEFGEGNSIVDWVRSKLKTKEDVEEVLDKSMGRSCSLIREEMKQMLRIALLCTSRSPTDRPPMRDVLLILQEAKPKRKTVGDNVIVVGDVNDVNFEDVCSVDVGHDVKCQRIGV

SEQ ID NO: 96012 - protein, 668 aa, Arabidopsis thaliana
  peptide (1)..(668): Ceres Seq. ID no. 12731514
MDVSNNSFTGTIPSSLCHGNKLYKLILFSNMFEGELPKSLTRCESLWRFRSQNNRLNGTIPIGFGSLRNLTFVDLSNNRFTDQIPADFATAPVLQYLNLSTNFFHRKLPENIWKAPNLQIFSASFSNLIGEIPNYVGCKSFYRIELQGNSLNGTIPWDIGHCEKLLCLNLSQNHLNGIIPWEISTLPSIADVDLSHNLLTGTIPSDFGSSKTITTFNVSYNQLIGPIPSGSFAHLNPSFFSSNEGLCGDLVGKPCNSDRFNAGNADIDGHHKEERPKKTAGAIVWILAAAIGVGFFVLVAATRCFQKSYGNRVDGGGRNGGDIGPWKLTAFQRLNFTADDVVECLSKTDNILGMGSTGTVYKAEMPNGEIIAVKKLWGKNKENGKIRRRKSGVLAEVDVLGNVRHRNIVRLLGCCTNRDCTMLLYEYMPNGSLDDLLHGGDKTMTAAAEWTALYQIAIGVAQGICYLHHDCDPVIVHRDLKPSNILLDADFEARVADFGVAKLIQTDESMSVVAGSYGYIAPEYAYTLQVDKKSDIYSYGVILLEIITGKRSVEPEFGEGNSIVDWVRSKLKTKEDVEEVLDKSMGRSCSLIREEMKQMLRIALLCTSRSPTDRPPMRDVLLILQEAKPKRKTVGDNVIVVGDVNDVNFEDVCSVDVGHDVKCQRIGV

SEQ ID NO: 96013 - DNA, 660 bp, Arabidopsis thaliana
  misc_feature (1)..(660): Ceres Seq. ID no. 12731527
  misc_feature (1)..(660): Ortholog of  Ceres SEQ ID NO 15171175 as cited in SEQ ID NO 57476
  misc_feature (1)..(660): Ortholog of  Ceres SEQ ID NO 15178436 as cited in SEQ ID NO 57919
atggctgatcagattgagatccagagaatgaaccaagatcttcaagaaccattggctgagatcatgccaagtgttttaacggcaatgtcgtatctcttgcaaagagtatcggagaccaacgacaacctgagccagaaacagaagccctcaagcttcactggagtaaccaaaccttccatttccatcagaagctatctcgaacggatctttgaatacgcgaattgtagctactcgtgttacatcgtcgcatatatatatttggatcggttcgtgaagaagcagccatttttgcctatcaattcttttaatgtccataggcttataatcacaagtgtcttggtctctgctaaattcatggatgacttgagttacaacaatgaatattatgcaaaagttggaggaataagcagagaagaaatgaacatgcttgagcttgacttcttgttcggaattgggtttgagttaaacgtcaccgtttctactttcaataactattgttgttttctacaaagagagatggcgatgttgatgaagatgaagtctctgtttcttgaaccttcttcattcaaaatctcttctaagacgaaacttgtgatgtatccacacgaggaagactctttatctactcaccacaacaagaagcaactcgctgctgcttga

SEQ ID NO: 96014 - protein, 219 aa, Arabidopsis thaliana
  peptide (1)..(219): Ceres Seq. ID no. 12731528
MADQIEIQRMNQDLQEPLAEIMPSVLTAMSYLLQRVSETNDNLSQKQKPSSFTGVTKPSISIRSYLERIFEYANCSYSCYIVAYIYLDRFVKKQPFLPINSFNVHRLIITSVLVSAKFMDDLSYNNEYYAKVGGISREEMNMLELDFLFGIGFELNVTVSTFNNYCCFLQREMAMLMKMKSLFLEPSSFKISSKTKLVMYPHEEDSLSTHHNKKQLAAA

SEQ ID NO: 96015 - protein, 210 aa, Arabidopsis thaliana
  peptide (1)..(210): Ceres Seq. ID no. 12731529
MNQDLQEPLAEIMPSVLTAMSYLLQRVSETNDNLSQKQKPSSFTGVTKPSISIRSYLERIFEYANCSYSCYIVAYIYLDRFVKKQPFLPINSFNVHRLIITSVLVSAKFMDDLSYNNEYYAKVGGISREEMNMLELDFLFGIGFELNVTVSTFNNYCCFLQREMAMLMKMKSLFLEPSSFKISSKTKLVMYPHEEDSLSTHHNKKQLAAA

SEQ ID NO: 96016 - protein, 198 aa, Arabidopsis thaliana
  peptide (1)..(198): Ceres Seq. ID no. 12731530
MPSVLTAMSYLLQRVSETNDNLSQKQKPSSFTGVTKPSISIRSYLERIFEYANCSYSCYIVAYIYLDRFVKKQPFLPINSFNVHRLIITSVLVSAKFMDDLSYNNEYYAKVGGISREEMNMLELDFLFGIGFELNVTVSTFNNYCCFLQREMAMLMKMKSLFLEPSSFKISSKTKLVMYPHEEDSLSTHHNKKQLAAA

SEQ ID NO: 96017 - DNA, 1017 bp, Arabidopsis thaliana
  misc_feature (1)..(1017): Ceres Seq. ID no. 12731531
  misc_feature (1)..(1017): Ortholog of  Ceres SEQ ID NO 15171501 as cited in SEQ ID NO 58322
atgggatacaattatgtgtccctcatagtaacaatcctgctcgtggtgattacatcgcccgtggttttcggtaacgatgcagcaccaattccggagaacaaaggccgaatcgagcagtggttcaacaccaacgtgaaacaaaatggaagaggccatttcaagacaataaccgaagcgataaatagtgtacgggcagggaacactaggcgtgtgatcatcaagataggtcctggtgtatacaaagagaaggtcacgatagatagaagcaagccattcatcacactgtacggtcatccaaatgcaatgccggtattgacattcgacggtaccgcagcacaatatgggacagtcgatagcgcaactctcattgtcttgtccgactatttcatggctgttaacatcatccttaagaattctgcgcctatgccggatggtaagaggaagggagcacaagctttatctatgagaatctctggcaacaaagcagctttctacaactgtaaattttacggttatcaagacacgatttgcgatgacaccggaaaccatttcttcaaagactgctacatcgaaggcacatttgatttcatctttggaagcggacgctctctgtacctcggtacacaactaaacgttgtgggagatggaatcagagtgatcacagctcatgcgggaaaaagcgctgcagagaaaagcggatactcgttcgtccactgcaaggttacagggactggaaccgggatctacttgggtcgatcatggatgagccaccccaaggttgtttatgcatacacggatatgtcaagtgttgtgaacccatctggatggcaagaaaaccgcgaggccggacgtgacaagacggtgttctatggagaatataagtgcacaggaacaggatcgcacaaggagaagagagtaaagtatacacaagacattgatgacatagaagctaagtacttcatctcgcttggctacatccaaggatctagctggctcctgcctcctccttctttctaa

SEQ ID NO: 96018 - protein, 338 aa, Arabidopsis thaliana
  peptide (1)..(338): Ceres Seq. ID no. 12731532
MGYNYVSLIVTILLVVITSPVVFGNDAAPIPENKGRIEQWFNTNVKQNGRGHFKTITEAINSVRAGNTRRVIIKIGPGVYKEKVTIDRSKPFITLYGHPNAMPVLTFDGTAAQYGTVDSATLIVLSDYFMAVNIILKNSAPMPDGKRKGAQALSMRISGNKAAFYNCKFYGYQDTICDDTGNHFFKDCYIEGTFDFIFGSGRSLYLGTQLNVVGDGIRVITAHAGKSAAEKSGYSFVHCKVTGTGTGIYLGRSWMSHPKVVYAYTDMSSVVNPSGWQENREAGRDKTVFYGEYKCTGTGSHKEKRVKYTQDIDDIEAKYFISLGYIQGSSWLLPPPSF

SEQ ID NO: 96019 - protein, 237 aa, Arabidopsis thaliana
  peptide (1)..(237): Ceres Seq. ID no. 12731533
MPVLTFDGTAAQYGTVDSATLIVLSDYFMAVNIILKNSAPMPDGKRKGAQALSMRISGNKAAFYNCKFYGYQDTICDDTGNHFFKDCYIEGTFDFIFGSGRSLYLGTQLNVVGDGIRVITAHAGKSAAEKSGYSFVHCKVTGTGTGIYLGRSWMSHPKVVYAYTDMSSVVNPSGWQENREAGRDKTVFYGEYKCTGTGSHKEKRVKYTQDIDDIEAKYFISLGYIQGSSWLLPPPSF

SEQ ID NO: 96020 - protein, 209 aa, Arabidopsis thaliana
  peptide (1)..(209): Ceres Seq. ID no. 12731534
MAVNIILKNSAPMPDGKRKGAQALSMRISGNKAAFYNCKFYGYQDTICDDTGNHFFKDCYIEGTFDFIFGSGRSLYLGTQLNVVGDGIRVITAHAGKSAAEKSGYSFVHCKVTGTGTGIYLGRSWMSHPKVVYAYTDMSSVVNPSGWQENREAGRDKTVFYGEYKCTGTGSHKEKRVKYTQDIDDIEAKYFISLGYIQGSSWLLPPPSF

SEQ ID NO: 96021 - DNA, 747 bp, Arabidopsis thaliana
  misc_feature (1)..(747): Ceres Seq. ID no. 12731551
  misc_feature (1)..(747): Ortholog of  Ceres SEQ ID NO 14312882 as cited in SEQ ID NO 57193
atgtatgggaagaggccttttggaggtgatgaatctgaagaaagggaagaagatgagaacttgttcccggtcttctcggcccgatctcaacacgacatgcgtgttatggtctcggccttgactcaagtaatcggaaaccaacaaagcaaatctcatgataacatcagctctattgatgataactatccttctgtgtataatccacaagaccctaatcaacaagttgcgcctactcatcaagaccaaggggacttgaggaggagacattatagaggtgtaaggcaaaggccatggggaaagtgggcagctgaaatccgagacccaaaaaaggcggcacgtgtgtggctcgggacatttgaaaccgctgaatctgcggccttagcttatgatgaagcagccctaaagttcaaaggaagcaaagcaaaactcaatttcccggagagggttcagcttggaagtaactctacatattactcctccaaccaaattccacaaatggaaccacaaagtataccgaactataatcaatactatcatgatgcgagtagtggtgatatgctaagttttaatttgggcggtgggtatgggagtggtaccggatattcaatgtctcatgataatagtactacgactgctgctacaacttcttcgtcttctggtggctcttctaggcaacaagaagagcaagattatgccagattctggcgctttggggattcttcttcctctcctcattcgggatattaa

SEQ ID NO: 96022 - protein, 248 aa, Arabidopsis thaliana
  peptide (1)..(248): Ceres Seq. ID no. 12731552
MYGKRPFGGDESEEREEDENLFPVFSARSQHDMRVMVSALTQVIGNQQSKSHDNISSIDDNYPSVYNPQDPNQQVAPTHQDQGDLRRRHYRGVRQRPWGKWAAEIRDPKKAARVWLGTFETAESAALAYDEAALKFKGSKAKLNFPERVQLGSNSTYYSSNQIPQMEPQSIPNYNQYYHDASSGDMLSFNLGGGYGSGTGYSMSHDNSTTTAATTSSSSGGSSRQQEEQDYARFWRFGDSSSSPHSGY

SEQ ID NO: 96023 - protein, 216 aa, Arabidopsis thaliana
  peptide (1)..(216): Ceres Seq. ID no. 12731553
MRVMVSALTQVIGNQQSKSHDNISSIDDNYPSVYNPQDPNQQVAPTHQDQGDLRRRHYRGVRQRPWGKWAAEIRDPKKAARVWLGTFETAESAALAYDEAALKFKGSKAKLNFPERVQLGSNSTYYSSNQIPQMEPQSIPNYNQYYHDASSGDMLSFNLGGGYGSGTGYSMSHDNSTTTAATTSSSSGGSSRQQEEQDYARFWRFGDSSSSPHSGY

SEQ ID NO: 96024 - protein, 213 aa, Arabidopsis thaliana
  peptide (1)..(213): Ceres Seq. ID no. 12731554
MVSALTQVIGNQQSKSHDNISSIDDNYPSVYNPQDPNQQVAPTHQDQGDLRRRHYRGVRQRPWGKWAAEIRDPKKAARVWLGTFETAESAALAYDEAALKFKGSKAKLNFPERVQLGSNSTYYSSNQIPQMEPQSIPNYNQYYHDASSGDMLSFNLGGGYGSGTGYSMSHDNSTTTAATTSSSSGGSSRQQEEQDYARFWRFGDSSSSPHSGY

SEQ ID NO: 96025 - DNA, 2553 bp, Arabidopsis thaliana
  misc_feature (1)..(2553): Ceres Seq. ID no. 12731566
  misc_feature (1)..(2553): Ortholog of  Ceres SEQ ID NO 15180204 as cited in SEQ ID NO 0
atgcatttcgccaagctcgatgattctcccatgtttcgccaacagatgcaatctatggaagagagtgcggagttgctccgactgcgatgcttaaggttctataaaggttgcagaaaatacacggaggggcttggagaagggtatgatgcagatattggctttgtaaatgcacttgaatctttcggaggaggccataatgatcctgtttgtgttgcttttggaggtcctgtaatgacaaaattcactattgctctacgagaaatcgggacatacaaggaagtacttcgttctcaggtagaacacatgctgagtgatcggttgcttcaatttgtgaatggtgatgtccacgaagttaaggaagctcgtaaacggtttgacaaagctaccattacatatgatcaggcacgagaaaaatatctttcattaaggaagagcacacgattggatgtggctgccacaattgaggaggacctacatagcgcaagaacgacatttgagcaagcccggtttcatctggttagtgcactctctaatgcagagtctaaaaagagatttgagtttttggaagcagtcagcgggactatggatgctcatctccgtttcttcaaacaggcaagctttttcttgaaaacaattttcagagcaagaccacaaataactctggatccaatccgcttgggatatgaactactacatcaaatggagccttttattaatcaggtgttggcttatgcacaccagtctagagaatgtgcaaactatgagatggcatcacttaatgaaaggatgcaggaataccaaaggcaagttgatcgtgaaactagaaactcctgtgtttctccaacaggggatggcatgagacataactcaagaaactcccagaaagtcatcgaggccgtgatgcaatctgctgcaaaaggaaaggttcagactatcagacaagggtatctgtctaaacgttcctcaaacttgagaggtgactggaaaagaagattctttatccttgatagccgtgggatgctatactattaccgcaagccatggaattggtcttcaggaaatggaagtcgctctgttgttcacaggaatatggcttcagaaaacagtcctgggctgctaagtcggtggctgtcttctcattatcatggtggtgtgcacgatgaaaaaccagtggcacgtcacaccgtcaatctgctgacctcaacgatcaaagttgatgcagatcagaccgatctaagattctgctttagaataatttcaccaacaaaagtttatacattgcaggcagagaatgcacaggatcagatggactggatcgaaaaaataactggagtaattgcttctttgttgagtttccaaacacctgaaagagcaatcatgcgtctctctactgtggacggaggtgatactttctctgcaagtgattctggttctttagcagatccttatgatatcgaacaggcagaaagtggagaatccacagtggaacatcccatgacaggaggaaaccgttcgaggttctcagggtgcttgcagcaacatgatatggtaaagactgaaaagccaattgatgtcttgacaagggtattgggtaatgagagatgtgcagactgcggtgctcctgaacctgattgggcctctttgaacctcggtgtccttatttgtatcgagtgttctggtatccatcgtaaccttggtgttcacatttcaaaggtcagatcgctcactcttgatgtcaaagtatgggaaccatcggtcttgacgttattccaatcgttaggtaatgtatatgtaaactcagtgtgggaggagctgttgaactcggagagtagaacttccagtgctagtagatcttcgggcactcccaagtcagatcgaccaagaaagttgcttgtaaggaagcctggtttcaatgatcccatttcggtgaaagagttgttcatccacgcaaagtactcagagaggatttttgtccgcaaagcaatagacagtcagcattttcaggcagttttccaagagatatgggagaatgtccgtgccaacgacaagaaatcagtttacaggcacattgtctgctctgaagcagatgtgaatgctctacgtggtcaagcatcatacactgtgtctttgcccttatcaaagatgatgcaaatggaggaaacccttgaagcgaaattcaagagcattgaagaggagtttcaagagaatccagcgggatattctaactcaagaggtgacggggaaagtatggtcagagaagaaacttcaaacgactgttctttgcttcaccttgcttgtctttctgcggatatcggtatggtagaactattgcttcaatatggcgcaaaaataaatgcaacagattcaaaaggtcggactccacttcatcattgtatcatcagcaggagatatgcaattgcaaggttgctacttatgaggggaggagatccaaatgctgtggataaagacagtaacataccagtcaaatatgcttcacagacagacctcaatgatagcgaactgattgctttattaacagactccaaaagatga

SEQ ID NO: 96026 - protein, 850 aa, Arabidopsis thaliana
  peptide (1)..(850): Ceres Seq. ID no. 12731567
MHFAKLDDSPMFRQQMQSMEESAELLRLRCLRFYKGCRKYTEGLGEGYDADIGFVNALESFGGGHNDPVCVAFGGPVMTKFTIALREIGTYKEVLRSQVEHMLSDRLLQFVNGDVHEVKEARKRFDKATITYDQAREKYLSLRKSTRLDVAATIEEDLHSARTTFEQARFHLVSALSNAESKKRFEFLEAVSGTMDAHLRFFKQASFFLKTIFRARPQITLDPIRLGYELLHQMEPFINQVLAYAHQSRECANYEMASLNERMQEYQRQVDRETRNSCVSPTGDGMRHNSRNSQKVIEAVMQSAAKGKVQTIRQGYLSKRSSNLRGDWKRRFFILDSRGMLYYYRKPWNWSSGNGSRSVVHRNMASENSPGLLSRWLSSHYHGGVHDEKPVARHTVNLLTSTIKVDADQTDLRFCFRIISPTKVYTLQAENAQDQMDWIEKITGVIASLLSFQTPERAIMRLSTVDGGDTFSASDSGSLADPYDIEQAESGESTVEHPMTGGNRSRFSGCLQQHDMVKTEKPIDVLTRVLGNERCADCGAPEPDWASLNLGVLICIECSGIHRNLGVHISKVRSLTLDVKVWEPSVLTLFQSLGNVYVNSVWEELLNSESRTSSASRSSGTPKSDRPRKLLVRKPGFNDPISVKELFIHAKYSERIFVRKAIDSQHFQAVFQEIWENVRANDKKSVYRHIVCSEADVNALRGQASYTVSLPLSKMMQMEETLEAKFKSIEEEFQENPAGYSNSRGDGESMVREETSNDCSLLHLACLSADIGMVELLLQYGAKINATDSKGRTPLHHCIISRRYAIARLLLMRGGDPNAVDKDSNIPVKYASQTDLNDSELIALLTDSKR

SEQ ID NO: 96027 - protein, 840 aa, Arabidopsis thaliana
  peptide (1)..(840): Ceres Seq. ID no. 12731568
MFRQQMQSMEESAELLRLRCLRFYKGCRKYTEGLGEGYDADIGFVNALESFGGGHNDPVCVAFGGPVMTKFTIALREIGTYKEVLRSQVEHMLSDRLLQFVNGDVHEVKEARKRFDKATITYDQAREKYLSLRKSTRLDVAATIEEDLHSARTTFEQARFHLVSALSNAESKKRFEFLEAVSGTMDAHLRFFKQASFFLKTIFRARPQITLDPIRLGYELLHQMEPFINQVLAYAHQSRECANYEMASLNERMQEYQRQVDRETRNSCVSPTGDGMRHNSRNSQKVIEAVMQSAAKGKVQTIRQGYLSKRSSNLRGDWKRRFFILDSRGMLYYYRKPWNWSSGNGSRSVVHRNMASENSPGLLSRWLSSHYHGGVHDEKPVARHTVNLLTSTIKVDADQTDLRFCFRIISPTKVYTLQAENAQDQMDWIEKITGVIASLLSFQTPERAIMRLSTVDGGDTFSASDSGSLADPYDIEQAESGESTVEHPMTGGNRSRFSGCLQQHDMVKTEKPIDVLTRVLGNERCADCGAPEPDWASLNLGVLICIECSGIHRNLGVHISKVRSLTLDVKVWEPSVLTLFQSLGNVYVNSVWEELLNSESRTSSASRSSGTPKSDRPRKLLVRKPGFNDPISVKELFIHAKYSERIFVRKAIDSQHFQAVFQEIWENVRANDKKSVYRHIVCSEADVNALRGQASYTVSLPLSKMMQMEETLEAKFKSIEEEFQENPAGYSNSRGDGESMVREETSNDCSLLHLACLSADIGMVELLLQYGAKINATDSKGRTPLHHCIISRRYAIARLLLMRGGDPNAVDKDSNIPVKYASQTDLNDSELIALLTDSKR

SEQ ID NO: 96028 - protein, 835 aa, Arabidopsis thaliana
  peptide (1)..(835): Ceres Seq. ID no. 12731569
MQSMEESAELLRLRCLRFYKGCRKYTEGLGEGYDADIGFVNALESFGGGHNDPVCVAFGGPVMTKFTIALREIGTYKEVLRSQVEHMLSDRLLQFVNGDVHEVKEARKRFDKATITYDQAREKYLSLRKSTRLDVAATIEEDLHSARTTFEQARFHLVSALSNAESKKRFEFLEAVSGTMDAHLRFFKQASFFLKTIFRARPQITLDPIRLGYELLHQMEPFINQVLAYAHQSRECANYEMASLNERMQEYQRQVDRETRNSCVSPTGDGMRHNSRNSQKVIEAVMQSAAKGKVQTIRQGYLSKRSSNLRGDWKRRFFILDSRGMLYYYRKPWNWSSGNGSRSVVHRNMASENSPGLLSRWLSSHYHGGVHDEKPVARHTVNLLTSTIKVDADQTDLRFCFRIISPTKVYTLQAENAQDQMDWIEKITGVIASLLSFQTPERAIMRLSTVDGGDTFSASDSGSLADPYDIEQAESGESTVEHPMTGGNRSRFSGCLQQHDMVKTEKPIDVLTRVLGNERCADCGAPEPDWASLNLGVLICIECSGIHRNLGVHISKVRSLTLDVKVWEPSVLTLFQSLGNVYVNSVWEELLNSESRTSSASRSSGTPKSDRPRKLLVRKPGFNDPISVKELFIHAKYSERIFVRKAIDSQHFQAVFQEIWENVRANDKKSVYRHIVCSEADVNALRGQASYTVSLPLSKMMQMEETLEAKFKSIEEEFQENPAGYSNSRGDGESMVREETSNDCSLLHLACLSADIGMVELLLQYGAKINATDSKGRTPLHHCIISRRYAIARLLLMRGGDPNAVDKDSNIPVKYASQTDLNDSELIALLTDSKR

SEQ ID NO: 96029 - DNA, 3506 bp, Arabidopsis thaliana
  misc_feature (1)..(3506): Ceres Seq. ID no. 12731570
  misc_feature (1)..(3506): Ortholog of  Ceres SEQ ID NO 13657677 as cited in SEQ ID NO 66119
atcggtgatgatgggatcgatgttgttcaggaagagaactttggtcacgagagcgaattttttacttttccggtcgttttccgttaacgttgagaaactttccgacgcatcagctgaaatagcgggaattctcaagcaagagaactggcgtgacactctggtatcttcgaatctttcaatcgagataaatccagaagtagttctctccgttttacgatccaaacgcgtcgatgatccctctaagcttttgagtttcttcaactgggtcgattctcaaaaagtcacagagcagaaattggattcgttttcgtttctcgctttggatttgtgtaatttcggtagttttgagaaagctcttagtgttgtagaacggatgattgagagaaattggcctgtagctgaggtttggagttcgattgtgagatgttcacaagagtttgtgggaaagagtgatgatggagttctatttgggatattgtttgatggatacattgcaaaagggtatatagaagaagctgtgtttgtgttttctagctctatgggtttggaattggttcctcgtttgtcacgatgtaaagttttgttggatgcgttgttgaggtggaaccggctggatttgttttgggatgtgtataaggggatggttgagagaaatgtagtatttgatgttaagacctatcatatgttgattattgctcattgtagggctgggaatgttcagttggggaaagatgttctttttaaaacggaaaaagaattcaggacggctactttgaatgtggatggagcacttaagcttaaggagtcgatgatttgcaaaggattggtgccattgaagtatacatacgatgtacttatagatgggttgtgtaagataaagagactagaagatgctaaatcgttgctggtagagatggatagtttaggtgtgtctcttgataatcatacttatagtttactgattgatggcttactgaagggtagaaatgcagatgctgcgaaaggactagtccatgagatggtttcacatggtattaacatcaaaccttatatgtatgattgttgtatttgtgtgatgtcaaaggaaggggtgatggagaaggcaaaggctctctttgatggaatgatcgcatccggactgataccacaggctcaggcttatgctagtctgatcgaaggatactgtcgagaaaagaatgtacgtcagggttatgagttacttgttgaaatgaaaaagaggaacattgtcatatctccatatacttatggtacagtggtgaaaggcatgtgctcttctggggatctcgatggagcttataacattgtgaaggaaatgattgcaagtggttgcagacccaatgtggttatatataccacattgatcaaaacctttctccagaatagtaggtttggagatgcaatgagggtgttaaaagaaatgaaagaacaaggaatcgcaccagacatattttgctacaattcccttataattggcctttcaaaagctaaaagaatggacgaagcaaggtcttttctggttgaaatggtcgagaacggattaaagcctaatgctttcacctatggggcttttatcagtggatatatagaggcaagtgaatttgcatctgcagataagtatgtgaaagagatgcgggaatgtggcgtacttccaaataaggttctttgcacgggtttgatcaatgagtattgcaaaaaggggaaagtaatagaggcgtgttcagcatatagatccatggttgaccaagggatcctgggggatgctaaaacatacactgttcttatgaatggtctttttaaaaatgataaagtagatgatgccgaggagattttccgcgaaatgcgtgggaagggtattgcacctgatgtattctcttatggtgttctcattaatggattttctaagttgggaaatatgcagaaggcttctagtatttttgatgagatggttgaagaaggtttgactcctaatgttatcatatacaacatgttacttggtggcttttgcagatctggtgaaattgaaaaagctaaggaactgcttgatgaaatgtcagttaaaggtcttcacccgaatgcagtgacctactgtacaattatagatggatattgcaaatctggggatctagctgaggcttttcggttatttgatgagatgaaactaaagggattagttcctgatagttttgtgtacacaacactcgtggatgggtgttgcagattgaacgatgtggaaagagctataaccatctttgggacaaacaagaagggctgtgcttctagtaccgcccctttcaatgctttgatcaattgggtttttaagtttggaaaaacagaattaaaaacagaagtgttaaatcggctaatggatgggtcgtttgataggtttggcaagcccaatgacgtaacatacaacattatgattgattatctatgcaaggaaggaaacttggaagctgcaaaggagctctttcaccagatgcagaacgctaatctgatgcctactgttataacttacacatctcttctaaacgggtatgataaaatgggtagaagagctgaaatgtttcctgtatttgatgaggcgattgctgcaggaattgaaccagaccacataatgtatagtgttatcatcaatgctttcctgaaagaagggatgacgacaaaagcacttgtgcttgtggatcaaatgtttgctaagaacgctgttgatgatgggtgtaagctaagtatttcaacatgccgggctctactctctggttttgctaaagtgggagaaatggaggtagctgagaaggttatggagaacatggttcgactccaatatattcctgattctgcgactgttattgagttaatcaatgaaagttgcatttcctcaaaccaaagagtggaagctgatgcagttccatagttttctagacggaaagctagagcagataaacttccttctttttctttgtggctaaaaacggagtctgctgcttttagtttggtttacggcaaatttctgatgggctgcaattgtggcaaaatttacaagctttatcatctcacttttgatgatctctactcagtctcaatcttctgatatgtcattgtatattttttcagttaccattaagaatctggaggtgctgttcctgaaacaatttgtgtctgctcataaactcttctggaccaattcatttacttcagaacggtttgccttcagctagacatgttggatcccattgatttacatgggagcagtttccattacgatgacgacaatcagaagttgacgatgaaaaggagacgcatgggagcaatttattctgcaacttcctctgttttcttagtctcggaaaaatcctgttgaagaacagagatgacagttttatactgatttttttatctataaaaagattttggtgtgcgaatgttactatgatgatcaacttatattaagttatttattcatcaatatcaaaatctggctggtgatt

SEQ ID NO: 96030 - protein, 976 aa, Arabidopsis thaliana
  peptide (1)..(976): Ceres Seq. ID no. 12731571
SVMMGSMLFRKRTLVTRANFLLFRSFSVNVEKLSDASAEIAGILKQENWRDTLVSSNLSIEINPEVVLSVLRSKRVDDPSKLLSFFNWVDSQKVTEQKLDSFSFLALDLCNFGSFEKALSVVERMIERNWPVAEVWSSIVRCSQEFVGKSDDGVLFGILFDGYIAKGYIEEAVFVFSSSMGLELVPRLSRCKVLLDALLRWNRLDLFWDVYKGMVERNVVFDVKTYHMLIIAHCRAGNVQLGKDVLFKTEKEFRTATLNVDGALKLKESMICKGLVPLKYTYDVLIDGLCKIKRLEDAKSLLVEMDSLGVSLDNHTYSLLIDGLLKGRNADAAKGLVHEMVSHGINIKPYMYDCCICVMSKEGVMEKAKALFDGMIASGLIPQAQAYASLIEGYCREKNVRQGYELLVEMKKRNIVISPYTYGTVVKGMCSSGDLDGAYNIVKEMIASGCRPNVVIYTTLIKTFLQNSRFGDAMRVLKEMKEQGIAPDIFCYNSLIIGLSKAKRMDEARSFLVEMVENGLKPNAFTYGAFISGYIEASEFASADKYVKEMRECGVLPNKVLCTGLINEYCKKGKVIEACSAYRSMVDQGILGDAKTYTVLMNGLFKNDKVDDAEEIFREMRGKGIAPDVFSYGVLINGFSKLGNMQKASSIFDEMVEEGLTPNVIIYNMLLGGFCRSGEIEKAKELLDEMSVKGLHPNAVTYCTIIDGYCKSGDLAEAFRLFDEMKLKGLVPDSFVYTTLVDGCCRLNDVERAITIFGTNKKGCASSTAPFNALINWVFKFGKTELKTEVLNRLMDGSFDRFGKPNDVTYNIMIDYLCKEGNLEAAKELFHQMQNANLMPTVITYTSLLNGYDKMGRRAEMFPVFDEAIAAGIEPDHIMYSVIINAFLKEGMTTKALVLVDQMFAKNAVDDGCKLSISTCRALLSGFAKVGEMEVAEKVMENMVRLQYIPDSATVIELINESCISSNQRVEADAVP

SEQ ID NO: 96031 - protein, 974 aa, Arabidopsis thaliana
  peptide (1)..(974): Ceres Seq. ID no. 12731572
MMGSMLFRKRTLVTRANFLLFRSFSVNVEKLSDASAEIAGILKQENWRDTLVSSNLSIEINPEVVLSVLRSKRVDDPSKLLSFFNWVDSQKVTEQKLDSFSFLALDLCNFGSFEKALSVVERMIERNWPVAEVWSSIVRCSQEFVGKSDDGVLFGILFDGYIAKGYIEEAVFVFSSSMGLELVPRLSRCKVLLDALLRWNRLDLFWDVYKGMVERNVVFDVKTYHMLIIAHCRAGNVQLGKDVLFKTEKEFRTATLNVDGALKLKESMICKGLVPLKYTYDVLIDGLCKIKRLEDAKSLLVEMDSLGVSLDNHTYSLLIDGLLKGRNADAAKGLVHEMVSHGINIKPYMYDCCICVMSKEGVMEKAKALFDGMIASGLIPQAQAYASLIEGYCREKNVRQGYELLVEMKKRNIVISPYTYGTVVKGMCSSGDLDGAYNIVKEMIASGCRPNVVIYTTLIKTFLQNSRFGDAMRVLKEMKEQGIAPDIFCYNSLIIGLSKAKRMDEARSFLVEMVENGLKPNAFTYGAFISGYIEASEFASADKYVKEMRECGVLPNKVLCTGLINEYCKKGKVIEACSAYRSMVDQGILGDAKTYTVLMNGLFKNDKVDDAEEIFREMRGKGIAPDVFSYGVLINGFSKLGNMQKASSIFDEMVEEGLTPNVIIYNMLLGGFCRSGEIEKAKELLDEMSVKGLHPNAVTYCTIIDGYCKSGDLAEAFRLFDEMKLKGLVPDSFVYTTLVDGCCRLNDVERAITIFGTNKKGCASSTAPFNALINWVFKFGKTELKTEVLNRLMDGSFDRFGKPNDVTYNIMIDYLCKEGNLEAAKELFHQMQNANLMPTVITYTSLLNGYDKMGRRAEMFPVFDEAIAAGIEPDHIMYSVIINAFLKEGMTTKALVLVDQMFAKNAVDDGCKLSISTCRALLSGFAKVGEMEVAEKVMENMVRLQYIPDSATVIELINESCISSNQRVEADAVP

SEQ ID NO: 96032 - protein, 973 aa, Arabidopsis thaliana
  peptide (1)..(973): Ceres Seq. ID no. 12731573
MGSMLFRKRTLVTRANFLLFRSFSVNVEKLSDASAEIAGILKQENWRDTLVSSNLSIEINPEVVLSVLRSKRVDDPSKLLSFFNWVDSQKVTEQKLDSFSFLALDLCNFGSFEKALSVVERMIERNWPVAEVWSSIVRCSQEFVGKSDDGVLFGILFDGYIAKGYIEEAVFVFSSSMGLELVPRLSRCKVLLDALLRWNRLDLFWDVYKGMVERNVVFDVKTYHMLIIAHCRAGNVQLGKDVLFKTEKEFRTATLNVDGALKLKESMICKGLVPLKYTYDVLIDGLCKIKRLEDAKSLLVEMDSLGVSLDNHTYSLLIDGLLKGRNADAAKGLVHEMVSHGINIKPYMYDCCICVMSKEGVMEKAKALFDGMIASGLIPQAQAYASLIEGYCREKNVRQGYELLVEMKKRNIVISPYTYGTVVKGMCSSGDLDGAYNIVKEMIASGCRPNVVIYTTLIKTFLQNSRFGDAMRVLKEMKEQGIAPDIFCYNSLIIGLSKAKRMDEARSFLVEMVENGLKPNAFTYGAFISGYIEASEFASADKYVKEMRECGVLPNKVLCTGLINEYCKKGKVIEACSAYRSMVDQGILGDAKTYTVLMNGLFKNDKVDDAEEIFREMRGKGIAPDVFSYGVLINGFSKLGNMQKASSIFDEMVEEGLTPNVIIYNMLLGGFCRSGEIEKAKELLDEMSVKGLHPNAVTYCTIIDGYCKSGDLAEAFRLFDEMKLKGLVPDSFVYTTLVDGCCRLNDVERAITIFGTNKKGCASSTAPFNALINWVFKFGKTELKTEVLNRLMDGSFDRFGKPNDVTYNIMIDYLCKEGNLEAAKELFHQMQNANLMPTVITYTSLLNGYDKMGRRAEMFPVFDEAIAAGIEPDHIMYSVIINAFLKEGMTTKALVLVDQMFAKNAVDDGCKLSISTCRALLSGFAKVGEMEVAEKVMENMVRLQYIPDSATVIELINESCISSNQRVEADAVP

SEQ ID NO: 96033 - DNA, 1671 bp, Arabidopsis thaliana
  misc_feature (1)..(1671): Ceres Seq. ID no. 12731582
  misc_feature (1)..(1671): Ortholog of  Ceres SEQ ID NO 14315874 as cited in SEQ ID NO 59983
  misc_feature (1)..(1671): Ortholog of  Ceres SEQ ID NO 13589000 as cited in SEQ ID NO 60876
  misc_feature (1)..(1671): Ortholog of  Ceres SEQ ID NO 14302787 as cited in SEQ ID NO 65398
ctctctctctctctctcttttgccgcagcgagatctctctcttcttctctctctctctggctctatgcatccacctgtctccgtaatttgatggacaagaagaaactgccacaccctaacccattcaattcctccgatcacccaccgacttactctgctctctagaaatttccctacgagaaagcttcttccttttgtctttttgcttctcctttcttcttctcttctatttcttctctctactctctactttcttctgtttttggtaatcggatggcgcgaaatctgccatgggttctgcttattattgtggtatcgtgtcttgtttcaacacttgaagctagtgaaggagattctgattctctttacaagtcatgtgttgatcaatgtcagaaaactggatgcgtgggggatacttgcttccaacactgtaaattttcagctgatggaaaagccattgacggtccatggtacatgcaagagccactttacctgagatggaaacaatgggattgccaaagtgattgtcagtacgaatgcatgatgacaagagaagaagaaagaaaaagaaacggagagagacctaccaagtatttcggtaaatggccactcaaacatgtctacggaattcaggaacctgtctctgttgctttctctgctctggatcttgcaatgcagtttcaaggatgggtctcatatttcatcctcgtttactataaattgcctctccagccaaatcggaaaacgtactacgagtacaatggaatagtgcatatctacgccatcattgtaatgaattcactcttctggagtagtatttgtcatagcagagatgttgaattgacggagaggctagattactcttcagctactgtattagccggattttcgcttattctagcaatactccggtccttcagtattcaagatcaatctgtcaaaatcatggttactgcacctattcttgcggttgttgcaactcatattctctaccttaatttctacaacctcgatgaagggcttcactggaaagttatattcgggattggaggaatagagctagtagtatggggattatgggcggctttaacgtcacatccatcaaagtggaagctaagagctttcttgatctcgagcatactcacattgtgtcttagaatgttcgacttccctccgtacaaaggctacatcgatgctcatgctctttggcgcggtgcagggattcctctttcttacctttggtggagtttcgtctgcgatgacgcagttttcagaaccaccgttaatctcaagaaatccaagtgatcatgaacaaatgatacaaaagtctcgtttatcttatatttttccggcgagtttctccggtgttcagaagttgtttttaggcgtgttttcgcagaagaagcaatgtttttggttcttctgtggtgaatctgcttcgctttttggggtcttcctctctctctgtttttatgtattatttttgttgttgttggttttttgtttttgctctcaaggcttgtcggccggagagttttaccgtcgagagggaccgatcttttaggatcaccagtttcattttcccgccctttgactcaaatcaaaagtccttttctagttatcatttttctcaatgtaaaaaaatgttctattaatctgtttttttattcc

SEQ ID NO: 96034 - protein, 343 aa, Arabidopsis thaliana
  peptide (1)..(343): Ceres Seq. ID no. 12731583
MARNLPWVLLIIVVSCLVSTLEASEGDSDSLYKSCVDQCQKTGCVGDTCFQHCKFSADGKAIDGPWYMQEPLYLRWKQWDCQSDCQYECMMTREEERKRNGERPTKYFGKWPLKHVYGIQEPVSVAFSALDLAMQFQGWVSYFILVYYKLPLQPNRKTYYEYNGIVHIYAIIVMNSLFWSSICHSRDVELTERLDYSSATVLAGFSLILAILRSFSIQDQSVKIMVTAPILAVVATHILYLNFYNLDEGLHWKVIFGIGGIELVVWGLWAALTSHPSKWKLRAFLISSILTLCLRMFDFPPYKGYIDAHALWRGAGIPLSYLWWSFVCDDAVFRTTVNLKKSK

SEQ ID NO: 96035 - protein, 276 aa, Arabidopsis thaliana
  peptide (1)..(276): Ceres Seq. ID no. 12731584
MQEPLYLRWKQWDCQSDCQYECMMTREEERKRNGERPTKYFGKWPLKHVYGIQEPVSVAFSALDLAMQFQGWVSYFILVYYKLPLQPNRKTYYEYNGIVHIYAIIVMNSLFWSSICHSRDVELTERLDYSSATVLAGFSLILAILRSFSIQDQSVKIMVTAPILAVVATHILYLNFYNLDEGLHWKVIFGIGGIELVVWGLWAALTSHPSKWKLRAFLISSILTLCLRMFDFPPYKGYIDAHALWRGAGIPLSYLWWSFVCDDAVFRTTVNLKKSK

SEQ ID NO: 96036 - protein, 254 aa, Arabidopsis thaliana
  peptide (1)..(254): Ceres Seq. ID no. 12731585
MMTREEERKRNGERPTKYFGKWPLKHVYGIQEPVSVAFSALDLAMQFQGWVSYFILVYYKLPLQPNRKTYYEYNGIVHIYAIIVMNSLFWSSICHSRDVELTERLDYSSATVLAGFSLILAILRSFSIQDQSVKIMVTAPILAVVATHILYLNFYNLDEGLHWKVIFGIGGIELVVWGLWAALTSHPSKWKLRAFLISSILTLCLRMFDFPPYKGYIDAHALWRGAGIPLSYLWWSFVCDDAVFRTTVNLKKSK

SEQ ID NO: 96037 - DNA, 1091 bp, Arabidopsis thaliana
  misc_feature (1)..(1091): Ceres Seq. ID no. 12731590
  misc_feature (1)..(1091): Ortholog of  Ceres SEQ ID NO 13581804 as cited in SEQ ID NO 51424
  misc_feature (1)..(1091): Ortholog of  Ceres SEQ ID NO 13663874 as cited in SEQ ID NO 67003
aaaaaaaaactttctataaaaaaaaaaaacattaagaaacttgccccttccttctctcacagatcattctagggctcctgacagaaaaaccaaataccttttcctctttccatttttgtagaatttcaaatctttctttcctcaatctttcacaatgatcttttcctgtgaagttcttgattttaaatcaccctttcttcactactagcttatctcttcttcaattttctctaccgacattcaattactctccctattcggtgagatctctctctctcttttatgactttggttatgatgactggtcactggcttgtttagggtttcaatctttacagatcttgtggcagaaaaaatcaagtcaaagcaagaaaaatggttagaggaaagatagagatgaagaaaatagaaaacgcaacgagtagacaagtgactttctcaaaaagaagaaatggtttgttgaagaaagcttatgagctctcagtactctgcgatgctcaactctctctcatcatcttctcccagagaggaaggctttatgaattctctagctctgatatgcagaagacgatcgaacgctaccgcaagtacacaaaagatcatgaaaccagcaatcacgactcacaaattcacttgcagcaattgaaacaagaagcaagccacatgataacaaagattgaactccttgagtttcacaagcggaagctattgggacaaggaattgcttcttgttctctagaagagcttcaagaaatcgatagtcaactccaaagaagtctgggaaaggtccgagaaagaaaggctcaattgttcaaggagcagttggagaaactaaaagcaaaggagaaacaattgttagaagagaacgtcaagttacatcaaaagaatgttattaatccatggagaggatcatcgactgatcagcagcaagagaaatacaaagttatagatttgaatttggaagttgaaactgacttattcatcggtttgccaaatagaaactgctagtaacattatataatatgtttatttatttatcatgaaatattcaaaatcattcaataaattgtgaggtaatgatttgggatagt

SEQ ID NO: 96038 - protein, 210 aa, Arabidopsis thaliana
  peptide (1)..(210): Ceres Seq. ID no. 12731591
MVRGKIEMKKIENATSRQVTFSKRRNGLLKKAYELSVLCDAQLSLIIFSQRGRLYEFSSSDMQKTIERYRKYTKDHETSNHDSQIHLQQLKQEASHMITKIELLEFHKRKLLGQGIASCSLEELQEIDSQLQRSLGKVRERKAQLFKEQLEKLKAKEKQLLEENVKLHQKNVINPWRGSSTDQQQEKYKVIDLNLEVETDLFIGLPNRNC

SEQ ID NO: 96039 - protein, 203 aa, Arabidopsis thaliana
  peptide (1)..(203): Ceres Seq. ID no. 12731592
MKKIENATSRQVTFSKRRNGLLKKAYELSVLCDAQLSLIIFSQRGRLYEFSSSDMQKTIERYRKYTKDHETSNHDSQIHLQQLKQEASHMITKIELLEFHKRKLLGQGIASCSLEELQEIDSQLQRSLGKVRERKAQLFKEQLEKLKAKEKQLLEENVKLHQKNVINPWRGSSTDQQQEKYKVIDLNLEVETDLFIGLPNRNC

SEQ ID NO: 96040 - protein, 149 aa, Arabidopsis thaliana
  peptide (1)..(149): Ceres Seq. ID no. 12731593
MQKTIERYRKYTKDHETSNHDSQIHLQQLKQEASHMITKIELLEFHKRKLLGQGIASCSLEELQEIDSQLQRSLGKVRERKAQLFKEQLEKLKAKEKQLLEENVKLHQKNVINPWRGSSTDQQQEKYKVIDLNLEVETDLFIGLPNRNC

SEQ ID NO: 96041 - DNA, 1911 bp, Arabidopsis thaliana
  misc_feature (1)..(1911): Ceres Seq. ID no. 12731598
  misc_feature (1)..(1911): Ortholog of  Ceres SEQ ID NO 13660443 as cited in SEQ ID NO 67438
atgggcaagtctagtaagaaatccgtcaccgaagttgaaacacctgcttcaatgacaaagccactcaagaaaggtaagagagatgcggaagaggatttggacatgcaagttacgaagaagcagaagaaagagttgattgatgttgttcagaaggagaaagctgagaaaacggtacctaagaaggtagagagtagcagttctgacgcttctgattctgatgaagaggagaagactaaggaaactccatctaagttgaaggatgagtcttcttctgaagaggaggatgactcttcttcagatgaggaaattgcgcctgcgaagaagcgaccagaacctattaagaaggctaaggtagagagcagctcatctgatgatgattctacttcagacgaggaaactgcccctgtgaagaagcaaccagcagtccttgagaaggctaaggtagagagcagctcatctgatgatgattcttcttcagacgaggaaactgtccctgtgaagaagcaaccagcagtccttgagaaggctaagatagagagcagctcatctgatgatgattcttcttcagacgaggaaactgtccctatgaagaagcaaacagcagtccttgagaaggctaaggcagagagcagttcatccgacgatggatcttcttcggacgaggaacccacccctgcaaagaaagaaccaatcgttgttaagaaagacagctcagatgaatcttcttcagatgaggaaacccccgttgtgaagaagaagccaacaacagttgttaaggatgccaaggcagaaagcagttcatcagaggaggaatcttcttcggacgatgaaccaacacctgccaagaagccaacagttgttaagaatgctaaaccagctgcaaaagattcatcatcctcagaggaagattctgatgaggaggaaagtgatgatgaaaaacctcctacgaagaaggctaaagtttcatcaaaaacttctaaacaagaaagctctagtgatgaatctagtgatgaatctgataaggaggagagtaaagatgagaaagtgacaccaaagaaaaaggattctgatgttgaaatggtggatgcagagcagaaatctaatgcaaagcagccgaagacacctactaatcagactcagggaggatcaaagacgctatttgctggaaatctttcctatcaaattgcgagatctgacatagagaatttcttcaaagaagctggtgaagttgtcgatgttagactttcttcatttgatgatgggagttttaagggatatgggcatattgaatttgcttctccagaagaagctcagaaggcattggaaatgaacggtaaattgttactaggccgcgatgttcgtcttgatcttgctaacgagaggggtactccacgaaacagcaatcctggtcgcaaaggagaaggaagccaaagtcgaacgatttacgttagaggattcagttcttctcttggcgaagatgaaatcaagaaagagttgagaagtcattttagcaagtgtggagaggtgacaagggttcatgttccaacagatcgtgagactggtgcttccaggggctttgcttacatagatttgacgagtggattcgatgaggcgttgcaactgagcggaagtgaaattggaggagggaacatacatgtggaagagtctagaccaagagatagtgatgagggccgttcctcaaacagagcacctgctagaggagcacctcgtggccgtcactcagatagagcacctcgtggaggacgtttctcggatagagcaccacgtggacgtcactcagatagaggagcacctcgtggccgtttcagtacgcgtggaagaggacccagcaaaccaagtgtaatggaatcatccaaagggacgaagacggtctttaatgatgaagagtag

SEQ ID NO: 96042 - protein, 636 aa, Arabidopsis thaliana
  peptide (1)..(636): Ceres Seq. ID no. 12731599
MGKSSKKSVTEVETPASMTKPLKKGKRDAEEDLDMQVTKKQKKELIDVVQKEKAEKTVPKKVESSSSDASDSDEEEKTKETPSKLKDESSSEEEDDSSSDEEIAPAKKRPEPIKKAKVESSSSDDDSTSDEETAPVKKQPAVLEKAKVESSSSDDDSSSDEETVPVKKQPAVLEKAKIESSSSDDDSSSDEETVPMKKQTAVLEKAKAESSSSDDGSSSDEEPTPAKKEPIVVKKDSSDESSSDEETPVVKKKPTTVVKDAKAESSSSEEESSSDDEPTPAKKPTVVKNAKPAAKDSSSSEEDSDEEESDDEKPPTKKAKVSSKTSKQESSSDESSDESDKEESKDEKVTPKKKDSDVEMVDAEQKSNAKQPKTPTNQTQGGSKTLFAGNLSYQIARSDIENFFKEAGEVVDVRLSSFDDGSFKGYGHIEFASPEEAQKALEMNGKLLLGRDVRLDLANERGTPRNSNPGRKGEGSQSRTIYVRGFSSSLGEDEIKKELRSHFSKCGEVTRVHVPTDRETGASRGFAYIDLTSGFDEALQLSGSEIGGGNIHVEESRPRDSDEGRSSNRAPARGAPRGRHSDRAPRGGRFSDRAPRGRHSDRGAPRGRFSTRGRGPSKPSVMESSKGTKTVFNDEE

SEQ ID NO: 96043 - protein, 619 aa, Arabidopsis thaliana
  peptide (1)..(619): Ceres Seq. ID no. 12731600
MTKPLKKGKRDAEEDLDMQVTKKQKKELIDVVQKEKAEKTVPKKVESSSSDASDSDEEEKTKETPSKLKDESSSEEEDDSSSDEEIAPAKKRPEPIKKAKVESSSSDDDSTSDEETAPVKKQPAVLEKAKVESSSSDDDSSSDEETVPVKKQPAVLEKAKIESSSSDDDSSSDEETVPMKKQTAVLEKAKAESSSSDDGSSSDEEPTPAKKEPIVVKKDSSDESSSDEETPVVKKKPTTVVKDAKAESSSSEEESSSDDEPTPAKKPTVVKNAKPAAKDSSSSEEDSDEEESDDEKPPTKKAKVSSKTSKQESSSDESSDESDKEESKDEKVTPKKKDSDVEMVDAEQKSNAKQPKTPTNQTQGGSKTLFAGNLSYQIARSDIENFFKEAGEVVDVRLSSFDDGSFKGYGHIEFASPEEAQKALEMNGKLLLGRDVRLDLANERGTPRNSNPGRKGEGSQSRTIYVRGFSSSLGEDEIKKELRSHFSKCGEVTRVHVPTDRETGASRGFAYIDLTSGFDEALQLSGSEIGGGNIHVEESRPRDSDEGRSSNRAPARGAPRGRHSDRAPRGGRFSDRAPRGRHSDRGAPRGRFSTRGRGPSKPSVMESSKGTKTVFNDEE

SEQ ID NO: 96044 - protein, 602 aa, Arabidopsis thaliana
  peptide (1)..(602): Ceres Seq. ID no. 12731601
MQVTKKQKKELIDVVQKEKAEKTVPKKVESSSSDASDSDEEEKTKETPSKLKDESSSEEEDDSSSDEEIAPAKKRPEPIKKAKVESSSSDDDSTSDEETAPVKKQPAVLEKAKVESSSSDDDSSSDEETVPVKKQPAVLEKAKIESSSSDDDSSSDEETVPMKKQTAVLEKAKAESSSSDDGSSSDEEPTPAKKEPIVVKKDSSDESSSDEETPVVKKKPTTVVKDAKAESSSSEEESSSDDEPTPAKKPTVVKNAKPAAKDSSSSEEDSDEEESDDEKPPTKKAKVSSKTSKQESSSDESSDESDKEESKDEKVTPKKKDSDVEMVDAEQKSNAKQPKTPTNQTQGGSKTLFAGNLSYQIARSDIENFFKEAGEVVDVRLSSFDDGSFKGYGHIEFASPEEAQKALEMNGKLLLGRDVRLDLANERGTPRNSNPGRKGEGSQSRTIYVRGFSSSLGEDEIKKELRSHFSKCGEVTRVHVPTDRETGASRGFAYIDLTSGFDEALQLSGSEIGGGNIHVEESRPRDSDEGRSSNRAPARGAPRGRHSDRAPRGGRFSDRAPRGRHSDRGAPRGRFSTRGRGPSKPSVMESSKGTKTVFNDEE

SEQ ID NO: 96045 - DNA, 1425 bp, Arabidopsis thaliana
  misc_feature (1)..(1425): Ceres Seq. ID no. 12731630
  misc_feature (1)..(1425): Ortholog of  Ceres SEQ ID NO 12586556 as cited in SEQ ID NO 64667
  misc_feature (1)..(1425): Ortholog of  Ceres SEQ ID NO 13660894 as cited in SEQ ID NO 67475
atgatgatgattatgatgaagatgggaccaagatttttgtccttgttgcaacagaattcgaaaaccctaattcaagctaagcaaatccatgctcaattagtcatcaatggctgccatgataattctctatttggcaaactcataggccattactgttcaaagccatcaaccgaaagcagctcaaagcttgctcatttactagtgtttcctcgatttggtcatcctgataagtttctcttcaacacattgcttaaatgtagcaaaccagaggactcgattcggatttttgccaattatgcatcaaaaagttcgttgctttatctcaatgagcgcacttttgtcttcgtccttggcgcttgtgctaggtcagcttcgtcgtcggcgttacgggttggtagaattgttcatgggatggtgaaaaagcttggctttctatatgaatctgaattgattggaaccactttactccatttctacgctaagaatggagatttacgttatgcaaggaaggtgtttgacgaaatgcctgagagaacctctgttacatggaacgcaatgataggtggatattgttcacataaggataaaggcaatcacaatgcgagaaaggctatggttttgtttaggagattctcttgctgtggtagtggagttagacctactgatacaaccatggtttgtgttctttcagccatttctcagacgggtttgctcgaaattggttctctcgttcatggttacatagaaaagctcgggttcacacccgaagttgatgtctttatcggtactgcacttgtcgacatgtactcaaaatgcggctgcttgaacaacgcattctccgtgttcgagctaatgaaagtgaaaaatgtctttacatggacttcaatggcaacggggctagctctcaacggtagaggaaacgaaacaccgaatcttctaaaccgaatggcggaatctgggatcaaaccaaacgaaataactttcactagcttgctttcggcttatcgtcatataggtcttgttgaagaaggaatcgagctgttcaagagcatgaagacaagatttggtgtcacaccggttatcgaacactatggttgcatagtagatcttcttggtaaggcagggcggatacaagaggcttatcagtttatattagctatgcctataaagcctgacgctatcttgttaagaagcctctgcaatgcctgcagcatttatggagagactgtaatgggtgaagagatcggaaaggctcttctcgagatagaacgagaggacgagaagctttcgggttctgagtgcgaagattatgtcgctttatcgaatgtgttagctcataaagggaaatgggtagaggtagagaagctgaggaaggagatgaaagaaagaagaatcaaaacaagacctggttacagttttgtttaa

SEQ ID NO: 96046 - protein, 474 aa, Arabidopsis thaliana
  peptide (1)..(474): Ceres Seq. ID no. 12731631
MMMIMMKMGPRFLSLLQQNSKTLIQAKQIHAQLVINGCHDNSLFGKLIGHYCSKPSTESSSKLAHLLVFPRFGHPDKFLFNTLLKCSKPEDSIRIFANYASKSSLLYLNERTFVFVLGACARSASSSALRVGRIVHGMVKKLGFLYESELIGTTLLHFYAKNGDLRYARKVFDEMPERTSVTWNAMIGGYCSHKDKGNHNARKAMVLFRRFSCCGSGVRPTDTTMVCVLSAISQTGLLEIGSLVHGYIEKLGFTPEVDVFIGTALVDMYSKCGCLNNAFSVFELMKVKNVFTWTSMATGLALNGRGNETPNLLNRMAESGIKPNEITFTSLLSAYRHIGLVEEGIELFKSMKTRFGVTPVIEHYGCIVDLLGKAGRIQEAYQFILAMPIKPDAILLRSLCNACSIYGETVMGEEIGKALLEIEREDEKLSGSECEDYVALSNVLAHKGKWVEVEKLRKEMKERRIKTRPGYSFV

SEQ ID NO: 96047 - protein, 473 aa, Arabidopsis thaliana
  peptide (1)..(473): Ceres Seq. ID no. 12731632
MMIMMKMGPRFLSLLQQNSKTLIQAKQIHAQLVINGCHDNSLFGKLIGHYCSKPSTESSSKLAHLLVFPRFGHPDKFLFNTLLKCSKPEDSIRIFANYASKSSLLYLNERTFVFVLGACARSASSSALRVGRIVHGMVKKLGFLYESELIGTTLLHFYAKNGDLRYARKVFDEMPERTSVTWNAMIGGYCSHKDKGNHNARKAMVLFRRFSCCGSGVRPTDTTMVCVLSAISQTGLLEIGSLVHGYIEKLGFTPEVDVFIGTALVDMYSKCGCLNNAFSVFELMKVKNVFTWTSMATGLALNGRGNETPNLLNRMAESGIKPNEITFTSLLSAYRHIGLVEEGIELFKSMKTRFGVTPVIEHYGCIVDLLGKAGRIQEAYQFILAMPIKPDAILLRSLCNACSIYGETVMGEEIGKALLEIEREDEKLSGSECEDYVALSNVLAHKGKWVEVEKLRKEMKERRIKTRPGYSFV

SEQ ID NO: 96048 - protein, 472 aa, Arabidopsis thaliana
  peptide (1)..(472): Ceres Seq. ID no. 12731633
MIMMKMGPRFLSLLQQNSKTLIQAKQIHAQLVINGCHDNSLFGKLIGHYCSKPSTESSSKLAHLLVFPRFGHPDKFLFNTLLKCSKPEDSIRIFANYASKSSLLYLNERTFVFVLGACARSASSSALRVGRIVHGMVKKLGFLYESELIGTTLLHFYAKNGDLRYARKVFDEMPERTSVTWNAMIGGYCSHKDKGNHNARKAMVLFRRFSCCGSGVRPTDTTMVCVLSAISQTGLLEIGSLVHGYIEKLGFTPEVDVFIGTALVDMYSKCGCLNNAFSVFELMKVKNVFTWTSMATGLALNGRGNETPNLLNRMAESGIKPNEITFTSLLSAYRHIGLVEEGIELFKSMKTRFGVTPVIEHYGCIVDLLGKAGRIQEAYQFILAMPIKPDAILLRSLCNACSIYGETVMGEEIGKALLEIEREDEKLSGSECEDYVALSNVLAHKGKWVEVEKLRKEMKERRIKTRPGYSFV

SEQ ID NO: 96049 - DNA, 1389 bp, Arabidopsis thaliana
  misc_feature (1)..(1389): Ceres Seq. ID no. 12731648
  misc_feature (1)..(1389): Ortholog of  Ceres SEQ ID NO 15176437 as cited in SEQ ID NO 54861
  misc_feature (1)..(1389): Ortholog of  Ceres SEQ ID NO 15176748 as cited in SEQ ID NO 55581
atggtttccgacttggacctcgtgacccgactccgtgagattctcggtagctccgacctgaacacggcgactccggcaagcgtccgtcgtcagttggaggcggatttcggtgtggacttgacagataaaaaagcgtatattagggatcaaatcgatacttttctcgagagcaatggcgcggtagaagacaaacctgagagtcccaaggtagaagaatacattaatgccgacgaaatcaaggcggaaattgaaggaggcgatggagaagacctcgacggagatggaagtggaagtgaggaagagaaggaagaacggccagtaaaggccaagaagcgaggtggtggcattaccaaagtatctcagttatctccacaacttgagaaagttgttggagcatctcagttaggtcgaaccgaggttgtgaagaaaatgtgggcatatatccgagagaaggatttgcaagacccaaaggataggaggaagatagtgtgtgacgagttgttgcattccttgttccgtgttaagaccattaatatgtttcaaatgaacaaggcattaaccaagcatatttggcccttaggtgatggagatgggtgtgctaacgatgtgaaagaagaagatgaagatgaggcatcagagggaacagataagaaaggggagcagagcgaagaagtggaagagaataaggaagaagaaagtgaagagcaggaagttaggagtttgcggaaacgcaagagaaaaaagccagccaagtcggtagagaagcccaagagaaaaggaggaggcggctttgctaaagtttgcagcctctcgccagagcttcaggcgtttactggggtgacagaattagccaggacagaggttgtgaaattgctttggaagtacataaaggagaacaatttacaagatccgaatgataaacgctctataatatgcgacgaatcatttcgatctctgttccctgtcgagtccatcaatatgtttcaaatgaataaacagctaacaaagcacatatggcctttagaggataatgcaggagaatcagttagctctaagtctccaaagaatggaaagcaaaaaatggaatcagatggagatagtgaggaaccaaatgagaaagataaaaagcagaagaaagaagttcttgctccccttccactttcagatgctcttgtcaagttcttgggtgatggagaaaactcgctgtcgagggcggatgtggtaaagagattgtgggagtacataaatcataatgatcttcaggatccttctgacaagaggagagtcatatgcgatgagaagctgaaagaactctttgaagttgattcattcgaagacacatcagtctcaaaacttctgaccaaccacttcatcaaggccgaacaatga

SEQ ID NO: 96050 - protein, 462 aa, Arabidopsis thaliana
  peptide (1)..(462): Ceres Seq. ID no. 12731649
MVSDLDLVTRLREILGSSDLNTATPASVRRQLEADFGVDLTDKKAYIRDQIDTFLESNGAVEDKPESPKVEEYINADEIKAEIEGGDGEDLDGDGSGSEEEKEERPVKAKKRGGGITKVSQLSPQLEKVVGASQLGRTEVVKKMWAYIREKDLQDPKDRRKIVCDELLHSLFRVKTINMFQMNKALTKHIWPLGDGDGCANDVKEEDEDEASEGTDKKGEQSEEVEENKEEESEEQEVRSLRKRKRKKPAKSVEKPKRKGGGGFAKVCSLSPELQAFTGVTELARTEVVKLLWKYIKENNLQDPNDKRSIICDESFRSLFPVESINMFQMNKQLTKHIWPLEDNAGESVSSKSPKNGKQKMESDGDSEEPNEKDKKQKKEVLAPLPLSDALVKFLGDGENSLSRADVVKRLWEYINHNDLQDPSDKRRVICDEKLKELFEVDSFEDTSVSKLLTNHFIKAEQ

SEQ ID NO: 96051 - protein, 319 aa, Arabidopsis thaliana
  peptide (1)..(319): Ceres Seq. ID no. 12731650
MWAYIREKDLQDPKDRRKIVCDELLHSLFRVKTINMFQMNKALTKHIWPLGDGDGCANDVKEEDEDEASEGTDKKGEQSEEVEENKEEESEEQEVRSLRKRKRKKPAKSVEKPKRKGGGGFAKVCSLSPELQAFTGVTELARTEVVKLLWKYIKENNLQDPNDKRSIICDESFRSLFPVESINMFQMNKQLTKHIWPLEDNAGESVSSKSPKNGKQKMESDGDSEEPNEKDKKQKKEVLAPLPLSDALVKFLGDGENSLSRADVVKRLWEYINHNDLQDPSDKRRVICDEKLKELFEVDSFEDTSVSKLLTNHFIKAEQ

SEQ ID NO: 96052 - protein, 284 aa, Arabidopsis thaliana
  peptide (1)..(284): Ceres Seq. ID no. 12731651
MFQMNKALTKHIWPLGDGDGCANDVKEEDEDEASEGTDKKGEQSEEVEENKEEESEEQEVRSLRKRKRKKPAKSVEKPKRKGGGGFAKVCSLSPELQAFTGVTELARTEVVKLLWKYIKENNLQDPNDKRSIICDESFRSLFPVESINMFQMNKQLTKHIWPLEDNAGESVSSKSPKNGKQKMESDGDSEEPNEKDKKQKKEVLAPLPLSDALVKFLGDGENSLSRADVVKRLWEYINHNDLQDPSDKRRVICDEKLKELFEVDSFEDTSVSKLLTNHFIKAEQ

SEQ ID NO: 96053 - DNA, 1368 bp, Arabidopsis thaliana
  misc_feature (1)..(1368): Ceres Seq. ID no. 12731652
  misc_feature (1)..(1368): Ortholog of  Ceres SEQ ID NO 14307776 as cited in SEQ ID NO 59397
atggcgcagatgcagcgagaagaagtagagtccgtcacgacggagaagaaaagattagacggaggcggtggatcttccggcgctcaggcaacggcgttcaaattcaacgctcaagcgccggaatttgtaccgcgatcacataccaccgcaccagcaccgcaggtttctcctgtctccggttacttttatccttgttttcattacaacggtggttgcataggaggatgtggcggcggagtctgcggtggtggagggaccggcgttggtactcagtcgtcggattggatctacgtgggaggaggagatcctactgctcagcatcaacatgttcatgatccagcggctgcgttttacatttcgaatccggcggttcagtttccggctagtcagaactcgtcttcttcgtcgaagaatctgctttccgatgatctccgccttaagatcgtcaaacaggttgagtaccagtttacggacatgagtctcctagccaacgagtccatttcaaagcatataagcaaagaccctgaaggttatgtgcccgtatcctatatcgcttcgaccaagaagatcaaggctttaacgagtaatcaccacctagtttcacttgctctacgctcctcttcaaaacttgttgtgagtgaagacggcaagaaagttaagcgtacaagtcaatttactgatagagacagagaggaattgcagggccggactgtcgttgcagagaatttgccagatgatcattcttaccagaaccttgagaagatctttggagttgttggaaacgtcaaagcgattcgtatatgtcatcctccagaatccaactcgtctcgtccaaaaggcgatttcttgatgagcaacaaaattcacgcccttatcgagtatgacaacactgttatcgcggacaaagcagtagagaagctaaacgatgaaagaaactggaggaaagggcttcgtgtgaggctgcttcttagatgctcgccaaaatcggtgctcaagaaccgaagaaacttcgatggaatcctcatcgatgatgaactcccttcttatgaatcaggagaagactctccgcgtctccatttaaccgaatcacagcttgataacgatggtgatgacaacaatgttggtggactgtggggtaaagggagaggaaaaggacgaggacgatccccaagaagctacgcagtaggaggaggaggacgtagcttcgggattgggctcggagtcagcctcgggatacccagcctggggtcacacgaatcttcgtctcctaaaacagcaacaaagggaccaagaatgcctgatggaaccagaggcttcaccatgggacgtggcaaaccttccatctcactctcacctaacaatctctaa

SEQ ID NO: 96054 - protein, 455 aa, Arabidopsis thaliana
  peptide (1)..(455): Ceres Seq. ID no. 12731653
MAQMQREEVESVTTEKKRLDGGGGSSGAQATAFKFNAQAPEFVPRSHTTAPAPQVSPVSGYFYPCFHYNGGCIGGCGGGVCGGGGTGVGTQSSDWIYVGGGDPTAQHQHVHDPAAAFYISNPAVQFPASQNSSSSSKNLLSDDLRLKIVKQVEYQFTDMSLLANESISKHISKDPEGYVPVSYIASTKKIKALTSNHHLVSLALRSSSKLVVSEDGKKVKRTSQFTDRDREELQGRTVVAENLPDDHSYQNLEKIFGVVGNVKAIRICHPPESNSSRPKGDFLMSNKIHALIEYDNTVIADKAVEKLNDERNWRKGLRVRLLLRCSPKSVLKNRRNFDGILIDDELPSYESGEDSPRLHLTESQLDNDGDDNNVGGLWGKGRGKGRGRSPRSYAVGGGGRSFGIGLGVSLGIPSLGSHESSSPKTATKGPRMPDGTRGFTMGRGKPSISLSPNNL

SEQ ID NO: 96055 - protein, 452 aa, Arabidopsis thaliana
  peptide (1)..(452): Ceres Seq. ID no. 12731654
MQREEVESVTTEKKRLDGGGGSSGAQATAFKFNAQAPEFVPRSHTTAPAPQVSPVSGYFYPCFHYNGGCIGGCGGGVCGGGGTGVGTQSSDWIYVGGGDPTAQHQHVHDPAAAFYISNPAVQFPASQNSSSSSKNLLSDDLRLKIVKQVEYQFTDMSLLANESISKHISKDPEGYVPVSYIASTKKIKALTSNHHLVSLALRSSSKLVVSEDGKKVKRTSQFTDRDREELQGRTVVAENLPDDHSYQNLEKIFGVVGNVKAIRICHPPESNSSRPKGDFLMSNKIHALIEYDNTVIADKAVEKLNDERNWRKGLRVRLLLRCSPKSVLKNRRNFDGILIDDELPSYESGEDSPRLHLTESQLDNDGDDNNVGGLWGKGRGKGRGRSPRSYAVGGGGRSFGIGLGVSLGIPSLGSHESSSPKTATKGPRMPDGTRGFTMGRGKPSISLSPNNL

SEQ ID NO: 96056 - protein, 297 aa, Arabidopsis thaliana
  peptide (1)..(297): Ceres Seq. ID no. 12731655
MSLLANESISKHISKDPEGYVPVSYIASTKKIKALTSNHHLVSLALRSSSKLVVSEDGKKVKRTSQFTDRDREELQGRTVVAENLPDDHSYQNLEKIFGVVGNVKAIRICHPPESNSSRPKGDFLMSNKIHALIEYDNTVIADKAVEKLNDERNWRKGLRVRLLLRCSPKSVLKNRRNFDGILIDDELPSYESGEDSPRLHLTESQLDNDGDDNNVGGLWGKGRGKGRGRSPRSYAVGGGGRSFGIGLGVSLGIPSLGSHESSSPKTATKGPRMPDGTRGFTMGRGKPSISLSPNNL

SEQ ID NO: 96057 - DNA, 2275 bp, Arabidopsis thaliana
  misc_feature (1)..(2275): Ceres Seq. ID no. 12731656
  misc_feature (1)..(2275): Ortholog of  Ceres SEQ ID NO 13659971 as cited in SEQ ID NO 67565
  misc_feature (1)..(2275): Ortholog of  Ceres SEQ ID NO 13500385 as cited in SEQ ID NO 67583
gcagattctgccatgtggcttctctctcttctacagctcacttcttctctctctgtctctctctaactacattgaaaccaaaccagagtgcttcaatgtcattgctgtgattctctttaagtccagacataactcccatatcttcttcttctgtctttttttatttctttgaaccggagaagaagaagaagaaggagaaggatatatgggaggctgtacttccaaaccttcctcctccgtcaaacctaatccttacgcacccaaagacgcggttctccaaaatgacgattctacccctgctcatcccgggaaatcaccggttcgttcatctcccgccgtaaaggcctctccttttttccctttttacacgcctagtcccgcccggcaccgccgtaacaagagccgcgacggcggaggaggagagagtaagagcgttaccagcactcctctccgtcagctcgcgcgtgctttccaccctccgtcaccggcgagacatatacgggatgttctgcggcggaggaaggagaagaaggaggctgctctgccggcggcgaggcagcagaaggaggaggaggagagggaagaggtagggctggataaaagatttgggttttccaaggagttacagagtaggattgagctaggggaagagattgggagagggcattttgggtatacttgctctgctaagttcaagaaaggagagctcaaagatcaggaggttgctgttaaagtcatcccaaaatctaagatgacatctgcaatatctatagaggatgtgagaagagaagtgaaaatactgcgggcgttatctggacatcaaaatttggtacaattctatgatgcgttcgaggacaatgccaacgtttacatcgttatggagttatgtggaggtggtgaacttcttgacaggatactagcaaggggaggaaaatactctgaagatgatgcaaaagcagtgcttatacagatccttaacgtcgtagctttctgtcatctccaaggagttgttcatcgagatctaaaaccagagaacttcttgtacacttccaaggaggagaattctatgttgaaagtcatagattttggcttatcggactttgtcagaccagacgaaagactaaatgatatagtgggaagtgcatattacgtagcccctgaagttctacacagatcttataccacagaagcggatgtatggagcataggagtcatagcatacattctcctatgtggaagccgtcctttttgggcaagaactgaatcaggaattttcagagcagttctaaaagctgatcccagttttgatgaacctccttggccttcgttatcctttgaggcaaaagattttgttaagagattattgtacaaggaccctcggaaaagaatgactgcatctcaagctttgatgcatccttggatcgcgggttataagaaaatagatatcccatttgatattctgatcttcaagcagatcaaagcatacttgagatcttcgtctttgcgcaaagctgctttgatggctctgtccaagacattaactaccgatgaacttctttatctgaaagcgcagtttgcacacttagcacccaacaaaaatggcctcatcactttagatagcatcagactggcacttgcgacaaatgcaacagaagcaatgaaggaatcacggatcccggactttcttgcattgttaaatggacttcaatacaaagggatggattttgaagagttttgtgcagcttccattagcgttcatcagcatgagtctcttgattgttgggagcagagcattcgtcatgcttatgagctatttgaaatgaatggaaaccgagttatcgtcatcgaagaactcgcttctgaacttggtgttggatcatccatcccggttcataccattctaaatgactggataagacatactgacgggaagctgagtttcttgggttttgtcaaactgctgcacggtgtctcgactcgacaatctttagcgaaaacgcgatgaggaaagtgactcggtgttataacggattcgaaagaggaagaacatacaactgcaagaagcaaatgggtggattggggttgggaattggaatttttttcaggacccattcctatgtttatagtgttagaaaaagaatgctaagttccgacaaagaaagagagtatccagaaaaatccgacaggcctggagagttgtataataagatgataatccacagtcgtgttcttccaaatcatggaagacagatattaagaacatccctttctcttt

SEQ ID NO: 96058 - protein, 599 aa, Arabidopsis thaliana
  peptide (1)..(599): Ceres Seq. ID no. 12731657
MGGCTSKPSSSVKPNPYAPKDAVLQNDDSTPAHPGKSPVRSSPAVKASPFFPFYTPSPARHRRNKSRDGGGGESKSVTSTPLRQLARAFHPPSPARHIRDVLRRRKEKKEAALPAARQQKEEEEREEVGLDKRFGFSKELQSRIELGEEIGRGHFGYTCSAKFKKGELKDQEVAVKVIPKSKMTSAISIEDVRREVKILRALSGHQNLVQFYDAFEDNANVYIVMELCGGGELLDRILARGGKYSEDDAKAVLIQILNVVAFCHLQGVVHRDLKPENFLYTSKEENSMLKVIDFGLSDFVRPDERLNDIVGSAYYVAPEVLHRSYTTEADVWSIGVIAYILLCGSRPFWARTESGIFRAVLKADPSFDEPPWPSLSFEAKDFVKRLLYKDPRKRMTASQALMHPWIAGYKKIDIPFDILIFKQIKAYLRSSSLRKAALMALSKTLTTDELLYLKAQFAHLAPNKNGLITLDSIRLALATNATEAMKESRIPDFLALLNGLQYKGMDFEEFCAASISVHQHESLDCWEQSIRHAYELFEMNGNRVIVIEELASELGVGSSIPVHTILNDWIRHTDGKLSFLGFVKLLHGVSTRQSLAKTR

SEQ ID NO: 96059 - protein, 417 aa, Arabidopsis thaliana
  peptide (1)..(417): Ceres Seq. ID no. 12731658
MTSAISIEDVRREVKILRALSGHQNLVQFYDAFEDNANVYIVMELCGGGELLDRILARGGKYSEDDAKAVLIQILNVVAFCHLQGVVHRDLKPENFLYTSKEENSMLKVIDFGLSDFVRPDERLNDIVGSAYYVAPEVLHRSYTTEADVWSIGVIAYILLCGSRPFWARTESGIFRAVLKADPSFDEPPWPSLSFEAKDFVKRLLYKDPRKRMTASQALMHPWIAGYKKIDIPFDILIFKQIKAYLRSSSLRKAALMALSKTLTTDELLYLKAQFAHLAPNKNGLITLDSIRLALATNATEAMKESRIPDFLALLNGLQYKGMDFEEFCAASISVHQHESLDCWEQSIRHAYELFEMNGNRVIVIEELASELGVGSSIPVHTILNDWIRHTDGKLSFLGFVKLLHGVSTRQSLAKTR

SEQ ID NO: 96060 - protein, 375 aa, Arabidopsis thaliana
  peptide (1)..(375): Ceres Seq. ID no. 12731659
MELCGGGELLDRILARGGKYSEDDAKAVLIQILNVVAFCHLQGVVHRDLKPENFLYTSKEENSMLKVIDFGLSDFVRPDERLNDIVGSAYYVAPEVLHRSYTTEADVWSIGVIAYILLCGSRPFWARTESGIFRAVLKADPSFDEPPWPSLSFEAKDFVKRLLYKDPRKRMTASQALMHPWIAGYKKIDIPFDILIFKQIKAYLRSSSLRKAALMALSKTLTTDELLYLKAQFAHLAPNKNGLITLDSIRLALATNATEAMKESRIPDFLALLNGLQYKGMDFEEFCAASISVHQHESLDCWEQSIRHAYELFEMNGNRVIVIEELASELGVGSSIPVHTILNDWIRHTDGKLSFLGFVKLLHGVSTRQSLAKTR

SEQ ID NO: 96061 - DNA, 1797 bp, Arabidopsis thaliana
  misc_feature (1)..(1797): Ceres Seq. ID no. 12731684
  misc_feature (1)..(1797): Ortholog of  Ceres SEQ ID NO 14314643 as cited in SEQ ID NO 56903
gctcgtgtcgaggcggcagcaacacacttgtcgtctctccctgtagcttctctggagttttcgcagtcacgaatcttgttttgaagaaattaatttgaacaagggttttagggcttggatgctttgttttcattgaaaaagaagtagaaggagtgtatacaaggattatgggaactcacatcaatttcaacaacttaggaggtggtggtcatcctggaggggaagggagtagtaaccagatgaagccaacgggtagtgtcatgcccttggctaggcagtcctcggtctactcccttacctttgatgagttacagaacacactaggtggaccgggaaaagatttcgggtcgatgaacatggatgaactcctgaagagcatatggactgctgaggaagctcaggccatggccatgacttctgcgccagctgctacagcggtagcgcaacctggtgctggtatcccacccccaggtgggaatctccagaggcaaggttcgttgacgttgcctagaacaattagtcagaagactgttgatgaggtgtggaaatgtttgatcaccaaggatggtaatatggaaggtagcagcggaggcggtggtgagtcgaatgtgcctcctggaaggcaacagactttaggggaaatgacacttgaagaatttctgttccgtgctggggttgtaagagaagataactgtgttcaacagatgggtcaggtcaacggaaacaataacaatgggttttatggtaacagcactgctgctggcggcttaggttttggatttggtcagccaaatcaaaacagcataacattcaatggtactaatgattctatgatcttgaatcagccacctggtttagggctcaaaatgggtggaacaatgcagcagcaacaacaacaacagcagttgcttcagcagcaacaacagcagatgcagcagctgaatcagcctcatccacagcagcggctgcctcaaaccatttttcctaaacaagcaaacgtagcattttctgcgcctgtgaatataaccaacaagggttttgctggggctgcaaataattctatcaacaataataatggattagctagttacggaggaaccggggtcactgttgcagcaacttctccaggaacaagcagcgcagaaaataattctttatcaccagttccgtatgtgcttaatcgaggacgaagaagcaatacaggtctagagaaggttatcgagaggaggcaaaggagaatgatcaagaatcgggaatcagctgctagatcaagagctcgaaagcaggcttatacattggaactggaagccgaaattgaaaagctcaagaaaacgaatcaagaactgcagaaaaaacaggctgaaatggtggaaatgcagaagaatgagctgaaagaaacgtcgaagcgaccgtggggcagcaaaaggcaatgcttgagaaggacattaaccggaccatggtgaaggatgaagcaacaagaacggatgaaccagactcctagcttgggattaatgtaataggatagtgctacctgtacaggagattaagagaaattgagtgaaagatctaggttacagagtaggagagagttttcattatgaataaatgacattttgtgccctgacctttgttagtttaggtttagattatcctctgttattgacttattgtgctttctggttgttagggtttctaaaagacatagttgtttatatatatgtctgactttgtattccggatttggttctcttgtgtcattaacttgggtttagccattattacttaagagtggcaacg

SEQ ID NO: 96062 - protein, 431 aa, Arabidopsis thaliana
  peptide (1)..(431): Ceres Seq. ID no. 12731685
MGTHINFNNLGGGGHPGGEGSSNQMKPTGSVMPLARQSSVYSLTFDELQNTLGGPGKDFGSMNMDELLKSIWTAEEAQAMAMTSAPAATAVAQPGAGIPPPGGNLQRQGSLTLPRTISQKTVDEVWKCLITKDGNMEGSSGGGGESNVPPGRQQTLGEMTLEEFLFRAGVVREDNCVQQMGQVNGNNNNGFYGNSTAAGGLGFGFGQPNQNSITFNGTNDSMILNQPPGLGLKMGGTMQQQQQQQQLLQQQQQQMQQLNQPHPQQRLPQTIFPKQANVAFSAPVNITNKGFAGAANNSINNNNGLASYGGTGVTVAATSPGTSSAENNSLSPVPYVLNRGRRSNTGLEKVIERRQRRMIKNRESAARSRARKQAYTLELEAEIEKLKKTNQELQKKQAEMVEMQKNELKETSKRPWGSKRQCLRRTLTGPW

SEQ ID NO: 96063 - protein, 407 aa, Arabidopsis thaliana
  peptide (1)..(407): Ceres Seq. ID no. 12731686
MKPTGSVMPLARQSSVYSLTFDELQNTLGGPGKDFGSMNMDELLKSIWTAEEAQAMAMTSAPAATAVAQPGAGIPPPGGNLQRQGSLTLPRTISQKTVDEVWKCLITKDGNMEGSSGGGGESNVPPGRQQTLGEMTLEEFLFRAGVVREDNCVQQMGQVNGNNNNGFYGNSTAAGGLGFGFGQPNQNSITFNGTNDSMILNQPPGLGLKMGGTMQQQQQQQQLLQQQQQQMQQLNQPHPQQRLPQTIFPKQANVAFSAPVNITNKGFAGAANNSINNNNGLASYGGTGVTVAATSPGTSSAENNSLSPVPYVLNRGRRSNTGLEKVIERRQRRMIKNRESAARSRARKQAYTLELEAEIEKLKKTNQELQKKQAEMVEMQKNELKETSKRPWGSKRQCLRRTLTGPW

SEQ ID NO: 96064 - protein, 400 aa, Arabidopsis thaliana
  peptide (1)..(400): Ceres Seq. ID no. 12731687
MPLARQSSVYSLTFDELQNTLGGPGKDFGSMNMDELLKSIWTAEEAQAMAMTSAPAATAVAQPGAGIPPPGGNLQRQGSLTLPRTISQKTVDEVWKCLITKDGNMEGSSGGGGESNVPPGRQQTLGEMTLEEFLFRAGVVREDNCVQQMGQVNGNNNNGFYGNSTAAGGLGFGFGQPNQNSITFNGTNDSMILNQPPGLGLKMGGTMQQQQQQQQLLQQQQQQMQQLNQPHPQQRLPQTIFPKQANVAFSAPVNITNKGFAGAANNSINNNNGLASYGGTGVTVAATSPGTSSAENNSLSPVPYVLNRGRRSNTGLEKVIERRQRRMIKNRESAARSRARKQAYTLELEAEIEKLKKTNQELQKKQAEMVEMQKNELKETSKRPWGSKRQCLRRTLTGPW

SEQ ID NO: 96065 - DNA, 1992 bp, Arabidopsis thaliana
  misc_feature (1)..(1992): Ceres Seq. ID no. 12731688
  misc_feature (1)..(1992): Ortholog of  Ceres SEQ ID NO 13654989 as cited in SEQ ID NO 63117
  misc_feature (1)..(1992): Ortholog of  Ceres SEQ ID NO 13584744 as cited in SEQ ID NO 69137
atggtgttggtttataatcaagctctcttgctcgcattcttcgcattgcttggattccagtactttcctttactcaccgaagcaggttgtccattggactttacttcatctaacttcactctagtggcttccgtatgctcgaacaacaccgagagagctaaatgctgccgctacatgaatgctttcgttgcaatatctgtcgcccgctatgcaaactacacagctgatcttggagttacatcagatttgactgaaatctgtatcactactatctctagaaccatggagctttatggaatcccaagaaatgctaccatcttctgtggattagggaccaagattcttgttaactatgattgtgagggtctgactactgtaccgccaatgcttcattccacaagttttggagatgtttccagaaactgcaaactcccgcttcctccgggtgatcaatgcaggaattgtttgaattccagtatcagctaccttaggagcctcgttggtgctgataatagcatcaaactgagtacttgtcgtgatgcaacttatgctgtgttagcaagccgggttgacaattcatcggctcttgaactagctagctgcttctttaatgtgcctgagcttagccccactccaggttcgtctccatcatcgctgagtccagaagcttctcctccagtgttagctgatagtccaagcagcgataatcttgttttgtctccattaaaaagtcaccatccatatcacttgacaatggttccgactattgggattgctgtcacagtttttgctcttgtgatggttgtagtcctaatagttcttatccaaagaaaaaaacgagaacttgatgactccaagagcatcgcttgtaatctaacaaggacatctccttctccccgcccaaggtcgatgattcatgaaggtaattcgtttggttttcggaaattcagctacaaggagataaggaaagcaactgaagatttcaacgcggtgattggccgtgggggctttgggactgtttacaaagctgagttcagtaatgggttggttgcagctgtaaaaaagatgaacaagagctctgaacaagctgaagatgaattttgcagagagatagagcttctcgccaggctgcatcaccgccacctagttgctttgaaagggttttgtaataagaagaacgagaggttccttgtctacgagtatatggaaaatgggagcctgaaggatcatctacactccacggaaaaatctccactaagttgggaatcaaggatgaaaatcgcaattgatgtggctaatgctctggaataccttcacttctactgtgaccctcccctctgtcacagagacattaagtcaagcaatatattactcgacgagcactttgttgctaagcttgcagattttggccttgcacatgcttctagagatggctccatttgttttgaacctgttaatactgatatccgcggaactccaggctatgtagatccagagtacgttgtaacacatgaactaacagagaaaagcgacgtgtacagctacggagtggtgttgctagagatcataactgggaaaagagcggttgatgaaggtaggaacctggtagaactgtctcagcctttgctggtatcagaatcaagacgcatagatctggtggatccgagaatcaaagactgcatagatggagaacagcttgaaacagtagtggcagttgtaagatggtgcacagagaaagaaggcgtggctaggccatcaatcaagcaagttctgaggctgttgtacgaaagctgtgatccgttgcatctcgggcttgcaatggcagttgaagagaacaaaggacggtcactgagaggtgactcagggttccaaagtggagacatccgtggcttggcttcttcctctagtactacttcaaggtcgcattgtagccggagttttctgcttgagactggctcccctcactctccaccaaatggtctctctttttga

SEQ ID NO: 96066 - protein, 663 aa, Arabidopsis thaliana
  peptide (1)..(663): Ceres Seq. ID no. 12731689
MVLVYNQALLLAFFALLGFQYFPLLTEAGCPLDFTSSNFTLVASVCSNNTERAKCCRYMNAFVAISVARYANYTADLGVTSDLTEICITTISRTMELYGIPRNATIFCGLGTKILVNYDCEGLTTVPPMLHSTSFGDVSRNCKLPLPPGDQCRNCLNSSISYLRSLVGADNSIKLSTCRDATYAVLASRVDNSSALELASCFFNVPELSPTPGSSPSSLSPEASPPVLADSPSSDNLVLSPLKSHHPYHLTMVPTIGIAVTVFALVMVVVLIVLIQRKKRELDDSKSIACNLTRTSPSPRPRSMIHEGNSFGFRKFSYKEIRKATEDFNAVIGRGGFGTVYKAEFSNGLVAAVKKMNKSSEQAEDEFCREIELLARLHHRHLVALKGFCNKKNERFLVYEYMENGSLKDHLHSTEKSPLSWESRMKIAIDVANALEYLHFYCDPPLCHRDIKSSNILLDEHFVAKLADFGLAHASRDGSICFEPVNTDIRGTPGYVDPEYVVTHELTEKSDVYSYGVVLLEIITGKRAVDEGRNLVELSQPLLVSESRRIDLVDPRIKDCIDGEQLETVVAVVRWCTEKEGVARPSIKQVLRLLYESCDPLHLGLAMAVEENKGRSLRGDSGFQSGDIRGLASSSSTTSRSHCSRSFLLETGSPHSPPNGLSF

SEQ ID NO: 96067 - protein, 605 aa, Arabidopsis thaliana
  peptide (1)..(605): Ceres Seq. ID no. 12731690
MNAFVAISVARYANYTADLGVTSDLTEICITTISRTMELYGIPRNATIFCGLGTKILVNYDCEGLTTVPPMLHSTSFGDVSRNCKLPLPPGDQCRNCLNSSISYLRSLVGADNSIKLSTCRDATYAVLASRVDNSSALELASCFFNVPELSPTPGSSPSSLSPEASPPVLADSPSSDNLVLSPLKSHHPYHLTMVPTIGIAVTVFALVMVVVLIVLIQRKKRELDDSKSIACNLTRTSPSPRPRSMIHEGNSFGFRKFSYKEIRKATEDFNAVIGRGGFGTVYKAEFSNGLVAAVKKMNKSSEQAEDEFCREIELLARLHHRHLVALKGFCNKKNERFLVYEYMENGSLKDHLHSTEKSPLSWESRMKIAIDVANALEYLHFYCDPPLCHRDIKSSNILLDEHFVAKLADFGLAHASRDGSICFEPVNTDIRGTPGYVDPEYVVTHELTEKSDVYSYGVVLLEIITGKRAVDEGRNLVELSQPLLVSESRRIDLVDPRIKDCIDGEQLETVVAVVRWCTEKEGVARPSIKQVLRLLYESCDPLHLGLAMAVEENKGRSLRGDSGFQSGDIRGLASSSSTTSRSHCSRSFLLETGSPHSPPNGLSF

SEQ ID NO: 96068 - protein, 569 aa, Arabidopsis thaliana
  peptide (1)..(569): Ceres Seq. ID no. 12731691
MELYGIPRNATIFCGLGTKILVNYDCEGLTTVPPMLHSTSFGDVSRNCKLPLPPGDQCRNCLNSSISYLRSLVGADNSIKLSTCRDATYAVLASRVDNSSALELASCFFNVPELSPTPGSSPSSLSPEASPPVLADSPSSDNLVLSPLKSHHPYHLTMVPTIGIAVTVFALVMVVVLIVLIQRKKRELDDSKSIACNLTRTSPSPRPRSMIHEGNSFGFRKFSYKEIRKATEDFNAVIGRGGFGTVYKAEFSNGLVAAVKKMNKSSEQAEDEFCREIELLARLHHRHLVALKGFCNKKNERFLVYEYMENGSLKDHLHSTEKSPLSWESRMKIAIDVANALEYLHFYCDPPLCHRDIKSSNILLDEHFVAKLADFGLAHASRDGSICFEPVNTDIRGTPGYVDPEYVVTHELTEKSDVYSYGVVLLEIITGKRAVDEGRNLVELSQPLLVSESRRIDLVDPRIKDCIDGEQLETVVAVVRWCTEKEGVARPSIKQVLRLLYESCDPLHLGLAMAVEENKGRSLRGDSGFQSGDIRGLASSSSTTSRSHCSRSFLLETGSPHSPPNGLSF

SEQ ID NO: 96069 - DNA, 2115 bp, Arabidopsis thaliana
  misc_feature (1)..(2115): Ceres Seq. ID no. 12731695
  misc_feature (1)..(2115): Ortholog of  Ceres SEQ ID NO 14310624 as cited in SEQ ID NO 53399
atggaaacaaaccagtggcggtcgaggaaaaagatagaatcagctgcagaaacactccaagtttcttctagaagaggcagaggacaggcacgtatggttcctcctgtaagtggagttagatccgagagagctcgaaaaagtctaagtgagaagctagagactgtagctttaaactctcctaagaaagatgctcgtgtgagtctttatggcgagaaaagtgtagtagatgagattttcctagaagatgaagaaatgggtcatgaaactggtttgaagaatggagagtcgtcgcctttttgtggtgtatcggacaagcttctgcagcgaatcgagcttcttgggagagaccatgaggcaacgagacttgataacaacaagttcaggtcaatcgaatctatgaaaaagagacaagaagaatcggcatgtgatgatctagttgatatgaagacaaagattcaaacgttagctgcggagaacactcagcttaagaagtctcttgtggcgaaagaagagcttgcggtaagtcttcaagagcgtaaatttcaggtggaatcagaattcgaagcgttaatgactagattagattcaacggagaaagaaaacgcattcttgagatatgagtatactgttcttgagaaagatcttcaggtaaaaacagaggaaacagagcatactcgcaggtctatggagctaacgcataagcagcaacttaggaatgtgaacaagattgttgagcttgaagctgaatgccaaaggttaagacttctctttcgaaagaagtttccagagaagtctatatctatgaggaatgaaggtgaagaaaagaagatggagatgagaagacgaaacgctaataagagcgatatgatgatgagagatgaagttcagagcaggaagctgaagtatgatcttttgatggagcagattgggaatgttagggcagagaacaagaatctaatggacataattatgaagaaaaacattgagatcaaagatcttagccgcgggcagaaaccgttagaggcttcgagtttcgatattcaaagcgaaagtagtgtgatgagcccctgtggttccaaggagatgaagttactgatggatgattttaatgagatggagaagttagccattgtgtgtactgagaaagatccaagagtggatgatgagaaggaaggatcttttgattggattcaagttgttttgagcgctataacgaagcaagagaggatatcgaaacgcggtgttaaagaactcttacaagacattaagattgctttaggatgtatggatgaaaatgataatgtagaaagaaagaaaggtgaagaagatcctctctgcatcacatggaaatctaataacgaatcgggtccaatgactaaggatgagatcaagagacatttgggtttgacgaaatcagataaggtggagaagattgaatctgatgaaaagcaagaactgagaaagaagcttgaggaatcagtggagaagatcagaaacttagaagcagagatgaaaacattgagagagaataaggaaaaggtagaggcagagatggaaacggagaaatcgatgaaggaagatcttgatacaaagctgaacataacaagagctaacctcaacgagacacagaagaagttgtcttctcttgaagtagaatttgattacagaaagagctgttgtgaagaactcgaagggacttgcatcgagcttcagcttcagctagaaagtgttgaaacaaagaaaccgacgcagagaaacaaaaacgggtgggatatagcaacagcttctgtgaagttatcagagtgtcaagaaacgattaccagtttacggaagcaactaagagcgttatctacaacagaaacaagcagcaccattaaatttctacacaaaagatcttctctccgggaaaatatagcagaggatgatactaacagagttgctcaagatgatgatggtaaccgttacaacgctttgatcgtgtacgaaccagtgaaggcgagaggtgagaagatggagatggtaccgagaaagaagcaaggattagggttcttgaaaaaactgttgttcaggaggaaaagagtgagcagcaagaaatgtcttgccttgactatgtga

SEQ ID NO: 96070 - protein, 704 aa, Arabidopsis thaliana
  peptide (1)..(704): Ceres Seq. ID no. 12731696
METNQWRSRKKIESAAETLQVSSRRGRGQARMVPPVSGVRSERARKSLSEKLETVALNSPKKDARVSLYGEKSVVDEIFLEDEEMGHETGLKNGESSPFCGVSDKLLQRIELLGRDHEATRLDNNKFRSIESMKKRQEESACDDLVDMKTKIQTLAAENTQLKKSLVAKEELAVSLQERKFQVESEFEALMTRLDSTEKENAFLRYEYTVLEKDLQVKTEETEHTRRSMELTHKQQLRNVNKIVELEAECQRLRLLFRKKFPEKSISMRNEGEEKKMEMRRRNANKSDMMMRDEVQSRKLKYDLLMEQIGNVRAENKNLMDIIMKKNIEIKDLSRGQKPLEASSFDIQSESSVMSPCGSKEMKLLMDDFNEMEKLAIVCTEKDPRVDDEKEGSFDWIQVVLSAITKQERISKRGVKELLQDIKIALGCMDENDNVERKKGEEDPLCITWKSNNESGPMTKDEIKRHLGLTKSDKVEKIESDEKQELRKKLEESVEKIRNLEAEMKTLRENKEKVEAEMETEKSMKEDLDTKLNITRANLNETQKKLSSLEVEFDYRKSCCEELEGTCIELQLQLESVETKKPTQRNKNGWDIATASVKLSECQETITSLRKQLRALSTTETSSTIKFLHKRSSLRENIAEDDTNRVAQDDDGNRYNALIVYEPVKARGEKMEMVPRKKQGLGFLKKLLFRRKRVSSKKCLALTM

SEQ ID NO: 96071 - protein, 673 aa, Arabidopsis thaliana
  peptide (1)..(673): Ceres Seq. ID no. 12731697
MVPPVSGVRSERARKSLSEKLETVALNSPKKDARVSLYGEKSVVDEIFLEDEEMGHETGLKNGESSPFCGVSDKLLQRIELLGRDHEATRLDNNKFRSIESMKKRQEESACDDLVDMKTKIQTLAAENTQLKKSLVAKEELAVSLQERKFQVESEFEALMTRLDSTEKENAFLRYEYTVLEKDLQVKTEETEHTRRSMELTHKQQLRNVNKIVELEAECQRLRLLFRKKFPEKSISMRNEGEEKKMEMRRRNANKSDMMMRDEVQSRKLKYDLLMEQIGNVRAENKNLMDIIMKKNIEIKDLSRGQKPLEASSFDIQSESSVMSPCGSKEMKLLMDDFNEMEKLAIVCTEKDPRVDDEKEGSFDWIQVVLSAITKQERISKRGVKELLQDIKIALGCMDENDNVERKKGEEDPLCITWKSNNESGPMTKDEIKRHLGLTKSDKVEKIESDEKQELRKKLEESVEKIRNLEAEMKTLRENKEKVEAEMETEKSMKEDLDTKLNITRANLNETQKKLSSLEVEFDYRKSCCEELEGTCIELQLQLESVETKKPTQRNKNGWDIATASVKLSECQETITSLRKQLRALSTTETSSTIKFLHKRSSLRENIAEDDTNRVAQDDDGNRYNALIVYEPVKARGEKMEMVPRKKQGLGFLKKLLFRRKRVSSKKCLALTM

SEQ ID NO: 96072 - protein, 620 aa, Arabidopsis thaliana
  peptide (1)..(620): Ceres Seq. ID no. 12731698
MGHETGLKNGESSPFCGVSDKLLQRIELLGRDHEATRLDNNKFRSIESMKKRQEESACDDLVDMKTKIQTLAAENTQLKKSLVAKEELAVSLQERKFQVESEFEALMTRLDSTEKENAFLRYEYTVLEKDLQVKTEETEHTRRSMELTHKQQLRNVNKIVELEAECQRLRLLFRKKFPEKSISMRNEGEEKKMEMRRRNANKSDMMMRDEVQSRKLKYDLLMEQIGNVRAENKNLMDIIMKKNIEIKDLSRGQKPLEASSFDIQSESSVMSPCGSKEMKLLMDDFNEMEKLAIVCTEKDPRVDDEKEGSFDWIQVVLSAITKQERISKRGVKELLQDIKIALGCMDENDNVERKKGEEDPLCITWKSNNESGPMTKDEIKRHLGLTKSDKVEKIESDEKQELRKKLEESVEKIRNLEAEMKTLRENKEKVEAEMETEKSMKEDLDTKLNITRANLNETQKKLSSLEVEFDYRKSCCEELEGTCIELQLQLESVETKKPTQRNKNGWDIATASVKLSECQETITSLRKQLRALSTTETSSTIKFLHKRSSLRENIAEDDTNRVAQDDDGNRYNALIVYEPVKARGEKMEMVPRKKQGLGFLKKLLFRRKRVSSKKCLALTM

SEQ ID NO: 96073 - DNA, 1576 bp, Arabidopsis thaliana
  misc_feature (1)..(1576): Ceres Seq. ID no. 12731699
  misc_feature (1)..(1576): Ortholog of  Ceres SEQ ID NO 13648081 as cited in SEQ ID NO 165
  misc_feature (1)..(1576): Ortholog of  Ceres SEQ ID NO 15224803 as cited in SEQ ID NO 56572
  misc_feature (1)..(1576): Ortholog of  Ceres SEQ ID NO 14308598 as cited in SEQ ID NO 60416
  misc_feature (1)..(1576): Ortholog of  Ceres SEQ ID NO 13502952 as cited in SEQ ID NO 62271
  misc_feature (1)..(1576): Ortholog of  Ceres SEQ ID NO 13502973 as cited in SEQ ID NO 68052
  misc_feature (1)..(1576): Ortholog of  Ceres SEQ ID NO 13596000 as cited in SEQ ID NO 68188
  misc_feature (1)..(1576): Ortholog of  Ceres SEQ ID NO 15179420 as cited in SEQ ID NO 0
gtcaaatcgaaaacaaacacaaaaagcaaacaaatatggctacttcaatcaaatctataaccctagctctcttgatattctcagtgttactaatctccttgtctctcggctccgtcacagcgacggagactacacgaaacgaggcggaggcacgacggatgtatgaaaggtggcttgttgagaatcggaagaactataatggtctcggagagaaagagagacgctttgagatcttcaaagacaacttgaagttcgtcgaagagcacagttccatcccgaatcggacttacgaagtcgggttgacccggttcgctgatttgactaacgatgagtttcgtgcgatttacttgaggagcaagatggagagaactagggttccggtgaagggagagaagtatttgtataaggttggagatagcttacctgatgctatcgattggagagctaaaggtgctgttaatccagtcaaagatcaaggatcctgtggaagttgttgggcgttttccgcgattggagcggttgaaggtataaatcagattaagacaggagagttgatatctttgtctgagcaagaacttgttgattgtgacacaagttacaatgatggatgtggtggaggtcttatggattatgcttttaagttcattattgaaaacggtggtattgatacagaggaagattatccttatattgcaactgatgttaacgtgtgcaattctgataagaagaacactcgtgttgttaccatcgatggttatgaggatgttcctcaaaacgatgagaagtctttgaagaaggctcttgctaatcaacctattagtgttgccattgaagctggtggcagagctttccagctttacacatctggtgtgtttacaggaacatgtggaacatctttggaccatggtgttgtagctgtgggatacggatcagaaggtggtcaagactactggattgttcgtaactcatggggatcaaactggggagaaagcggatactttaagctcgaacgtaacatcaaagagtcatcagggaaatgcggtgtggcgatgatggcttcttaccctaccaaatcatcaggctcaaacccaccaaaaccgccagcgccttcaccggttgtttgtgacaagtctaacacttgtccagctaagtccacttgttgttgcctatatgagtacaatggtaaatgctatagctggggatgttgtccgtatgagtcagccacttgttgcgatgatggttctagctgctgcccccagtcataccctgtctgcgatttaaaggccaatacttgtagaatgaagggaaacagtccgttaagcataaaagctttgacacgaggaccagcgattgcgaccacaaagtctacaaacatgctagtgggcagcgcttgaggagagataatacaaacgaagaaccgatttgttttcagcccacgttatcaagattcagtcttttgtctttagacacttccaagttggatcatagtttgattactcttgtcaaatttaatgttatcttggatttgattttacttgatgtaaatgtttaagaagtaatctgatatttgcttcca

SEQ ID NO: 96074 - protein, 463 aa, Arabidopsis thaliana; identical to SEQ ID NO: 36210
  peptide (1)..(463): Ceres Seq. ID no. 12731700

SEQ ID NO: 96075 - protein, 452 aa, Arabidopsis thaliana; identical to SEQ ID NO: 36211
  peptide (1)..(452): Ceres Seq. ID no. 12731701

SEQ ID NO: 96076 - protein, 411 aa, Arabidopsis thaliana; identical to SEQ ID NO: 36212
  peptide (1)..(411): Ceres Seq. ID no. 12731702

SEQ ID NO: 96077 - DNA, 1653 bp, Arabidopsis thaliana
  misc_feature (1)..(1653): Ceres Seq. ID no. 12731711
  misc_feature (1)..(1653): Ortholog of  Ceres SEQ ID NO 14314070 as cited in SEQ ID NO 56946
  misc_feature (1)..(1653): Ortholog of  Ceres SEQ ID NO 14302852 as cited in SEQ ID NO 64814
  misc_feature (1)..(1653): Ortholog of  Ceres SEQ ID NO 13598593 as cited in SEQ ID NO 64978
  misc_feature (1)..(1653): Ortholog of  Ceres SEQ ID NO 14303067 as cited in SEQ ID NO 67078
  misc_feature (1)..(1653): Ortholog of  Ceres SEQ ID NO 13595992 as cited in SEQ ID NO 68401
atggccgatacacccccgggcatagccaagaacccaagccacgcaacatgtaagatcaagaagtacaaacattgttacaacttggaacatgtttgtcccaagttttgccctgactcttgccatgtcgaatgtgcttcttgcaaacccatatgtggtcctccttcccctggcgacgatggtggcggcgatgacagtggtggtgatgacggtggatacactcctcctgctcctgttccaccagtttcaccaccacctcctacaccttccgtgccaagccctactccaccagtttcaccaccgcctccaactcctacaccatctgtgccaagtcccactccaccagtttcaccaccacctccaactcctacaccgtctgtgccaagtcccactccaccagtttcaccaccacctccgactcctacaccttccgtgccaagtcccaccccaccagtttcaccaccacctccgactcctacaccttctgtgccaagtcccactccaccagttcctactgatcctatgccaagtccccctccgccagtttcaccaccgcctccaactcctacaccatctgtgccaagtcctcctgatgttactcccactcctcctacgccatctgtgccaagtcctcctgatgttactcccactcctcctacgccatccgtgccaagtcctcctgatgttactcccactcctcctacgccaccttccgtcccaactccttccggctctcccccttacgttcccccgccatcagacgaagaggaagcagcaggtgccaaaagggtcaggtgtaagaagcagcgctctccatgttacggagttgaatacacttgccccgccgattgtccccgttcttgtcaagtggattgcgtcacttgcaagcctgtttgcaattgcgacaagcctggatctgtttgccaagacccacgtttcatcggaggagatggtctaaccttttacttccacggcaagaaagactccaacttctgccttatctctgatcctaaccttcacatcaacgctcatttcatcggtaaacgtagagctggtatggcacgtgacttcacatgggtccaatccattgccatactcttcggcactcaccgtttatacgtcggagccctaaagactgccacgtgggatgattccgttgaccggattgccgtctctttcgacggaaatgttatctcacttcctcagctagacggtgccaggtggacttcttcccctggtgtataccctgaggtctcggtcaagcgagttgaagtagagggtttgcttaagatcacagcaagagtggtgccaataacaatggaagattcaagaatccatggctacgacgtgaaggaagacgactgtctagctcaccttgacctaggcttcaagttccaagaccttagcgataatgtcgatggtgttttgggacagacttataggtctaactacgttagccgagttaagattggagtccacatgcctgtgatgggtggtgacagagaatttcagaccaccggactttttgcacctgactgttcagccgcaaggttcaccggtaacggagacagcaacaatggccggagcaaattggagctccctgagatgagttgtgccagtggcttaggtggcaagggagtggtttgcaagagataa

SEQ ID NO: 96078 - protein, 550 aa, Arabidopsis thaliana; identical to SEQ ID NO: 75616
  peptide (1)..(550): Ceres Seq. ID no. 12731712

SEQ ID NO: 96079 - protein, 377 aa, Arabidopsis thaliana; identical to SEQ ID NO: 75617
  peptide (1)..(377): Ceres Seq. ID no. 12731713

SEQ ID NO: 96080 - protein, 288 aa, Arabidopsis thaliana
  peptide (1)..(288): Ceres Seq. ID no. 12731714
MFVPSFALTLAMSNVLLANPYVVLLPLATMVAAMTVVVMTVDTLLLLLFHQFHHHLLHLPCQALLHQFHHRLQLLHHLCQVPLHQFHHHLQLLHRLCQVPLHQFHHHLRLLHLPCQVPPHQFHHHLRLLHLLCQVPLHQFLLILCQVPLRQFHHRLQLLHHLCQVLLMLLPLLLRHLCQVLLMLLPLLLRHPCQVLLMLLPLLLRHLPSQLLPALPLTFPRHQTKRKQQVPKGSGVRSSALHVTELNTLAPPIVPVLVKWIASLASLFAIATSLDLFAKTHVSSEEMV

SEQ ID NO: 96081 - DNA, 486 bp, Arabidopsis thaliana
  misc_feature (1)..(486): Ceres Seq. ID no. 12731735
  misc_feature (1)..(486): Ortholog of  Ceres SEQ ID NO 14306299 as cited in SEQ ID NO 56895
  misc_feature (1)..(486): Ortholog of  Ceres SEQ ID NO 13663631 as cited in SEQ ID NO 67073
atgtctctactcaaaaccaacattttatttctcttagcaattgctcttttctatggctctttagccgaagatttgcaacaacaattcttagaggcccacaacgaagcccgaaacgaggttgggctcgacccattggtttgggacgatgaggtcgctgcatatgcggcaagctatgcaaaccagaggatcaatgattgtgcattagtccattcgaatggaccatttggagagaacatagcgatgagtagtggagaaatgtcggctgaagatgctgcggaaatgtggatcaacgagaaacagtactacgattacgatagtaacacgtgtaatgatccaaacggtggcacctgtctacattacacgcaagttgtttggaaaaacacagttcgtttgggatgtgctaaagttgtgtgtaacagtggtggtacttttattacatgcaactatgatcctcctggtaattacattggtgaaaaaccattctaa

SEQ ID NO: 96082 - protein, 161 aa, Arabidopsis thaliana
  peptide (1)..(161): Ceres Seq. ID no. 12731736
MSLLKTNILFLLAIALFYGSLAEDLQQQFLEAHNEARNEVGLDPLVWDDEVAAYAASYANQRINDCALVHSNGPFGENIAMSSGEMSAEDAAEMWINEKQYYDYDSNTCNDPNGGTCLHYTQVVWKNTVRLGCAKVVCNSGGTFITCNYDPPGNYIGEKPF

SEQ ID NO: 96083 - protein, 81 aa, Arabidopsis thaliana
  peptide (1)..(81): Ceres Seq. ID no. 12731737
MSSGEMSAEDAAEMWINEKQYYDYDSNTCNDPNGGTCLHYTQVVWKNTVRLGCAKVVCNSGGTFITCNYDPPGNYIGEKPF

SEQ ID NO: 96084 - DNA, 1997 bp, Arabidopsis thaliana
  misc_feature (1)..(1997): Ceres Seq. ID no. 12731744
  misc_feature (1)..(1997): Ortholog of  Ceres SEQ ID NO 15170768 as cited in SEQ ID NO 52641
attggtagtcagcgacacggaactcattaactttactcttctcactggtcaatcgtcggagataatcgggtgatcggcgatggagaatacggacgtcttcttggggctgcatgatttcctggagcggatgcgcaaaccctccgccggcgatttcgtcaaatccattaaaagtttcattgtttcattctcgaacaatgcaccagacccggaaaaagattgtgctatggttcaggagttcttttctaagatggaggctgctttcagggctcatccactttggtctggttgttctgaggaggaattggatagtgctggagatggcctggagaagtatgttatgacaaagctatttactcgggtgtttgcttcaaacactgaggaggttatagctgatgagaagctatttcagaagatgtcattggttcaacaattcatttctcccgagaatttggatatacaaccaacttttcaaaatgaatcgtcatggctgctagctcaaaaagagctccagaagataaacatgtacaaagctcctcgtgataagcttgtgtgtatccttaactgttgcaaagtgattaataacttactgctaaatgcttcaattgcttcaaacgagaatgcacctggagcagacgaatttcttcctgttttgatatatgtaacaataaaggctaaccctccacaacttcactcaaacttgttgtatatacaaaggtataggcgtgaatctaaacttgttggtgaagctgcgtacttcttcacaaacatactctctgcagagtctttcatctcaaatattgatgcaaaatctatttcactggatgaagctgagtttgaaaagaacatggaatctgcacgggcacgaatttctggtttggacagccagacttatcaaactggtcatggctctgcaccaccccctcgtgatgagtccactcttcagaaaactcaaagtctgaatcccaagagggaaaacactcttttccaatcaaaatcgtctgatagtctttctgggaccaacgaattactgaatataaacagtgaaacaccaatgaagaaagctgaatccatttcagatttggaaaataagggtgcgacgcttctgaaggataccgagccaagcaaagtctttcaagaatatccttacatatttgccagtgctggtgatttgaggataggagatgttgaaggcttgttaaatagttataaacagctcgttttcaaatatgtgtgccttaccaaaggattgggtgatggaacatctttagctccatccagttcacccttgcaagcgtcgtccggttttaatacgtctaaggaatctgaggatcatagaagatcgtcttcagatgtacaaatgacaaaggaaactgacaggagtgttgatgatttgatccgagctctacatggtgaaggggaagatgttaacaatctgtcagatgtaaaacatgaagaatatggcgcaatgttggtagagggaaaggatgaagaacgtgattccaaggtgcaaggagaagtagatgccaaagatattgaattgatgaagcaaattcctaagagagaaggtgacaattctagttcccgacctgcagaagatgaagatgttggttccaaacagccagttacggaagcttctgagtgagccaaatgacccatcttggtgatgagagtctcttgtatcggatcaattattcatttaatgggggaagcaaaggtcaagtcatagttaagatgtcatctattcgtttcttggagttatgagttttgaagatgactggagagccgtatgagacggaagctatctgcatctgtattcccttggaaaagaggggcagtcaaatggtaaattactttcttcaattgtgtttctttttttgctctttgtttctcagtgatatgattttggaggggctcgtcaacatttgtcaatccatatgtaactcttacatctgctattgcgtatatacaataaggatataatcagaataatatttgcc

SEQ ID NO: 96085 - protein, 520 aa, Arabidopsis thaliana
  peptide (1)..(520): Ceres Seq. ID no. 12731745
MENTDVFLGLHDFLERMRKPSAGDFVKSIKSFIVSFSNNAPDPEKDCAMVQEFFSKMEAAFRAHPLWSGCSEEELDSAGDGLEKYVMTKLFTRVFASNTEEVIADEKLFQKMSLVQQFISPENLDIQPTFQNESSWLLAQKELQKINMYKAPRDKLVCILNCCKVINNLLLNASIASNENAPGADEFLPVLIYVTIKANPPQLHSNLLYIQRYRRESKLVGEAAYFFTNILSAESFISNIDAKSISLDEAEFEKNMESARARISGLDSQTYQTGHGSAPPPRDESTLQKTQSLNPKRENTLFQSKSSDSLSGTNELLNINSETPMKKAESISDLENKGATLLKDTEPSKVFQEYPYIFASAGDLRIGDVEGLLNSYKQLVFKYVCLTKGLGDGTSLAPSSSPLQASSGFNTSKESEDHRRSSSDVQMTKETDRSVDDLIRALHGEGEDVNNLSDVKHEEYGAMLVEGKDEERDSKVQGEVDAKDIELMKQIPKREGDNSSSRPAEDEDVGSKQPVTEASE

SEQ ID NO: 96086 - protein, 504 aa, Arabidopsis thaliana
  peptide (1)..(504): Ceres Seq. ID no. 12731746
MRKPSAGDFVKSIKSFIVSFSNNAPDPEKDCAMVQEFFSKMEAAFRAHPLWSGCSEEELDSAGDGLEKYVMTKLFTRVFASNTEEVIADEKLFQKMSLVQQFISPENLDIQPTFQNESSWLLAQKELQKINMYKAPRDKLVCILNCCKVINNLLLNASIASNENAPGADEFLPVLIYVTIKANPPQLHSNLLYIQRYRRESKLVGEAAYFFTNILSAESFISNIDAKSISLDEAEFEKNMESARARISGLDSQTYQTGHGSAPPPRDESTLQKTQSLNPKRENTLFQSKSSDSLSGTNELLNINSETPMKKAESISDLENKGATLLKDTEPSKVFQEYPYIFASAGDLRIGDVEGLLNSYKQLVFKYVCLTKGLGDGTSLAPSSSPLQASSGFNTSKESEDHRRSSSDVQMTKETDRSVDDLIRALHGEGEDVNNLSDVKHEEYGAMLVEGKDEERDSKVQGEVDAKDIELMKQIPKREGDNSSSRPAEDEDVGSKQPVTEASE

SEQ ID NO: 96087 - protein, 472 aa, Arabidopsis thaliana
  peptide (1)..(472): Ceres Seq. ID no. 12731747
MVQEFFSKMEAAFRAHPLWSGCSEEELDSAGDGLEKYVMTKLFTRVFASNTEEVIADEKLFQKMSLVQQFISPENLDIQPTFQNESSWLLAQKELQKINMYKAPRDKLVCILNCCKVINNLLLNASIASNENAPGADEFLPVLIYVTIKANPPQLHSNLLYIQRYRRESKLVGEAAYFFTNILSAESFISNIDAKSISLDEAEFEKNMESARARISGLDSQTYQTGHGSAPPPRDESTLQKTQSLNPKRENTLFQSKSSDSLSGTNELLNINSETPMKKAESISDLENKGATLLKDTEPSKVFQEYPYIFASAGDLRIGDVEGLLNSYKQLVFKYVCLTKGLGDGTSLAPSSSPLQASSGFNTSKESEDHRRSSSDVQMTKETDRSVDDLIRALHGEGEDVNNLSDVKHEEYGAMLVEGKDEERDSKVQGEVDAKDIELMKQIPKREGDNSSSRPAEDEDVGSKQPVTEASE

SEQ ID NO: 96088 - DNA, 2334 bp, Arabidopsis thaliana
  misc_feature (1)..(2334): Ceres Seq. ID no. 12731761
  misc_feature (1)..(2334): Ortholog of  Ceres SEQ ID NO 12611726 as cited in SEQ ID NO 56740
  misc_feature (1)..(2334): Ortholog of  Ceres SEQ ID NO 13660693 as cited in SEQ ID NO 67411
acaaactcaaaaccagagtctactacattagaaattttcacaattacaattctccggcgaatccaacgtttccggcacaattctccactatattgacggcgatatacccttatacggcgtttcgtggttacaatttgtaacctaactactcatcgtctacccaattcaaaccagtcaggtttccgtacagtagtaaaatcacaattcctctctgtaacaacgatctcaacgacttcaacgagacacgttactattccaatccatttttccgacgccggcaactgaatcagaatcggaaaactctagagacatatggttgattggagtggcgatgcaccggcagggctcgtctccgattacgccttcaaactataacgccgccgtttcaattgcttctgatgtacctactggtttaaccaagtctcctttatctcacgcgattccagtttcgccgatttctgctgcttacccttccggtgatcctattttgatgatgtctgggactcctctcgctagggttcgattatctgaaattttgccttatgaaggagctccttctccggtgtatgcaaaagctgtggaggctttgtctgtgtctttgatgaggtataatgcgtctgtgatcgagatagggagtgaagacactgcactgatgcgatgtggccttgaagctgctcgtttgtattttagaactagaagccttactgtttctggtaaaggcaatcgtggcctctctatgtatagagccggaaggtctgttgaagatttagattcttcacctccatgcatggctgagattttcaggtgtttgggtaaagtagcacgagctgctttatctgcaatagcaaggcatctacgtttaagaagcgatgtttttaaccatatgcttgatgactttccactagctccgaacgaggtttcctcctcggtgctactggcttcctatgctcatgcatcgatacaaaatggaaaacatgcttctggaggtgggaacctatctgctaagattgaagttgagaagggtttgttgacactgttctgctcagatggcactggcattcaggtatgtgacccaaatggtcgttggtacacagcagataatggatgtggggtgggtgatctcttactgattaccggcaaagcgcttagtcatgctactgcaggtctccgtccagctgcctcttacagaactactaccgatcatttgtctgccactgacactcgaggaagggcatcattagcttttaggcttatgccgaaaagtaatgctatattagattgttccccaatagaagcagccggccatgtaattcctcaaagctatgtgccagtatctgttagtcagtttatggataacctcttagccgagaatgacactctagttaatccgcctgtgaaaaccaatgttccacgggatgatgtttgcaaagagccttccttaagaagtgttctctcggatccaatttctggtgcttttcttgaagatgcaatggttgtctcttgtggacattcatttggtggccttatgcttagaagagtccttgaaatgtctagatgtacgctctgcaatacagagatcgagtctgggtctctggttcctaaccatgcacttagagctgccgcttcagctatcaagcaacaggatgataaacgacttttccacaacgcagccatgagaaggcgtagaaaagaaatgagtgatcaaatggatgtggtgagatgatctgactctgctctacatattgcttttgtgggtggtttccgattacatagttaccatctccaaacttatcagcctgcatcatcatctgttttctggaaaatggagatccagctacggatgatggtatgcatcgagtggtgcattatccatttgctgtaaatgagaaagttcttatcaagggaaaccggcgaactccagaaaagtttgttggaaaagaagcaatcgtgacatctcagtgtctcaatggctggtatctattaaagattgtcgaaagcggagacaatgtacggctgcaataccgatccctaaaaaagatggtgaacgatgacagaggaggaggcctacaggctcaaccggttgagagcaatagcttgtagaatgtaatcatatttaacccttttcttttcttcttattctgtatctctagagctagagagaaaagaaaagataatgtggtttggggttttgagattctgcataaatttaaatcgtttggttagaaaaagaaagtagtggaagactattattgtaaactatattagcctcctaagtattagaggttttgtacagaacaaaatgttagaaaagaaaaaacaactgtgttactcttg

SEQ ID NO: 96089 - protein, 463 aa, Arabidopsis thaliana
  peptide (1)..(463): Ceres Seq. ID no. 12731762
MHRQGSSPITPSNYNAAVSIASDVPTGLTKSPLSHAIPVSPISAAYPSGDPILMMSGTPLARVRLSEILPYEGAPSPVYAKAVEALSVSLMRYNASVIEIGSEDTALMRCGLEAARLYFRTRSLTVSGKGNRGLSMYRAGRSVEDLDSSPPCMAEIFRCLGKVARAALSAIARHLRLRSDVFNHMLDDFPLAPNEVSSSVLLASYAHASIQNGKHASGGGNLSAKIEVEKGLLTLFCSDGTGIQVCDPNGRWYTADNGCGVGDLLLITGKALSHATAGLRPAASYRTTTDHLSATDTRGRASLAFRLMPKSNAILDCSPIEAAGHVIPQSYVPVSVSQFMDNLLAENDTLVNPPVKTNVPRDDVCKEPSLRSVLSDPISGAFLEDAMVVSCGHSFGGLMLRRVLEMSRCTLCNTEIESGSLVPNHALRAAASAIKQQDDKRLFHNAAMRRRRKEMSDQMDVVR

SEQ ID NO: 96090 - protein, 410 aa, Arabidopsis thaliana
  peptide (1)..(410): Ceres Seq. ID no. 12731763
MMSGTPLARVRLSEILPYEGAPSPVYAKAVEALSVSLMRYNASVIEIGSEDTALMRCGLEAARLYFRTRSLTVSGKGNRGLSMYRAGRSVEDLDSSPPCMAEIFRCLGKVARAALSAIARHLRLRSDVFNHMLDDFPLAPNEVSSSVLLASYAHASIQNGKHASGGGNLSAKIEVEKGLLTLFCSDGTGIQVCDPNGRWYTADNGCGVGDLLLITGKALSHATAGLRPAASYRTTTDHLSATDTRGRASLAFRLMPKSNAILDCSPIEAAGHVIPQSYVPVSVSQFMDNLLAENDTLVNPPVKTNVPRDDVCKEPSLRSVLSDPISGAFLEDAMVVSCGHSFGGLMLRRVLEMSRCTLCNTEIESGSLVPNHALRAAASAIKQQDDKRLFHNAAMRRRRKEMSDQMDVVR

SEQ ID NO: 96091 - protein, 409 aa, Arabidopsis thaliana
  peptide (1)..(409): Ceres Seq. ID no. 12731764
MSGTPLARVRLSEILPYEGAPSPVYAKAVEALSVSLMRYNASVIEIGSEDTALMRCGLEAARLYFRTRSLTVSGKGNRGLSMYRAGRSVEDLDSSPPCMAEIFRCLGKVARAALSAIARHLRLRSDVFNHMLDDFPLAPNEVSSSVLLASYAHASIQNGKHASGGGNLSAKIEVEKGLLTLFCSDGTGIQVCDPNGRWYTADNGCGVGDLLLITGKALSHATAGLRPAASYRTTTDHLSATDTRGRASLAFRLMPKSNAILDCSPIEAAGHVIPQSYVPVSVSQFMDNLLAENDTLVNPPVKTNVPRDDVCKEPSLRSVLSDPISGAFLEDAMVVSCGHSFGGLMLRRVLEMSRCTLCNTEIESGSLVPNHALRAAASAIKQQDDKRLFHNAAMRRRRKEMSDQMDVVR

SEQ ID NO: 96092 - DNA, 1417 bp, Arabidopsis thaliana
  misc_feature (1)..(1417): Ceres Seq. ID no. 12731777
  misc_feature (1)..(1417): Ortholog of  Ceres SEQ ID NO 13648367 as cited in SEQ ID NO 20383
acttaaaattaaataaaaagatagaagaaaaatagtgctttgagaagaagaaaaaaaccgttgccctagaattaaaatccacttctcagtgtcataggcgtcgtcggtttgggaattttataaagttggtctcttttgaattcatcagtttcgtcattctccttcaaatctggaaaccaaagcgagtgtgttttgctctcttgaatcgaatttgtaagctcgtcgattttgcttctttccgggtcgggtaatcaatttgatttgattcttcactcttctacagtgagcagaaaatggaagctctctacgccaagctctacgacaaatacaccaaactccagaagaagaaatattccgaatacgatgagattaataaggaacaagaagagaaattccttacctttgtttcagcctcagaggagttgatggaacatttgagaggtgaaaatcagagttctctggagatggttgagaagttgaggaatgaaatcatttcaatcagatctggcagggacgacaagtttctggagtgtcaaaagcttctcatggaagaagaactaaagaacaaatcactttctgaagaagttgtcaagctaaaagagctggtccaagaggaacatcctcgcaactatgaagatcaaagtggaaaaaaacaaaagagaaagactcctgaaagtgctcgagttacaacgagaagcatgataaaacgtagcagactgtcagaagatttggtggaaacggatatggtatcacctgacattagcaaacatcataaagcaaaggagcctctcttggtttctcagccacaatgctgcagaacaacctacgatggatcaagtagttctgctagttgtacatttcaagctcttggcaaacacttgctaggaatgaaattatcaactaataataagggcaaacgcgcctgcattgtagcctcacacccaacaaccggtttatccttcagcctaacttttataaataacccaaatggtgaagaatctgagctgctttacaagcctgcatcactcggaacatttcaaagagtggcaccggaatggatgagagaagttataaagttcagcacaagtatgtgtcccatcttctttgaaagagtctctcgagtcattaagctcaattgttgatcggtaccgtatgtacatctccctccccttatcttgtgtagtcatctctgatggcttcttagtgtgatgtttctcaataggtttgaaaagctagggaagttatcattgtatctatagaaatgtgtctctctttaactttggaattagtttcaaagatagtgtgtccttgtgatgaatcatattgtaacaagatcttgatttatcctttgctctcgataccctctcctcttgtagacctcataaatctctgatctattgagcattttacatgattc

SEQ ID NO: 96093 - protein, 282 aa, Arabidopsis thaliana
  peptide (1)..(282): Ceres Seq. ID no. 12731778
MEALYAKLYDKYTKLQKKKYSEYDEINKEQEEKFLTFVSASEELMEHLRGENQSSLEMVEKLRNEIISIRSGRDDKFLECQKLLMEEELKNKSLSEEVVKLKELVQEEHPRNYEDQSGKKQKRKTPESARVTTRSMIKRSRLSEDLVETDMVSPDISKHHKAKEPLLVSQPQCCRTTYDGSSSSASCTFQALGKHLLGMKLSTNNKGKRACIVASHPTTGLSFSLTFINNPNGEESELLYKPASLGTFQRVAPEWMREVIKFSTSMCPIFFERVSRVIKLNC

SEQ ID NO: 96094 - protein, 238 aa, Arabidopsis thaliana
  peptide (1)..(238): Ceres Seq. ID no. 12731779
MEHLRGENQSSLEMVEKLRNEIISIRSGRDDKFLECQKLLMEEELKNKSLSEEVVKLKELVQEEHPRNYEDQSGKKQKRKTPESARVTTRSMIKRSRLSEDLVETDMVSPDISKHHKAKEPLLVSQPQCCRTTYDGSSSSASCTFQALGKHLLGMKLSTNNKGKRACIVASHPTTGLSFSLTFINNPNGEESELLYKPASLGTFQRVAPEWMREVIKFSTSMCPIFFERVSRVIKLNC

SEQ ID NO: 96095 - protein, 225 aa, Arabidopsis thaliana
  peptide (1)..(225): Ceres Seq. ID no. 12731780
MVEKLRNEIISIRSGRDDKFLECQKLLMEEELKNKSLSEEVVKLKELVQEEHPRNYEDQSGKKQKRKTPESARVTTRSMIKRSRLSEDLVETDMVSPDISKHHKAKEPLLVSQPQCCRTTYDGSSSSASCTFQALGKHLLGMKLSTNNKGKRACIVASHPTTGLSFSLTFINNPNGEESELLYKPASLGTFQRVAPEWMREVIKFSTSMCPIFFERVSRVIKLNC

SEQ ID NO: 96096 - DNA, 1575 bp, Arabidopsis thaliana
  misc_feature (1)..(1575): Ceres Seq. ID no. 12731781
  misc_feature (1)..(1575): Ortholog of  Ceres SEQ ID NO 13502874 as cited in SEQ ID NO 66298
  misc_feature (1)..(1575): Ortholog of  Ceres SEQ ID NO 12614124 as cited in SEQ ID NO 68392
atggcaacacttatcagcgttgactttcagcactgtttcatgtacataatcctcctatgcctcttctcacttctctgttactctctcttcttcaggaaaccaaagggcacacgagttggctgtgatctgcctccgagccctccgtctcttcctatcattggtcatcttcaccatctcctctcttctctaactcacaagtctttacaaaaactctcctccaagtatggacctttcctccatctccggatctttagtgttcccatcatccttgtctcatctgcttcagtggcatatgagatctttaaggcccacgatgtgaacgtctcatctcgtggtgctgctgcgatcgatgagtccctcttgtttggatcttctagcttcatttacgctccctatggagattactggaagttcatgaagaagatcttcgccactaagctgctccgaccacaggtgctggagaattcacgtggtgttcgtgctgaagagttaaagcggttttacaggagaattctcgataaggcgaggaagaatgagaacatcgagatcagtaaggaatcggcgatgctcatgaacaacatcttatgcaggatgagcatgggaaggagtttttcagaggaaaatggtgaggcagagagagtcaggggcctggtgggtgaatcatatgccttggtgaagaagattttcttcgcagctacattgcgcagactgcttgagaagcttcggatcccactattcaggaaggagataatgggtgtgtccgacagatttgatgagctgctagagaggattattgtggaacacaaagacaaacttgaaaaggagcatcaagttatggatatgatggatgtgttgttggcagcttatcgagacaaaaacgcagagtataagatcactaggaatcatatcaagtcgttttttgtggaccttttcgttgggggcactgatacctcggtccaaacaacacaatggactatggctgagatcattaataaccctaacattcttcagacactgagaaaagaaatcgattcagttgtagggaaatcaaggttgattcacgaaacggatataccaaaccttccttatttgcaagcagtggttaaggaaggactaagattgcatcctccagggcccctcttgataaggacttttcaagaaagatgtgagatgaaagggttctacataccggagaagacaacactcgttatcaacgcttatgctgtgatgagagatcccgactcttgggaagatcctgacgagtttaagccagagaggtttctaagttattcaagatcagggcaagaagacgagaaagagcaaacacttaagtacctttcttttggtggcggaaggagaggatgtcctggagtaaatctaggttatatatttgttggaactgcaataggaatgatggtgcagtgctttgactggaaaatcgaaggagataaggtcaacatggaagagacttatggaggaatgaacctaaccatggttaacccgcttaagtgcactccagttcctcgaacccaacctttttcttttacttctaatctcgagattcttagttcctga

SEQ ID NO: 96097 - protein, 524 aa, Arabidopsis thaliana
  peptide (1)..(524): Ceres Seq. ID no. 12731782
MATLISVDFQHCFMYIILLCLFSLLCYSLFFRKPKGTRVGCDLPPSPPSLPIIGHLHHLLSSLTHKSLQKLSSKYGPFLHLRIFSVPIILVSSASVAYEIFKAHDVNVSSRGAAAIDESLLFGSSSFIYAPYGDYWKFMKKIFATKLLRPQVLENSRGVRAEELKRFYRRILDKARKNENIEISKESAMLMNNILCRMSMGRSFSEENGEAERVRGLVGESYALVKKIFFAATLRRLLEKLRIPLFRKEIMGVSDRFDELLERIIVEHKDKLEKEHQVMDMMDVLLAAYRDKNAEYKITRNHIKSFFVDLFVGGTDTSVQTTQWTMAEIINNPNILQTLRKEIDSVVGKSRLIHETDIPNLPYLQAVVKEGLRLHPPGPLLIRTFQERCEMKGFYIPEKTTLVINAYAVMRDPDSWEDPDEFKPERFLSYSRSGQEDEKEQTLKYLSFGGGRRGCPGVNLGYIFVGTAIGMMVQCFDWKIEGDKVNMEETYGGMNLTMVNPLKCTPVPRTQPFSFTSNLEILSS

SEQ ID NO: 96098 - protein, 511 aa, Arabidopsis thaliana
  peptide (1)..(511): Ceres Seq. ID no. 12731783
MYIILLCLFSLLCYSLFFRKPKGTRVGCDLPPSPPSLPIIGHLHHLLSSLTHKSLQKLSSKYGPFLHLRIFSVPIILVSSASVAYEIFKAHDVNVSSRGAAAIDESLLFGSSSFIYAPYGDYWKFMKKIFATKLLRPQVLENSRGVRAEELKRFYRRILDKARKNENIEISKESAMLMNNILCRMSMGRSFSEENGEAERVRGLVGESYALVKKIFFAATLRRLLEKLRIPLFRKEIMGVSDRFDELLERIIVEHKDKLEKEHQVMDMMDVLLAAYRDKNAEYKITRNHIKSFFVDLFVGGTDTSVQTTQWTMAEIINNPNILQTLRKEIDSVVGKSRLIHETDIPNLPYLQAVVKEGLRLHPPGPLLIRTFQERCEMKGFYIPEKTTLVINAYAVMRDPDSWEDPDEFKPERFLSYSRSGQEDEKEQTLKYLSFGGGRRGCPGVNLGYIFVGTAIGMMVQCFDWKIEGDKVNMEETYGGMNLTMVNPLKCTPVPRTQPFSFTSNLEILSS

SEQ ID NO: 96099 - protein, 386 aa, Arabidopsis thaliana
  peptide (1)..(386): Ceres Seq. ID no. 12731784
MKKIFATKLLRPQVLENSRGVRAEELKRFYRRILDKARKNENIEISKESAMLMNNILCRMSMGRSFSEENGEAERVRGLVGESYALVKKIFFAATLRRLLEKLRIPLFRKEIMGVSDRFDELLERIIVEHKDKLEKEHQVMDMMDVLLAAYRDKNAEYKITRNHIKSFFVDLFVGGTDTSVQTTQWTMAEIINNPNILQTLRKEIDSVVGKSRLIHETDIPNLPYLQAVVKEGLRLHPPGPLLIRTFQERCEMKGFYIPEKTTLVINAYAVMRDPDSWEDPDEFKPERFLSYSRSGQEDEKEQTLKYLSFGGGRRGCPGVNLGYIFVGTAIGMMVQCFDWKIEGDKVNMEETYGGMNLTMVNPLKCTPVPRTQPFSFTSNLEILSS

SEQ ID NO: 96100 - DNA, 1545 bp, Arabidopsis thaliana
  misc_feature (1)..(1545): Ceres Seq. ID no. 12731789
  misc_feature (1)..(1545): Ortholog of  Ceres SEQ ID NO 13502874 as cited in SEQ ID NO 66298
  misc_feature (1)..(1545): Ortholog of  Ceres SEQ ID NO 12614124 as cited in SEQ ID NO 68392
atggcagcaatcatcggtgactgcttcatatttatcctcttatgcctcttctcactccttttctactatctcatcttcaggaaacctaagaactcacggcttgtcgcttatggctgtgatctgcctccgagccctccatctcttccgattataggccatgttcaccttctcctctcttccctagctcataaatctttacagaaactctcatccaagtatggacctcttctctatctccgcgtcttcaacttccctgtagtcctcgtctcctcggcgtctgtggcctacgagatctttaaggctcatgacttgaacatctcatctcgtgacaacccttcaatcgatgattccctcttgattggatcttctgtctttggtagtgctccttatggagattactttaagttcatgaagaagctcctggttactaagctgcttggaccacaggcacttgagcggtcaagaggcatccgtgcagatgagcttgagcggtttcactcaagcctgcttgataaggcggtaaagaaggagatcgttgagattgggaaggaagcaacgaagcttagtaataacagcctctggaggatgagcattgggagaagtttttcagagaagaatggtgaggctgagagagtcaggggactggttactgagttagatggcttgacaaagaaggtcttgtttgcaactttgctgcacaggccccttgagaagcttggaatctctctgttcaaaaaggagatcatgtgtgtttctgacagcttcgatgaggtccttgagagggttcttgtggaacatgaacagaaactggacgatcatcaagatagggacatgatggacgtgttgttggcagcttatggagatgaaaacgcagagcataaaatcagcaggaaccacatcaaagcatttttcgtggagcttttctttgcgggtactgatacctcggcgcaatcaatacagtggacaatggcagagatcattaacaaccccaacattcttaaaagattgagagaagaaatcgattctgtggtagggaaaacaaggttgattcaagaaactgatctaccaaagctcccctatttgcaagctgtggttaaggaaggacttagattgcacccgccattgcctctctttgtaaggacgttccaagaagggtgtaagattggaggtttctatgtaccagaaaagacaacacttattggtaatgcttatgttatgatgagagatccgagtgtctgggaagaccctgaggagtttaaacctgagaggtttctatcttcttcaagatcaacgcaagaagaggaaagaagagagcaagcacttaagtacattcctttcggtagtggacggagaggctgtcctggatcaagtctgggttatatctttgttggcaccgcagttggaatgatggtgcaatgctttgactggagtatcaaaggagacaaggtccaaatggatgaggctggaggactaaacttgagtatggctcattccctgaagtgcactcctgttcctcgaaaccggcctttacttgctgatcagtag

SEQ ID NO: 96101 - protein, 514 aa, Arabidopsis thaliana
  peptide (1)..(514): Ceres Seq. ID no. 12731790
MAAIIGDCFIFILLCLFSLLFYYLIFRKPKNSRLVAYGCDLPPSPPSLPIIGHVHLLLSSLAHKSLQKLSSKYGPLLYLRVFNFPVVLVSSASVAYEIFKAHDLNISSRDNPSIDDSLLIGSSVFGSAPYGDYFKFMKKLLVTKLLGPQALERSRGIRADELERFHSSLLDKAVKKEIVEIGKEATKLSNNSLWRMSIGRSFSEKNGEAERVRGLVTELDGLTKKVLFATLLHRPLEKLGISLFKKEIMCVSDSFDEVLERVLVEHEQKLDDHQDRDMMDVLLAAYGDENAEHKISRNHIKAFFVELFFAGTDTSAQSIQWTMAEIINNPNILKRLREEIDSVVGKTRLIQETDLPKLPYLQAVVKEGLRLHPPLPLFVRTFQEGCKIGGFYVPEKTTLIGNAYVMMRDPSVWEDPEEFKPERFLSSSRSTQEEERREQALKYIPFGSGRRGCPGSSLGYIFVGTAVGMMVQCFDWSIKGDKVQMDEAGGLNLSMAHSLKCTPVPRNRPLLADQ

SEQ ID NO: 96102 - protein, 378 aa, Arabidopsis thaliana
  peptide (1)..(378): Ceres Seq. ID no. 12731791
MKKLLVTKLLGPQALERSRGIRADELERFHSSLLDKAVKKEIVEIGKEATKLSNNSLWRMSIGRSFSEKNGEAERVRGLVTELDGLTKKVLFATLLHRPLEKLGISLFKKEIMCVSDSFDEVLERVLVEHEQKLDDHQDRDMMDVLLAAYGDENAEHKISRNHIKAFFVELFFAGTDTSAQSIQWTMAEIINNPNILKRLREEIDSVVGKTRLIQETDLPKLPYLQAVVKEGLRLHPPLPLFVRTFQEGCKIGGFYVPEKTTLIGNAYVMMRDPSVWEDPEEFKPERFLSSSRSTQEEERREQALKYIPFGSGRRGCPGSSLGYIFVGTAVGMMVQCFDWSIKGDKVQMDEAGGLNLSMAHSLKCTPVPRNRPLLADQ

SEQ ID NO: 96103 - protein, 319 aa, Arabidopsis thaliana
  peptide (1)..(319): Ceres Seq. ID no. 12731792
MSIGRSFSEKNGEAERVRGLVTELDGLTKKVLFATLLHRPLEKLGISLFKKEIMCVSDSFDEVLERVLVEHEQKLDDHQDRDMMDVLLAAYGDENAEHKISRNHIKAFFVELFFAGTDTSAQSIQWTMAEIINNPNILKRLREEIDSVVGKTRLIQETDLPKLPYLQAVVKEGLRLHPPLPLFVRTFQEGCKIGGFYVPEKTTLIGNAYVMMRDPSVWEDPEEFKPERFLSSSRSTQEEERREQALKYIPFGSGRRGCPGSSLGYIFVGTAVGMMVQCFDWSIKGDKVQMDEAGGLNLSMAHSLKCTPVPRNRPLLADQ

SEQ ID NO: 96104 - DNA, 1548 bp, Arabidopsis thaliana
  misc_feature (1)..(1548): Ceres Seq. ID no. 12731793
  misc_feature (1)..(1548): Ortholog of  Ceres SEQ ID NO 13502874 as cited in SEQ ID NO 66298
  misc_feature (1)..(1548): Ortholog of  Ceres SEQ ID NO 12614124 as cited in SEQ ID NO 68392
atggaggcagtgatcagctttgactttcagaactgcttcatcttcatcctcatatttctcttaacgttcctatgcttctttttcttcttcaagaaaccaaaggattcacgagttaacttcgatttgcctccgagccctccttctctaccaatcattggtcatgttcaccttctcctctctactctaacccacaagtcattacagaaactctcctccaggtatggacctctcctctatctccggatttttaatgtccccatcatcctcgtttcctcggcctcagtggcctacgagatcttcaggacacaagacgtgaacatctcctctcgcggtgtcaccgcggttgatgagtccctcgtgtttggatcttccagtttcgtcactgctccttacggagattactggaagttcatgaagaagcttactgtcatgaagcttctcggaccgcaggcacaagagcagtcacgagacatccgtgcagatgacataaagcggttttgcaggaatctgctcgataaagcaaggaagaaggagagcgttgagattggtaaagaagcaatgaatctcatgaacaacattttgtgcaagatgagcatgggaaggagtttttcagaggagaatggtgagacagagaaactaaggggattagttaccgagtcgattggcttgatgaaaaagatgttcttggcagttttgttgcgcagacagcttcagaaacttggaatctcactattcaagaaggatatcatgggcgtttccaacaaatttgatgtgctgctagagaaagttcttgtggaacatagagagaaaccggagaaggatcaaggtacggttatgttggacgtgttgttggcagcttatggagacgaaaatgcagagtacaagatcactaagaatcacatcaaggcttttttcgtggaccttttcattggagccactgatacctctgtgcaaacaatacagtggacaatggccgagatcatgaacaatactcacattcttgagagaatgagagaagaaattgattctgtcgtagggaaatcaaggttgattcaagaaacggatttaccgaacctcccttacttgcacgctgtcattaaggaagcactaagactgcacccaccggggcctctcttgccaagggaatttcaacaagggtgtaagatcggagggttctacataccggagaagacaacacttttgattaatgcctatgttgtgatgagagatccgaatgtctgggaagaccctgaggagtttaaaccagagagatttctagcttcttcaaggtcagggcaagaggacgagagaagagagcaagctcttaagtttcttcctttcggcagtggaaggagaggatgtcctggatcaaatctagcttatatgattgtaggaagtgcaataggaatgatggtgcagtgctttgactggagaatcgaaggagagaaggtcaacatgaaagaggctgttaaagggaccatccttaccatggctcatcctcttaagttaactcctgtcactcgacaaccacccttgacttggatatga

SEQ ID NO: 96105 - protein, 515 aa, Arabidopsis thaliana
  peptide (1)..(515): Ceres Seq. ID no. 12731794
MEAVISFDFQNCFIFILIFLLTFLCFFFFFKKPKDSRVNFDLPPSPPSLPIIGHVHLLLSTLTHKSLQKLSSRYGPLLYLRIFNVPIILVSSASVAYEIFRTQDVNISSRGVTAVDESLVFGSSSFVTAPYGDYWKFMKKLTVMKLLGPQAQEQSRDIRADDIKRFCRNLLDKARKKESVEIGKEAMNLMNNILCKMSMGRSFSEENGETEKLRGLVTESIGLMKKMFLAVLLRRQLQKLGISLFKKDIMGVSNKFDVLLEKVLVEHREKPEKDQGTVMLDVLLAAYGDENAEYKITKNHIKAFFVDLFIGATDTSVQTIQWTMAEIMNNTHILERMREEIDSVVGKSRLIQETDLPNLPYLHAVIKEALRLHPPGPLLPREFQQGCKIGGFYIPEKTTLLINAYVVMRDPNVWEDPEEFKPERFLASSRSGQEDERREQALKFLPFGSGRRGCPGSNLAYMIVGSAIGMMVQCFDWRIEGEKVNMKEAVKGTILTMAHPLKLTPVTRQPPLTWI

SEQ ID NO: 96106 - protein, 378 aa, Arabidopsis thaliana
  peptide (1)..(378): Ceres Seq. ID no. 12731795
MKKLTVMKLLGPQAQEQSRDIRADDIKRFCRNLLDKARKKESVEIGKEAMNLMNNILCKMSMGRSFSEENGETEKLRGLVTESIGLMKKMFLAVLLRRQLQKLGISLFKKDIMGVSNKFDVLLEKVLVEHREKPEKDQGTVMLDVLLAAYGDENAEYKITKNHIKAFFVDLFIGATDTSVQTIQWTMAEIMNNTHILERMREEIDSVVGKSRLIQETDLPNLPYLHAVIKEALRLHPPGPLLPREFQQGCKIGGFYIPEKTTLLINAYVVMRDPNVWEDPEEFKPERFLASSRSGQEDERREQALKFLPFGSGRRGCPGSNLAYMIVGSAIGMMVQCFDWRIEGEKVNMKEAVKGTILTMAHPLKLTPVTRQPPLTWI

SEQ ID NO: 96107 - protein, 372 aa, Arabidopsis thaliana
  peptide (1)..(372): Ceres Seq. ID no. 12731796
MKLLGPQAQEQSRDIRADDIKRFCRNLLDKARKKESVEIGKEAMNLMNNILCKMSMGRSFSEENGETEKLRGLVTESIGLMKKMFLAVLLRRQLQKLGISLFKKDIMGVSNKFDVLLEKVLVEHREKPEKDQGTVMLDVLLAAYGDENAEYKITKNHIKAFFVDLFIGATDTSVQTIQWTMAEIMNNTHILERMREEIDSVVGKSRLIQETDLPNLPYLHAVIKEALRLHPPGPLLPREFQQGCKIGGFYIPEKTTLLINAYVVMRDPNVWEDPEEFKPERFLASSRSGQEDERREQALKFLPFGSGRRGCPGSNLAYMIVGSAIGMMVQCFDWRIEGEKVNMKEAVKGTILTMAHPLKLTPVTRQPPLTWI

SEQ ID NO: 96108 - DNA, 2889 bp, Arabidopsis thaliana
  misc_feature (1)..(2889): Ceres Seq. ID no. 12731809
  misc_feature (1)..(2889): Ortholog of  Ceres SEQ ID NO 14302164 as cited in SEQ ID NO 0
atgacgactacgcagagcgctatgagaatggttgagggtgatcatataaaaaattggcaggcttctagtgatagtgggatctttggttcacttgatatggctgttgaagatttaggattccttatgaaaagaaataggttggatagtggtgatcaaaccggtaaattccctagtagaagcgaaagcgcgccgcctagcatggaaggttcctttgcagctcttaggaatctcttgaaacaacaagaaggtagtagctctgaagttttaagtagggctattgagaattatgactcggaagaagagatacgtagtgatcctgcttatgtagcttactatttgtcgaacatcaacttgaatccgagactccctcctccgttaatctcacgggagaatcagcacttgttgcgtcattttggtgataataatcagagtccaacaacttcttgggataatatggggataagatcatctttgcattcttctagaactgctctttcaactcatagagaggagcccgaggatgaggcatcatcgggtgaacaacaatcttatgcttctttggctggtcgtcgtaagagcatagctgatatgattcaggaagatttccctcttacactttcttctgtgttcaagcggcctcattcggcaggaaatcgtccaatagcacaagacatccatgccatttcctctgatacatcttcagaacacgcaagaagattaccggagtccgatataaattcggttaatctgctgagggagacagattctctctccagcgatgctattgctagtgaagatccctttaccactgatttggcctcacaaagttttactaatgcacagacagagagattgaacgcgaggcaagcgagccatgaggacaacaatctatctgtttttggtgcttctcctccatcctctgttgcttcaagaatgaggaggaaccaagaagaccaacaatctcagggaaggagaatgcctccacaatacacaccttcatcgtatcaggttcaagctagttcgccacagcaaatgagctatccgaggataggtggtacacaggacatgatgcagagcttaccaaagattgcaactggcgaggtacattcgactttccaatctcctcacggtttggcaccgcctcctatgtatacatcaacagcagcatatatgacatctctgagtccattttaccatcaaaactttcagtcctcgggtatgttcgtcccgcaatataattatggtggttaccctcctgcttctggtattgtccctcaatatatgagtggatacccatctcatgaagcgactgttcctatgccatatgatatctcatctacttcttcgggctacaacaaccctcggctcctgcctggagtatcatcgagtggacaaaacattccttctcttgtggatccttttcagttgcaatattttcaacaggctcaagtggacgcgtatgctcctccgtttcagagcagcactgattcttttgggcagaaagaccaacaagctgttggctatatggcaaatcatgaacctctcaacagtccattgagtccgggttacgggttgcaaagtccgcggcacatgggaaactattttgcagtgccgcctggtgtaagagtaatgccgcagtatccaggatcacctcttgctagtccggtgatgccatcctcaccggttggtggaatgatgagccactttggaagacgaagtgaaacaaggtatcatcaacaagggccaagtagaaacactgggatctaccctggtggatggcaagggaacagagggggagccagcagcatcgttgatgatctaaaaagacattcttttcttgatgaacttaagtctccaaatgctcggaaactcgagctttctgatattgcagggcgtgttgttgaattcaggcacgtcgatcagcatggcagccggtttattcaacagaagttggagcactgctccgatgaggagaaggcatctgttttcagtgaggttcttccacaagcttcaaaattgatgactgacgtttttggaaattatgtcatccaaaaattcatagaacatggaactccggcacagagagaagaacttgtgaagcaacttgctggtcagatggtttcactaagcttacaaatgtatggatgccgtgtgatacaaaaggcccttgaagtgatagatgttgaccaaaagacagaactaattcgtgagctcgatgggaatgtgctgaagtgtgttagagatcaaaacggaaatcatgttatccaaaaatgtatcgagagtatgcctgctggtaggattggattcgtaattgctgctttccgtggtcaagtcgccactctttctactcatccttatggatgccgagttatccagagaatcttggagcattgctcagatgatgaggagactcattgtataatagatgaaatattggaatctgcgtttgctcttgctcatgatcagtatgggaattatgtcactcagcatgtcctggagagagggaagcccgatgaaaggagacagatcattgagaagttgacagggaatgttgttcagatgagtcagcacaaatacgcatctaacgttgtagagaagtgtttggaacacgctgatagtaccgaaagagagttcctgattgaagagataatgggcaaatccgaggaagacaatcacttgctagcgatgatgaaggatcagtttgcaaattacgtggtccagaaagtcttggagatcagtaaagatcagcaaagggagattctggtgcagaggatgaaaattcatctccaaagtttgcggaaatacacatacgggaaacacatagtagcccgattcgaacaactgtttggtgaagagagtgaagtctcagaagagggaacagaaggttag

SEQ ID NO: 96109 - protein, 962 aa, Arabidopsis thaliana
  peptide (1)..(962): Ceres Seq. ID no. 12731810
MTTTQSAMRMVEGDHIKNWQASSDSGIFGSLDMAVEDLGFLMKRNRLDSGDQTGKFPSRSESAPPSMEGSFAALRNLLKQQEGSSSEVLSRAIENYDSEEEIRSDPAYVAYYLSNINLNPRLPPPLISRENQHLLRHFGDNNQSPTTSWDNMGIRSSLHSSRTALSTHREEPEDEASSGEQQSYASLAGRRKSIADMIQEDFPLTLSSVFKRPHSAGNRPIAQDIHAISSDTSSEHARRLPESDINSVNLLRETDSLSSDAIASEDPFTTDLASQSFTNAQTERLNARQASHEDNNLSVFGASPPSSVASRMRRNQEDQQSQGRRMPPQYTPSSYQVQASSPQQMSYPRIGGTQDMMQSLPKIATGEVHSTFQSPHGLAPPPMYTSTAAYMTSLSPFYHQNFQSSGMFVPQYNYGGYPPASGIVPQYMSGYPSHEATVPMPYDISSTSSGYNNPRLLPGVSSSGQNIPSLVDPFQLQYFQQAQVDAYAPPFQSSTDSFGQKDQQAVGYMANHEPLNSPLSPGYGLQSPRHMGNYFAVPPGVRVMPQYPGSPLASPVMPSSPVGGMMSHFGRRSETRYHQQGPSRNTGIYPGGWQGNRGGASSIVDDLKRHSFLDELKSPNARKLELSDIAGRVVEFRHVDQHGSRFIQQKLEHCSDEEKASVFSEVLPQASKLMTDVFGNYVIQKFIEHGTPAQREELVKQLAGQMVSLSLQMYGCRVIQKALEVIDVDQKTELIRELDGNVLKCVRDQNGNHVIQKCIESMPAGRIGFVIAAFRGQVATLSTHPYGCRVIQRILEHCSDDEETHCIIDEILESAFALAHDQYGNYVTQHVLERGKPDERRQIIEKLTGNVVQMSQHKYASNVVEKCLEHADSTEREFLIEEIMGKSEEDNHLLAMMKDQFANYVVQKVLEISKDQQREILVQRMKIHLQSLRKYTYGKHIVARFEQLFGEESEVSEEGTEG

SEQ ID NO: 96110 - protein, 955 aa, Arabidopsis thaliana
  peptide (1)..(955): Ceres Seq. ID no. 12731811
MRMVEGDHIKNWQASSDSGIFGSLDMAVEDLGFLMKRNRLDSGDQTGKFPSRSESAPPSMEGSFAALRNLLKQQEGSSSEVLSRAIENYDSEEEIRSDPAYVAYYLSNINLNPRLPPPLISRENQHLLRHFGDNNQSPTTSWDNMGIRSSLHSSRTALSTHREEPEDEASSGEQQSYASLAGRRKSIADMIQEDFPLTLSSVFKRPHSAGNRPIAQDIHAISSDTSSEHARRLPESDINSVNLLRETDSLSSDAIASEDPFTTDLASQSFTNAQTERLNARQASHEDNNLSVFGASPPSSVASRMRRNQEDQQSQGRRMPPQYTPSSYQVQASSPQQMSYPRIGGTQDMMQSLPKIATGEVHSTFQSPHGLAPPPMYTSTAAYMTSLSPFYHQNFQSSGMFVPQYNYGGYPPASGIVPQYMSGYPSHEATVPMPYDISSTSSGYNNPRLLPGVSSSGQNIPSLVDPFQLQYFQQAQVDAYAPPFQSSTDSFGQKDQQAVGYMANHEPLNSPLSPGYGLQSPRHMGNYFAVPPGVRVMPQYPGSPLASPVMPSSPVGGMMSHFGRRSETRYHQQGPSRNTGIYPGGWQGNRGGASSIVDDLKRHSFLDELKSPNARKLELSDIAGRVVEFRHVDQHGSRFIQQKLEHCSDEEKASVFSEVLPQASKLMTDVFGNYVIQKFIEHGTPAQREELVKQLAGQMVSLSLQMYGCRVIQKALEVIDVDQKTELIRELDGNVLKCVRDQNGNHVIQKCIESMPAGRIGFVIAAFRGQVATLSTHPYGCRVIQRILEHCSDDEETHCIIDEILESAFALAHDQYGNYVTQHVLERGKPDERRQIIEKLTGNVVQMSQHKYASNVVEKCLEHADSTEREFLIEEIMGKSEEDNHLLAMMKDQFANYVVQKVLEISKDQQREILVQRMKIHLQSLRKYTYGKHIVARFEQLFGEESEVSEEGTEG

SEQ ID NO: 96111 - protein, 953 aa, Arabidopsis thaliana
  peptide (1)..(953): Ceres Seq. ID no. 12731812
MVEGDHIKNWQASSDSGIFGSLDMAVEDLGFLMKRNRLDSGDQTGKFPSRSESAPPSMEGSFAALRNLLKQQEGSSSEVLSRAIENYDSEEEIRSDPAYVAYYLSNINLNPRLPPPLISRENQHLLRHFGDNNQSPTTSWDNMGIRSSLHSSRTALSTHREEPEDEASSGEQQSYASLAGRRKSIADMIQEDFPLTLSSVFKRPHSAGNRPIAQDIHAISSDTSSEHARRLPESDINSVNLLRETDSLSSDAIASEDPFTTDLASQSFTNAQTERLNARQASHEDNNLSVFGASPPSSVASRMRRNQEDQQSQGRRMPPQYTPSSYQVQASSPQQMSYPRIGGTQDMMQSLPKIATGEVHSTFQSPHGLAPPPMYTSTAAYMTSLSPFYHQNFQSSGMFVPQYNYGGYPPASGIVPQYMSGYPSHEATVPMPYDISSTSSGYNNPRLLPGVSSSGQNIPSLVDPFQLQYFQQAQVDAYAPPFQSSTDSFGQKDQQAVGYMANHEPLNSPLSPGYGLQSPRHMGNYFAVPPGVRVMPQYPGSPLASPVMPSSPVGGMMSHFGRRSETRYHQQGPSRNTGIYPGGWQGNRGGASSIVDDLKRHSFLDELKSPNARKLELSDIAGRVVEFRHVDQHGSRFIQQKLEHCSDEEKASVFSEVLPQASKLMTDVFGNYVIQKFIEHGTPAQREELVKQLAGQMVSLSLQMYGCRVIQKALEVIDVDQKTELIRELDGNVLKCVRDQNGNHVIQKCIESMPAGRIGFVIAAFRGQVATLSTHPYGCRVIQRILEHCSDDEETHCIIDEILESAFALAHDQYGNYVTQHVLERGKPDERRQIIEKLTGNVVQMSQHKYASNVVEKCLEHADSTEREFLIEEIMGKSEEDNHLLAMMKDQFANYVVQKVLEISKDQQREILVQRMKIHLQSLRKYTYGKHIVARFEQLFGEESEVSEEGTEG

SEQ ID NO: 96112 - DNA, 2110 bp, Arabidopsis thaliana
  misc_feature (1)..(2110): Ceres Seq. ID no. 12731845
  misc_feature (1)..(2110): Ortholog of  Ceres SEQ ID NO 13659971 as cited in SEQ ID NO 67565
attataatccctcaacaattttaaaaaaagatcctgactttcaattttctctcttgtttcttcttttgatcatcttcaacaaaaaaaagttacgatctttctctccgggtcatcggaatttgagctagcttagctaaagttccgatctttcctctctgggtcgtcggaatttgagctttttaaaatcatgggaaattgttttgccaagaaccatggattgatgaagccacagcaaaatggtaataccactagatcagttgaagtaggagtaaccaaccaagatccaccgtcgtatactccacaagcgagaaccactcagcagccggagaaaccaggttccgtgaatagtcaaccaccaccgtggagggcggcggctgcagcaccaggactaagtcccaagaccaccactaagagcaattcaatactagagaacgctttcgaagacgtgaagctcttttacacattgggtaaagagctaggtcgtggtcaatttggggtaacgtatctgtgcacagagaattccacggggaagaagtacgcttgcaaatcgatctcgaagaagaagctggtgactaaagctgataaggatgatatgaggagagagattcagataatgcagcatttgagtgggcagcctaatattgtggagtttaaaggagcttatgaggatgagaaagctgtgaatttggtgatggagctttgtgctggtggtgaattgtttgatagaatcattgctaagggacattacactgagagagctgctgcttctgtttgtagacagattgtgaatgttgtcaagatttgtcatttcatgggtgtgttgcatagagacttgaagcctgagaatttcttgctctctagcaaagatgagaaggctttgatcaaggctactgatttcggattgtctgtctttattgaagagggaaaagtatatagagatattgttgggagtgcatactatgttgctccagaagtcttacgtcgcagatatgggaaagaagttgatatctggagtgctggaatcatcttatacattctactcagcggtgtgcccccgttttgggctgagactgagaaaggaatatttgatgctatattggaaggccatatcgactttgagagccaaccatggccgtcaatctccagcagtgccaaagatttggtacgtagaatgttgactgcggatccaaaaaggcggatttctgctgctgatgttcttcagcatccatggcttagagaaggtggagaagcatcagacaagccaattgacagtgctgttctctcaaggatgaaacaatttagagcaatgaataagctaaagaaacttgctttaaaggtcatagcggagaatattgacacggaagaaatccaaggattgaaggcaatgtttgctaacatagacactgacaacagtggcacaatcacttatgaagaactgaaagaaggattagccaaattgggatctaaactcacagaggcagaagtgaaacagctcatggatgctgctgatgttgatgggaacgggtccatcgactacatagagtttattacagcaacaatgcataggcacaggcttgaaagtaatgagaatctttacaaagctttccagcattttgacaaagacagcagcggatacattacaatagacgaactggaatctgcattgaaggaatatggaatgggagatgatgcaacaatcaaagaggttttgtcagatgtcgactccgataacgatggtagaatcaactatgaagagttctgcgcaatgatgagaagtggaaatccacaacaacaacaacctcggctgttctagtggacattgttgctggattaaaagtctttttgtttgtatctaatccagaaaaatcaggagctgaattaatgtttgttcagacaaaaaccacgtaaagaggaagatactcaaaactctgattgcttgtgttttgtattttgttcttcacttcttctgttttgtcctttgtgttctgtactcaggctgttgtgatatgagagaaagagaggtttcatttttaccgttaagattttgatcctgactgtgttaacattttacctcagttcctccacttttaatgtgattctccattccatc

SEQ ID NO: 96113 - protein, 541 aa, Arabidopsis thaliana
  peptide (1)..(541): Ceres Seq. ID no. 12731846
MGNCFAKNHGLMKPQQNGNTTRSVEVGVTNQDPPSYTPQARTTQQPEKPGSVNSQPPPWRAAAAAPGLSPKTTTKSNSILENAFEDVKLFYTLGKELGRGQFGVTYLCTENSTGKKYACKSISKKKLVTKADKDDMRREIQIMQHLSGQPNIVEFKGAYEDEKAVNLVMELCAGGELFDRIIAKGHYTERAAASVCRQIVNVVKICHFMGVLHRDLKPENFLLSSKDEKALIKATDFGLSVFIEEGKVYRDIVGSAYYVAPEVLRRRYGKEVDIWSAGIILYILLSGVPPFWAETEKGIFDAILEGHIDFESQPWPSISSSAKDLVRRMLTADPKRRISAADVLQHPWLREGGEASDKPIDSAVLSRMKQFRAMNKLKKLALKVIAENIDTEEIQGLKAMFANIDTDNSGTITYEELKEGLAKLGSKLTEAEVKQLMDAADVDGNGSIDYIEFITATMHRHRLESNENLYKAFQHFDKDSSGYITIDELESALKEYGMGDDATIKEVLSDVDSDNDGRINYEEFCAMMRSGNPQQQQPRLF

SEQ ID NO: 96114 - protein, 530 aa, Arabidopsis thaliana
  peptide (1)..(530): Ceres Seq. ID no. 12731847
MKPQQNGNTTRSVEVGVTNQDPPSYTPQARTTQQPEKPGSVNSQPPPWRAAAAAPGLSPKTTTKSNSILENAFEDVKLFYTLGKELGRGQFGVTYLCTENSTGKKYACKSISKKKLVTKADKDDMRREIQIMQHLSGQPNIVEFKGAYEDEKAVNLVMELCAGGELFDRIIAKGHYTERAAASVCRQIVNVVKICHFMGVLHRDLKPENFLLSSKDEKALIKATDFGLSVFIEEGKVYRDIVGSAYYVAPEVLRRRYGKEVDIWSAGIILYILLSGVPPFWAETEKGIFDAILEGHIDFESQPWPSISSSAKDLVRRMLTADPKRRISAADVLQHPWLREGGEASDKPIDSAVLSRMKQFRAMNKLKKLALKVIAENIDTEEIQGLKAMFANIDTDNSGTITYEELKEGLAKLGSKLTEAEVKQLMDAADVDGNGSIDYIEFITATMHRHRLESNENLYKAFQHFDKDSSGYITIDELESALKEYGMGDDATIKEVLSDVDSDNDGRINYEEFCAMMRSGNPQQQQPRLF

SEQ ID NO: 96115 - protein, 406 aa, Arabidopsis thaliana
  peptide (1)..(406): Ceres Seq. ID no. 12731848
MRREIQIMQHLSGQPNIVEFKGAYEDEKAVNLVMELCAGGELFDRIIAKGHYTERAAASVCRQIVNVVKICHFMGVLHRDLKPENFLLSSKDEKALIKATDFGLSVFIEEGKVYRDIVGSAYYVAPEVLRRRYGKEVDIWSAGIILYILLSGVPPFWAETEKGIFDAILEGHIDFESQPWPSISSSAKDLVRRMLTADPKRRISAADVLQHPWLREGGEASDKPIDSAVLSRMKQFRAMNKLKKLALKVIAENIDTEEIQGLKAMFANIDTDNSGTITYEELKEGLAKLGSKLTEAEVKQLMDAADVDGNGSIDYIEFITATMHRHRLESNENLYKAFQHFDKDSSGYITIDELESALKEYGMGDDATIKEVLSDVDSDNDGRINYEEFCAMMRSGNPQQQQPRLF

SEQ ID NO: 96116 - DNA, 721 bp, Arabidopsis thaliana
  misc_feature (1)..(721): Ceres Seq. ID no. 12731853
  misc_feature (1)..(721): Ortholog of  Ceres SEQ ID NO 14306355 as cited in SEQ ID NO 1268
  misc_feature (1)..(721): Ortholog of  Ceres SEQ ID NO 14305939 as cited in SEQ ID NO 0
atcatcacatacgcaaaacacaaaaatcgacatggcttccaagtcactctttcttgttgccttacttgtcggctcttttgctttcacttcatttgccagtgtcgctaacaggaagctgaagagtggtctcgaggaccaaaagacattcttccaccatccaggcggaggtctcggtggaggaggcggtattggtggaggcagtggtcttggtggaggaggcggctttggtggaggaggcggtcttggcggaggagctggaggcggtggcggtttaggaggaggagctggtggtggagctggaggaggatttggtggaggagctgggagcggtggtggtcttggtgggggtggtggtgctggtggaggatttggcggtggggctggtggtggttcaggtggagggtttggaggaggagctggtgctgggggtggactcggaggaggaggtggagctggtggcggtggtgggtttggaggaggaggcggaagcggtattggtggtggtttcggtgggggagccggtgccggaggtggtttcggtggtggacatcattgatgagaagctataagatcttgacgttaaaccatggaatggaatgcatggcaatgggttttacgtaccaaagtcttatgaaaaaagattaatatattattcatctaaagtgattcggtccatgattttgtgttattatcggcctttgaggaaataaatgaatgaatt

SEQ ID NO: 96117 - protein, 184 aa, Arabidopsis thaliana
  peptide (1)..(184): Ceres Seq. ID no. 12731854
SSHTQNTKIDMASKSLFLVALLVGSFAFTSFASVANRKLKSGLEDQKTFFHHPGGGLGGGGGIGGGSGLGGGGGFGGGGGLGGGAGGGGGLGGGAGGGAGGGFGGGAGSGGGLGGGGGAGGGFGGGAGGGSGGGFGGGAGAGGGLGGGGGAGGGGGFGGGGGSGIGGGFGGGAGAGGGFGGGHH

SEQ ID NO: 96118 - protein, 174 aa, Arabidopsis thaliana
  peptide (1)..(174): Ceres Seq. ID no. 12731855
MASKSLFLVALLVGSFAFTSFASVANRKLKSGLEDQKTFFHHPGGGLGGGGGIGGGSGLGGGGGFGGGGGLGGGAGGGGGLGGGAGGGAGGGFGGGAGSGGGLGGGGGAGGGFGGGAGGGSGGGFGGGAGAGGGLGGGGGAGGGGGFGGGGGSGIGGGFGGGAGAGGGFGGGHH

SEQ ID NO: 96119 - DNA, 1581 bp, Arabidopsis thaliana
  misc_feature (1)..(1581): Ceres Seq. ID no. 12731901
  misc_feature (1)..(1581): Ortholog of  Ceres SEQ ID NO 13585332 as cited in SEQ ID NO 60654
  misc_feature (1)..(1581): Ortholog of  Ceres SEQ ID NO 13502874 as cited in SEQ ID NO 66298
  misc_feature (1)..(1581): Ortholog of  Ceres SEQ ID NO 12614124 as cited in SEQ ID NO 68392
atggcagcaatgatcactgttgactttcaaaatagcttcatcttcatcctcttttgtctcttctctctcatttgttactctctcttcttcaggaaaccaaaagattcacgagctggtcgtgatcttcctccgagccctccttcttttccggttggaagcccacagtctaataatcttcaccttcttctctctgctcttgttcacaagtcttttcaaaaaatctcctacaagtatggacctctcctccatctccgtgtctttcatgttcccatagtcctagcctcctcggcctcagtggcctacgaaattttcaaggcccaagatgtgaatgtctcctctcgcggtcacgctccagccggggagtctctcttgtttggatcttctagcttcttcttcgctccctatggagattactttaaatttatgaggaagctcatagccacaaagcttcttggaccgcaggcactcgagcgttcaagaaaaatccgtgcagatgagctagatcggttttacagaaatctgcttgacaaggcgatgaagaaggagagtgtcgatatcgttgaggaagcagcgaagcttaataacaatatcatctgcaagatgatcatggggaggagttgttctgaggacaacggtgaggcggagagagtcagaggcttggtgattgagtctacggccttgacaaagcaaatcttcttgggtatgatctttgataaaccgcttaagaagcttgggatctcattgttccaaaaggatataaaaagtgtttcccgcttcgacgagctgctggagaagattcttgttgaacacgaagagagaatggggaagcattataaagctaatgacatgatggatttgttgttggaagcttatggagatgaaaatgcagagtataaaatcacaagaaaccatatcaagtccttgttcgtggatcttgtcattgccggcactgacacctcggcgcaaacaatagagtggacaatggcggagcttattaacaaccctaacattcttgagagattgagagaagaaatagaatcggttgtagggaacacaaggttagttcaagaaaccgatctaccaaacctcccttacttgcaagcggtagtcaaagaagggctaaggttgcatccgccaggggctgtgttcttaagaacgttccaagaaaggtgtgaactcaaagggttctacataccggaaaagacattgcttgttgttaatgtttatgctataatgagagatcctaagctttgggaagatcctgaggagtttaaacctgagaggtttatagcatcttcaagatcagggcaagaggacgagataagagaggaagtcctgaaatacatgcctttctcaactggaaggagaggctgtcctggatccaatctagcttatgtctctgtaggaaccgcgattggagtaatggcgcaatgctttgattggagaatcaaaggagagaaagtaaacatgaacgaggctgctggaacattggtgttgactatggctcagcctcttatgtgcactcctggtcctcgaaccctaaaccctttaccttcaagtctgcatgtacccatttcttga

SEQ ID NO: 96120 - protein, 526 aa, Arabidopsis thaliana
  peptide (1)..(526): Ceres Seq. ID no. 12731902
MAAMITVDFQNSFIFILFCLFSLICYSLFFRKPKDSRAGRDLPPSPPSFPVGSPQSNNLHLLLSALVHKSFQKISYKYGPLLHLRVFHVPIVLASSASVAYEIFKAQDVNVSSRGHAPAGESLLFGSSSFFFAPYGDYFKFMRKLIATKLLGPQALERSRKIRADELDRFYRNLLDKAMKKESVDIVEEAAKLNNNIICKMIMGRSCSEDNGEAERVRGLVIESTALTKQIFLGMIFDKPLKKLGISLFQKDIKSVSRFDELLEKILVEHEERMGKHYKANDMMDLLLEAYGDENAEYKITRNHIKSLFVDLVIAGTDTSAQTIEWTMAELINNPNILERLREEIESVVGNTRLVQETDLPNLPYLQAVVKEGLRLHPPGAVFLRTFQERCELKGFYIPEKTLLVVNVYAIMRDPKLWEDPEEFKPERFIASSRSGQEDEIREEVLKYMPFSTGRRGCPGSNLAYVSVGTAIGVMAQCFDWRIKGEKVNMNEAAGTLVLTMAQPLMCTPGPRTLNPLPSSLHVPIS

SEQ ID NO: 96121 - protein, 523 aa, Arabidopsis thaliana
  peptide (1)..(523): Ceres Seq. ID no. 12731903
MITVDFQNSFIFILFCLFSLICYSLFFRKPKDSRAGRDLPPSPPSFPVGSPQSNNLHLLLSALVHKSFQKISYKYGPLLHLRVFHVPIVLASSASVAYEIFKAQDVNVSSRGHAPAGESLLFGSSSFFFAPYGDYFKFMRKLIATKLLGPQALERSRKIRADELDRFYRNLLDKAMKKESVDIVEEAAKLNNNIICKMIMGRSCSEDNGEAERVRGLVIESTALTKQIFLGMIFDKPLKKLGISLFQKDIKSVSRFDELLEKILVEHEERMGKHYKANDMMDLLLEAYGDENAEYKITRNHIKSLFVDLVIAGTDTSAQTIEWTMAELINNPNILERLREEIESVVGNTRLVQETDLPNLPYLQAVVKEGLRLHPPGAVFLRTFQERCELKGFYIPEKTLLVVNVYAIMRDPKLWEDPEEFKPERFIASSRSGQEDEIREEVLKYMPFSTGRRGCPGSNLAYVSVGTAIGVMAQCFDWRIKGEKVNMNEAAGTLVLTMAQPLMCTPGPRTLNPLPSSLHVPIS

SEQ ID NO: 96122 - protein, 385 aa, Arabidopsis thaliana
  peptide (1)..(385): Ceres Seq. ID no. 12731904
MRKLIATKLLGPQALERSRKIRADELDRFYRNLLDKAMKKESVDIVEEAAKLNNNIICKMIMGRSCSEDNGEAERVRGLVIESTALTKQIFLGMIFDKPLKKLGISLFQKDIKSVSRFDELLEKILVEHEERMGKHYKANDMMDLLLEAYGDENAEYKITRNHIKSLFVDLVIAGTDTSAQTIEWTMAELINNPNILERLREEIESVVGNTRLVQETDLPNLPYLQAVVKEGLRLHPPGAVFLRTFQERCELKGFYIPEKTLLVVNVYAIMRDPKLWEDPEEFKPERFIASSRSGQEDEIREEVLKYMPFSTGRRGCPGSNLAYVSVGTAIGVMAQCFDWRIKGEKVNMNEAAGTLVLTMAQPLMCTPGPRTLNPLPSSLHVPIS

SEQ ID NO: 96123 - DNA, 2369 bp, Arabidopsis thaliana
  misc_feature (1)..(2369): Ceres Seq. ID no. 12731913
  misc_feature (1)..(2369): Ortholog of  Ceres SEQ ID NO 15177692 as cited in SEQ ID NO 52664
  misc_feature (1)..(2369): Ortholog of  Ceres SEQ ID NO 14303959 as cited in SEQ ID NO 53709
gagagatttgtgtttggtgttaaaaatcgcatgaatgctggaaatggaaagagttgctgagctcaagagacttcctagtaaaggtcctgtctctggtcacttatcaagaagaccatacttagactttgaaactagagatgccccgggtatgcatttggagagtttgagggaacgagctgctcgatacaacacgggaagatctgtgaatccaactacgacattggggagagaactaagccaagttctgaatgtgcatagggaagatatgatgatgactcagtttggtggtaacatgaatgattttcaggagtttgagcctgttgtatcgtctgttagaacgatgaaggccaagtatcctttgttggagattgaagaaattggagctgctgatgatgatgttacttgtaagggaagcaatgatatgtctgaggaagctggttctagctccttccgtggagttagtcatcctccagagcctgacgatatggatctaataacaactgtttatgtgcccatcagcgagaaaaacaaacctgattcggtttgcttgatgaagagcatgtctactactaaaggaccctttatcgaggatatttcgctctgtgtgcctccaaagaagccaagcccgagagtactttcacctgcagaaagcatagttgaggaacctgctacatcgctgtccccgttctctgtggctcgtgcatcgcagaacactgaaaactctctgctaccaccagattcagacaaagaatgtgtttgggatgcttctctgcctcccagtaccaatgtgagcccacatagcagtagtgttgaaagtatgaatttggctcgggctatgagtattgctaatagctcttctgcaacaagtactactcagcggagcgatgttgtgcttagtatggacaagaactactttgacaggagtatcagtatggttttggattcgtttgaaagcaccaagaccagtgcaagcagagcaagtgatagtagcggcctaagcgaagagagcagctggagcaatttcacgggaagccttaataagccacacaaagggaatgatccttggtggaatgctatcttggctatccgaacccgagatgggattttgggaatgagccacttcaagttgctgaaacgattaggttgtggtgatattgggagtgtctatctggctgaattaagcggaactcgatgccattttgctgtgaaagtcatggataaagcgtctcttgaggaccggaagaagttgaatcgagctcagaccgagagggatattctacaactattggatcatccgtttctaccgacattgtacactcattttgagactgacagattctcgtgtttggtcatggaatactgtcctggaggtgatctgcacactctaaggcaacgtcaacccgggaagcatttctcggagtacgctgctcgattttacgctgcagaggtgttgctagcactagagtatctccacatgctcggtgttgtttacagagacttgaagcctgagaatgttctggttcgagatgatggtcacataatgctttcagactttgatctctccttgaggtgcgcggtttcgccaacactgatcaaaacattcgactccgatccatctagacgaggcgcattctgcgttcaacctgcttgtatggagcctacatcagcttgcatcattcaaccctcatgcttcttaccgcgcagcatcttccctaacaaaaacaaaaaaaacaagtcccgtaaaacccaggcggatttcttcaaatcacactctggttctctcccagagctagtagctgaacctaacacacggtccatgtcctttgttggaacccacgagtacttagctccagagatcatcaaaggagaaggacatggaagcgcagtggattggtggacttttggtatctttgtgcatgagctcctatatgggaaaaccccgtttaaaggatcaggaaatcgagctactctgttcaatgtagtcggcgaacagttgaaattccccgagtcaccagcaactagctatgcaggcagggacttgatacaggctttactggtgaaagatccaaagaacaggttagggacaaagagaggagcaacggagataaagcagcatccattctttgaaggtgtgaattgggcattgataaggtgtagcactccacctgaagtaccgagacagatggagaccgaaccgccaccaaagtatggaccgattgatccggttgggtttggtagtaatagcaaaaggatgatgggaccaccagcagtatcagcagcagcagcagacacgaaatctggtggtaaatttctagactttgagtttttctaaagcttccaagatttggttccgtagtagccatttttag

SEQ ID NO: 96124 - protein, 765 aa, Arabidopsis thaliana
  peptide (1)..(765): Ceres Seq. ID no. 12731914
MLEMERVAELKRLPSKGPVSGHLSRRPYLDFETRDAPGMHLESLRERAARYNTGRSVNPTTTLGRELSQVLNVHREDMMMTQFGGNMNDFQEFEPVVSSVRTMKAKYPLLEIEEIGAADDDVTCKGSNDMSEEAGSSSFRGVSHPPEPDDMDLITTVYVPISEKNKPDSVCLMKSMSTTKGPFIEDISLCVPPKKPSPRVLSPAESIVEEPATSLSPFSVARASQNTENSLLPPDSDKECVWDASLPPSTNVSPHSSSVESMNLARAMSIANSSSATSTTQRSDVVLSMDKNYFDRSISMVLDSFESTKTSASRASDSSGLSEESSWSNFTGSLNKPHKGNDPWWNAILAIRTRDGILGMSHFKLLKRLGCGDIGSVYLAELSGTRCHFAVKVMDKASLEDRKKLNRAQTERDILQLLDHPFLPTLYTHFETDRFSCLVMEYCPGGDLHTLRQRQPGKHFSEYAARFYAAEVLLALEYLHMLGVVYRDLKPENVLVRDDGHIMLSDFDLSLRCAVSPTLIKTFDSDPSRRGAFCVQPACMEPTSACIIQPSCFLPRSIFPNKNKKNKSRKTQADFFKSHSGSLPELVAEPNTRSMSFVGTHEYLAPEIIKGEGHGSAVDWWTFGIFVHELLYGKTPFKGSGNRATLFNVVGEQLKFPESPATSYAGRDLIQALLVKDPKNRLGTKRGATEIKQHPFFEGVNWALIRCSTPPEVPRQMETEPPPKYGPIDPVGFGSNSKRMMGPPAVSAAAADTKSGGKFLDFEFF

SEQ ID NO: 96125 - protein, 762 aa, Arabidopsis thaliana
  peptide (1)..(762): Ceres Seq. ID no. 12731915
MERVAELKRLPSKGPVSGHLSRRPYLDFETRDAPGMHLESLRERAARYNTGRSVNPTTTLGRELSQVLNVHREDMMMTQFGGNMNDFQEFEPVVSSVRTMKAKYPLLEIEEIGAADDDVTCKGSNDMSEEAGSSSFRGVSHPPEPDDMDLITTVYVPISEKNKPDSVCLMKSMSTTKGPFIEDISLCVPPKKPSPRVLSPAESIVEEPATSLSPFSVARASQNTENSLLPPDSDKECVWDASLPPSTNVSPHSSSVESMNLARAMSIANSSSATSTTQRSDVVLSMDKNYFDRSISMVLDSFESTKTSASRASDSSGLSEESSWSNFTGSLNKPHKGNDPWWNAILAIRTRDGILGMSHFKLLKRLGCGDIGSVYLAELSGTRCHFAVKVMDKASLEDRKKLNRAQTERDILQLLDHPFLPTLYTHFETDRFSCLVMEYCPGGDLHTLRQRQPGKHFSEYAARFYAAEVLLALEYLHMLGVVYRDLKPENVLVRDDGHIMLSDFDLSLRCAVSPTLIKTFDSDPSRRGAFCVQPACMEPTSACIIQPSCFLPRSIFPNKNKKNKSRKTQADFFKSHSGSLPELVAEPNTRSMSFVGTHEYLAPEIIKGEGHGSAVDWWTFGIFVHELLYGKTPFKGSGNRATLFNVVGEQLKFPESPATSYAGRDLIQALLVKDPKNRLGTKRGATEIKQHPFFEGVNWALIRCSTPPEVPRQMETEPPPKYGPIDPVGFGSNSKRMMGPPAVSAAAADTKSGGKFLDFEFF

SEQ ID NO: 96126 - protein, 727 aa, Arabidopsis thaliana
  peptide (1)..(727): Ceres Seq. ID no. 12731916
MHLESLRERAARYNTGRSVNPTTTLGRELSQVLNVHREDMMMTQFGGNMNDFQEFEPVVSSVRTMKAKYPLLEIEEIGAADDDVTCKGSNDMSEEAGSSSFRGVSHPPEPDDMDLITTVYVPISEKNKPDSVCLMKSMSTTKGPFIEDISLCVPPKKPSPRVLSPAESIVEEPATSLSPFSVARASQNTENSLLPPDSDKECVWDASLPPSTNVSPHSSSVESMNLARAMSIANSSSATSTTQRSDVVLSMDKNYFDRSISMVLDSFESTKTSASRASDSSGLSEESSWSNFTGSLNKPHKGNDPWWNAILAIRTRDGILGMSHFKLLKRLGCGDIGSVYLAELSGTRCHFAVKVMDKASLEDRKKLNRAQTERDILQLLDHPFLPTLYTHFETDRFSCLVMEYCPGGDLHTLRQRQPGKHFSEYAARFYAAEVLLALEYLHMLGVVYRDLKPENVLVRDDGHIMLSDFDLSLRCAVSPTLIKTFDSDPSRRGAFCVQPACMEPTSACIIQPSCFLPRSIFPNKNKKNKSRKTQADFFKSHSGSLPELVAEPNTRSMSFVGTHEYLAPEIIKGEGHGSAVDWWTFGIFVHELLYGKTPFKGSGNRATLFNVVGEQLKFPESPATSYAGRDLIQALLVKDPKNRLGTKRGATEIKQHPFFEGVNWALIRCSTPPEVPRQMETEPPPKYGPIDPVGFGSNSKRMMGPPAVSAAAADTKSGGKFLDFEFF

SEQ ID NO: 96127 - DNA, 957 bp, Arabidopsis thaliana
  misc_feature (1)..(957): Ceres Seq. ID no. 12731929
  misc_feature (1)..(957): Ortholog of  Ceres SEQ ID NO 14302919 as cited in SEQ ID NO 20338
  misc_feature (1)..(957): Ortholog of  Ceres SEQ ID NO 13595497 as cited in SEQ ID NO 51127
  misc_feature (1)..(957): Ortholog of  Ceres SEQ ID NO 14306765 as cited in SEQ ID NO 53275
  misc_feature (1)..(957): Ortholog of  Ceres SEQ ID NO 14314046 as cited in SEQ ID NO 59316
atgggggaaagagatgatgggttgggtttgagtctaagcttgggaaatagtcaacaaaaagaaccatctctgaggttgaatcttatgccgttgacaacttcttcttcttcttcttcgtttcaacacatgcacaatcagaataacaatagccatccccagaagattcataacatctcttggactcatctgtttcaatcttctgggattaaacgtacaactgcagagagaaactccgacgccgggtcatttctaagaggtttcaacgtgaacagagctcagtcttcggtggcggtagtggacttggaagaagaagccgccgtcgtctcgtctccaaacagcgccgtttcgagtctgagtggaaataaaagggatcttgcggtggcgagaggaggagatgaaaacgaggcggagagagcttcttgctcacgcggagggggaagcggtggtagcgacgatgaagacggcggaaacggcgacggatcaaggaagaaactacggttatcgaaggatcaagctcttgttctcgaggagacttttaaagaacatagcactcttaatccgaagcaaaagctggctctagcaaaacagttgaatctaagggcaagacaagttgaagtgtggtttcagaaccgtagggcaaggacgaagctgaaacaaacggaggttgattgtgagtatttaaagagatgttgcgataatctgaccgaggagaatcgacggctgcagaaagaagtgtcggagctgagggcgttgaagttgtctccacatctctacatgcacatgactcctcctactactctcaccatgtgcccttcttgcgaacgtgtctcctcctctgccgccactgtgaccgctgctccttccactactactactcctacggtggtggggcggccaagtccacagcgattaactccttggactgctatttctctccagcaaaaatcaggtcgctag

SEQ ID NO: 96128 - protein, 318 aa, Arabidopsis thaliana
  peptide (1)..(318): Ceres Seq. ID no. 12731930
MGERDDGLGLSLSLGNSQQKEPSLRLNLMPLTTSSSSSSFQHMHNQNNNSHPQKIHNISWTHLFQSSGIKRTTAERNSDAGSFLRGFNVNRAQSSVAVVDLEEEAAVVSSPNSAVSSLSGNKRDLAVARGGDENEAERASCSRGGGSGGSDDEDGGNGDGSRKKLRLSKDQALVLEETFKEHSTLNPKQKLALAKQLNLRARQVEVWFQNRRARTKLKQTEVDCEYLKRCCDNLTEENRRLQKEVSELRALKLSPHLYMHMTPPTTLTMCPSCERVSSSAATVTAAPSTTTTPTVVGRPSPQRLTPWTAISLQQKSGR

SEQ ID NO: 96129 - protein, 290 aa, Arabidopsis thaliana
  peptide (1)..(290): Ceres Seq. ID no. 12731931
MPLTTSSSSSSFQHMHNQNNNSHPQKIHNISWTHLFQSSGIKRTTAERNSDAGSFLRGFNVNRAQSSVAVVDLEEEAAVVSSPNSAVSSLSGNKRDLAVARGGDENEAERASCSRGGGSGGSDDEDGGNGDGSRKKLRLSKDQALVLEETFKEHSTLNPKQKLALAKQLNLRARQVEVWFQNRRARTKLKQTEVDCEYLKRCCDNLTEENRRLQKEVSELRALKLSPHLYMHMTPPTTLTMCPSCERVSSSAATVTAAPSTTTTPTVVGRPSPQRLTPWTAISLQQKSGR

SEQ ID NO: 96130 - protein, 276 aa, Arabidopsis thaliana
  peptide (1)..(276): Ceres Seq. ID no. 12731932
MHNQNNNSHPQKIHNISWTHLFQSSGIKRTTAERNSDAGSFLRGFNVNRAQSSVAVVDLEEEAAVVSSPNSAVSSLSGNKRDLAVARGGDENEAERASCSRGGGSGGSDDEDGGNGDGSRKKLRLSKDQALVLEETFKEHSTLNPKQKLALAKQLNLRARQVEVWFQNRRARTKLKQTEVDCEYLKRCCDNLTEENRRLQKEVSELRALKLSPHLYMHMTPPTTLTMCPSCERVSSSAATVTAAPSTTTTPTVVGRPSPQRLTPWTAISLQQKSGR

SEQ ID NO: 96131 - DNA, 471 bp, Arabidopsis thaliana
  misc_feature (1)..(471): Ceres Seq. ID no. 12731953
  misc_feature (1)..(471): Ortholog of  Ceres SEQ ID NO 13598507 as cited in SEQ ID NO 63402
atgtgtcacgcagctctcaagtatcttaagaaagtagcgcctggaagagactcatcaagcggtggcggttcgattattaacataagcgctactttgcactacacagcttctaggtatcaaatacatgtatctgcagccaaggttgcagttgatgctaccacaagaaacttggcattggagtggggaactgactatgatattagagtgaacggaattgctacaggtcctattggaggtacaccgggaatgagtaaacttgtacctgaggagattgaaaacaaaaccagagagtacatgcctctttataaacttggagagaagtgggatatcgcaatggctgcactctacttgagctgtgattctgggaaatatatgagtggactaacaatggtggtagatggaggactgtgtcttagcaaacctcgccatttggccaaagagtggagaagaggtctagggccaggcgaatga

SEQ ID NO: 96132 - protein, 156 aa, Arabidopsis thaliana
  peptide (1)..(156): Ceres Seq. ID no. 12731954
MCHAALKYLKKVAPGRDSSSGGGSIINISATLHYTASRYQIHVSAAKVAVDATTRNLALEWGTDYDIRVNGIATGPIGGTPGMSKLVPEEIENKTREYMPLYKLGEKWDIAMAALYLSCDSGKYMSGLTMVVDGGLCLSKPRHLAKEWRRGLGPGE

SEQ ID NO: 96133 - DNA, 1050 bp, Arabidopsis thaliana
  misc_feature (1)..(1050): Ceres Seq. ID no. 12732148
  misc_feature (1)..(1050): Ortholog of  Ceres SEQ ID NO 12364737 as cited in SEQ ID NO 51089
  misc_feature (1)..(1050): Ortholog of  Ceres SEQ ID NO 13594147 as cited in SEQ ID NO 58975
  misc_feature (1)..(1050): Ortholog of  Ceres SEQ ID NO 13597380 as cited in SEQ ID NO 64054
  misc_feature (1)..(1050): Ortholog of  Ceres SEQ ID NO 12625474 as cited in SEQ ID NO 64169
  misc_feature (1)..(1050): Ortholog of  Ceres SEQ ID NO 13597502 as cited in SEQ ID NO 64681
atggccgaggcaatattcaaagcgttgttgttggtcattgcgaccaccgcatttgcaacgaccgaggcggctcttggacagcgagtgccttgctattttgttttcggagactccgtcttcgacaatggtaacaacaatgtcctgaatacctcggccaaagtcaactattcaccctacggtattgattttgctagaggtcctaccggccgtttcagcaatggtcgtaacattcctgacattatcgctgagctaatgagattcagtgattacattccaccgttcacgggagcatcaccggaacaagctcacatcggaataaactacgcttctggtggaggcggaatacgtgaagaaactagccaacatttgggtgaaataatcagttttaaaaagcaaataaagaatcaccggtcgatgattatgacggctaaggttccagaggagaagctgaataaatgtctatacacaattaatattggaagcaatgattatctcaacaactattttatgccggctccatatatgaccaataagaagttcagtttcgatgaatatgcagattctctcattcgaagttatcgctcttatttgaagtcattgtacgttctaggagcaaggaaggtcgctgtgtttggggtgagtaagctcggatgcacgccgcgtatgattgcctcccatggtggtggtaatggttgtgctgctgaagtgaacaaagctgtagaacctttcaataagaacctcaaagctcttgtctatgaattcaaccgagattttgctgatgctaagttcaccttcgttgatatctttagcggccaaagtcctttcgcgtttttcatgttagggtttagggtaacagacaaaagttgttgtacggtaaaaccaggggaagaactttgtgcgacaaatgaaccggtctgtccagttcaaagacggtatgtgtactgggacaatgtccacagcacagaagcagccaatatggtggttgcaaaggctgcttatgccggactcattacgtctccttacagtctttcttggcttgcaagattatag

SEQ ID NO: 96134 - protein, 349 aa, Arabidopsis thaliana
  peptide (1)..(349): Ceres Seq. ID no. 12732149
MAEAIFKALLLVIATTAFATTEAALGQRVPCYFVFGDSVFDNGNNNVLNTSAKVNYSPYGIDFARGPTGRFSNGRNIPDIIAELMRFSDYIPPFTGASPEQAHIGINYASGGGGIREETSQHLGEIISFKKQIKNHRSMIMTAKVPEEKLNKCLYTINIGSNDYLNNYFMPAPYMTNKKFSFDEYADSLIRSYRSYLKSLYVLGARKVAVFGVSKLGCTPRMIASHGGGNGCAAEVNKAVEPFNKNLKALVYEFNRDFADAKFTFVDIFSGQSPFAFFMLGFRVTDKSCCTVKPGEELCATNEPVCPVQRRYVYWDNVHSTEAANMVVAKAAYAGLITSPYSLSWLARL

SEQ ID NO: 96135 - protein, 265 aa, Arabidopsis thaliana
  peptide (1)..(265): Ceres Seq. ID no. 12732150
MRFSDYIPPFTGASPEQAHIGINYASGGGGIREETSQHLGEIISFKKQIKNHRSMIMTAKVPEEKLNKCLYTINIGSNDYLNNYFMPAPYMTNKKFSFDEYADSLIRSYRSYLKSLYVLGARKVAVFGVSKLGCTPRMIASHGGGNGCAAEVNKAVEPFNKNLKALVYEFNRDFADAKFTFVDIFSGQSPFAFFMLGFRVTDKSCCTVKPGEELCATNEPVCPVQRRYVYWDNVHSTEAANMVVAKAAYAGLITSPYSLSWLARL

SEQ ID NO: 96136 - protein, 211 aa, Arabidopsis thaliana
  peptide (1)..(211): Ceres Seq. ID no. 12732151
MIMTAKVPEEKLNKCLYTINIGSNDYLNNYFMPAPYMTNKKFSFDEYADSLIRSYRSYLKSLYVLGARKVAVFGVSKLGCTPRMIASHGGGNGCAAEVNKAVEPFNKNLKALVYEFNRDFADAKFTFVDIFSGQSPFAFFMLGFRVTDKSCCTVKPGEELCATNEPVCPVQRRYVYWDNVHSTEAANMVVAKAAYAGLITSPYSLSWLARL

SEQ ID NO: 96137 - DNA, 2487 bp, Arabidopsis thaliana
  misc_feature (1)..(2487): Ceres Seq. ID no. 12732156
  misc_feature (1)..(2487): Ortholog of  Ceres SEQ ID NO 13582534 as cited in SEQ ID NO 57409
atggtttcgttcttgaccctcacttccttctttttcatctgcttcttcatccatggctcttccgccgtcgacacaatctccggcgactttactctctccggcgaccagactattgtctcctccgacggaacttacgaaatgggtttctttaaaccaggttcttcttcaaacttctacataggtatgtggtataagcaactctctcaaaccatactatgggtagccaatcgagacaaagcagtttccgacaaaaactcatcagttttcaaaatctccaacggaaacttaatcctactcgacggtaattaccagactccggtttggtccaccggtctcaactccacttcctctgtttctgctcttgaagcggttttgcaagacgacggcaatcttgttctcagaaccggcggctctagcttatcagctaacgtattgtggcaaagctttgatcacccgggagacacgtggcttcccggagtgaagatccggttagataaacgaaccggaaagagccagcgactcacttcgtggaagagtctcgaagatccatcaccaggtttgttctctctcgagctagacgaatccacagcttacaaaattctctggaacggatctaatgagtactggtcaagtggtccttggaaccctcagagcaggatctttgattcggttcccgagatgagactcaattacatctacaacttcagctttttctctaacaccacagactcatacttcacgtactctatctataaccagttgaacgtgtcacgcttcgtcatggacgtgtctggacagatcaaacagttcacttggttagaaggaaacaaggcatggaacttgttctggtctcaacctcgacaacaatgtcaggtctataggtattgtggctcctttggaatttgcagtgacaagtctgagcctttttgccgttgcccacaagggtttaggcctatgtcgcagaaagactgggacttgaaggattactctgcaggctgcgttagaaagactgaactacaatgctctcgtggagacattaaccagttttttcgtcttccgaacatgaaactagctgataattcagaggtattgacaagaactagtcttagtatttgtgcctctgcttgccaaggagattgttcttgtaaggcttatgcatatgatgaaggctcgagcaaatgcttggtttggtctaaagatgtcttgaatctacagcaacttgaagatgaaaacagtgaggggaacatattttatcttagactcgctgcttctgacgttcctaatgttggtgcttcgggtaagagtaacaataaaggtttgatatttggggcggttctaggctcgttaggagtaatagtccttgttctgttggtggtaatcttgatcttaaggtacaggaggaggaagagaatgagaggagagaagggtgatggtacattgagtgcgtttagctatagagaattacagaatgcgacaaagaatttctcggataagttaggaggaggaggttttggttcagtgttcaaaggtgctttaccggattctagtgatatagcggtgaagaggcttgagggtattagccaaggggagaagcagtttaggacggaagtagtgacgataggaacgatccaacacgttaatctagtgaggcttcgcgggttttgctccgaaggaagcaagaaattgttggtttatgattacatgcctaatggttctttggattctcatcttttcttaaaccaagttgaagaaaagatcgtcctcgggtggaaactgcggttccaaatcgcgttagggacagctagaggattagcttatctacacgatgaatgtagagactgtatcattcactgcgatataaaacccgaaaacattttgttagattcacagttttgtcccaaagttgctgatttcggtttggccaagctcgtgggtcgagattttagtagggttttgacgacaatgagaggcacaagagggtatcttgcaccggaatggatatcgggagttgcgataacagcgaaagccgatgtttacagctacgggatgatgttatttgagcttgtttccgggaggagaaacacagagcaatcagagaacgagaaagtcagattctttccaagttgggccgcgaccatactcaccaaagatggagacattcgctcactggttgaccctagactagagggagatgcagtggacatagaggaggtcacgagagcttgtaaagtggcgtgttggtgcatacaagacgaagagagtcataggccagcgatgagtcaagttgttcagattcttgaaggtgtcttggaagtgaatccaccgccttttccaagatcaattcaagctttagtcgtttccgatgaagacgtggtcttctttactgagtcgtcatcttcgtcaagccataattcttcacagaatcacaagcattcttcttcttcttcttcttccaagaaaatgaccaacgataactcttctgcttag

SEQ ID NO: 96138 - protein, 828 aa, Arabidopsis thaliana
  peptide (1)..(828): Ceres Seq. ID no. 12732157
MVSFLTLTSFFFICFFIHGSSAVDTISGDFTLSGDQTIVSSDGTYEMGFFKPGSSSNFYIGMWYKQLSQTILWVANRDKAVSDKNSSVFKISNGNLILLDGNYQTPVWSTGLNSTSSVSALEAVLQDDGNLVLRTGGSSLSANVLWQSFDHPGDTWLPGVKIRLDKRTGKSQRLTSWKSLEDPSPGLFSLELDESTAYKILWNGSNEYWSSGPWNPQSRIFDSVPEMRLNYIYNFSFFSNTTDSYFTYSIYNQLNVSRFVMDVSGQIKQFTWLEGNKAWNLFWSQPRQQCQVYRYCGSFGICSDKSEPFCRCPQGFRPMSQKDWDLKDYSAGCVRKTELQCSRGDINQFFRLPNMKLADNSEVLTRTSLSICASACQGDCSCKAYAYDEGSSKCLVWSKDVLNLQQLEDENSEGNIFYLRLAASDVPNVGASGKSNNKGLIFGAVLGSLGVIVLVLLVVILILRYRRRKRMRGEKGDGTLSAFSYRELQNATKNFSDKLGGGGFGSVFKGALPDSSDIAVKRLEGISQGEKQFRTEVVTIGTIQHVNLVRLRGFCSEGSKKLLVYDYMPNGSLDSHLFLNQVEEKIVLGWKLRFQIALGTARGLAYLHDECRDCIIHCDIKPENILLDSQFCPKVADFGLAKLVGRDFSRVLTTMRGTRGYLAPEWISGVAITAKADVYSYGMMLFELVSGRRNTEQSENEKVRFFPSWAATILTKDGDIRSLVDPRLEGDAVDIEEVTRACKVACWCIQDEESHRPAMSQVVQILEGVLEVNPPPFPRSIQALVVSDEDVVFFTESSSSSSHNSSQNHKHSSSSSSSKKMTNDNSSA

SEQ ID NO: 96139 - protein, 782 aa, Arabidopsis thaliana
  peptide (1)..(782): Ceres Seq. ID no. 12732158
MGFFKPGSSSNFYIGMWYKQLSQTILWVANRDKAVSDKNSSVFKISNGNLILLDGNYQTPVWSTGLNSTSSVSALEAVLQDDGNLVLRTGGSSLSANVLWQSFDHPGDTWLPGVKIRLDKRTGKSQRLTSWKSLEDPSPGLFSLELDESTAYKILWNGSNEYWSSGPWNPQSRIFDSVPEMRLNYIYNFSFFSNTTDSYFTYSIYNQLNVSRFVMDVSGQIKQFTWLEGNKAWNLFWSQPRQQCQVYRYCGSFGICSDKSEPFCRCPQGFRPMSQKDWDLKDYSAGCVRKTELQCSRGDINQFFRLPNMKLADNSEVLTRTSLSICASACQGDCSCKAYAYDEGSSKCLVWSKDVLNLQQLEDENSEGNIFYLRLAASDVPNVGASGKSNNKGLIFGAVLGSLGVIVLVLLVVILILRYRRRKRMRGEKGDGTLSAFSYRELQNATKNFSDKLGGGGFGSVFKGALPDSSDIAVKRLEGISQGEKQFRTEVVTIGTIQHVNLVRLRGFCSEGSKKLLVYDYMPNGSLDSHLFLNQVEEKIVLGWKLRFQIALGTARGLAYLHDECRDCIIHCDIKPENILLDSQFCPKVADFGLAKLVGRDFSRVLTTMRGTRGYLAPEWISGVAITAKADVYSYGMMLFELVSGRRNTEQSENEKVRFFPSWAATILTKDGDIRSLVDPRLEGDAVDIEEVTRACKVACWCIQDEESHRPAMSQVVQILEGVLEVNPPPFPRSIQALVVSDEDVVFFTESSSSSSHNSSQNHKHSSSSSSSKKMTNDNSSA

SEQ ID NO: 96140 - protein, 767 aa, Arabidopsis thaliana
  peptide (1)..(767): Ceres Seq. ID no. 12732159
MWYKQLSQTILWVANRDKAVSDKNSSVFKISNGNLILLDGNYQTPVWSTGLNSTSSVSALEAVLQDDGNLVLRTGGSSLSANVLWQSFDHPGDTWLPGVKIRLDKRTGKSQRLTSWKSLEDPSPGLFSLELDESTAYKILWNGSNEYWSSGPWNPQSRIFDSVPEMRLNYIYNFSFFSNTTDSYFTYSIYNQLNVSRFVMDVSGQIKQFTWLEGNKAWNLFWSQPRQQCQVYRYCGSFGICSDKSEPFCRCPQGFRPMSQKDWDLKDYSAGCVRKTELQCSRGDINQFFRLPNMKLADNSEVLTRTSLSICASACQGDCSCKAYAYDEGSSKCLVWSKDVLNLQQLEDENSEGNIFYLRLAASDVPNVGASGKSNNKGLIFGAVLGSLGVIVLVLLVVILILRYRRRKRMRGEKGDGTLSAFSYRELQNATKNFSDKLGGGGFGSVFKGALPDSSDIAVKRLEGISQGEKQFRTEVVTIGTIQHVNLVRLRGFCSEGSKKLLVYDYMPNGSLDSHLFLNQVEEKIVLGWKLRFQIALGTARGLAYLHDECRDCIIHCDIKPENILLDSQFCPKVADFGLAKLVGRDFSRVLTTMRGTRGYLAPEWISGVAITAKADVYSYGMMLFELVSGRRNTEQSENEKVRFFPSWAATILTKDGDIRSLVDPRLEGDAVDIEEVTRACKVACWCIQDEESHRPAMSQVVQILEGVLEVNPPPFPRSIQALVVSDEDVVFFTESSSSSSHNSSQNHKHSSSSSSSKKMTNDNSSA

SEQ ID NO: 96141 - DNA, 2041 bp, Arabidopsis thaliana
  misc_feature (1)..(2041): Ceres Seq. ID no. 12732164
  misc_feature (1)..(2041): Ortholog of  Ceres SEQ ID NO 13599859 as cited in SEQ ID NO 1323
  misc_feature (1)..(2041): Ortholog of  Ceres SEQ ID NO 13596244 as cited in SEQ ID NO 69307
attcttgcttcttcttcctcgtcttcgtcgtcttctgtgtacagacatacctccattttatagagagcgagaaacagagagatcagaagaagaagaggaggacaaaattatagaaggaaacgtttcaatgcgtgcatagaaatcgattctcatatactctgagagattcatatagaagtttctgttagttcgtagctctaagttcttcgttcgttgagagcttggaaaattgtcgcggagtctgtttttgttctcctagatctttgggtggaaacaaacaagctcgcgaagacgagaactctcgccgtatttgggatctggttccgtttagaagattttccaggtttcgactggttctagctgctaagtggaatcgactcattttagctgaagaaacttgttgggagtgggttaaagggatatttgaggctgagttgttgcagtatgcgataaaggtttttatgagatgaaggcaattaagggatggcgtctaggcaaaattaattatatgcagtctttgcctggggctcgccatcgtgctcctacaaggaagcctatatggatcattgcagtgctttcactgatagcaatgtttgtaattggtgcttacatgttccctcatcacagcaaagcggcatgttatatgttttcatctaaagggtgcaaggggctaactgattggcttccaccatcactgagggaatattcggatgacgagattgcagctcgtgtagttattagtgaaattttgagctcccctcgtgttataaaaaagagttctaaaattgcatttatgttcttaactcctggtacattgccttttgaaaagctatgggacctctttttccagggtcatgaggggaaattctctgtttatatacatgcatcaaaggatactccggttcacaccagtcgttactttcttaaccgtgagattcgaagtgacgaggtggtctggggtagaatatcaatgattgacgctgaaagacgtttgttgaccaatgctcttagagatcctgaaaatcagcaatttgtattactctctgatagttgtgtgccacttcgaagttttgaatacatgtacaactatatgatgcacagcaatgtcagctatgttgactgctttgatgatcctggtccacatggaacgggcaggcatatggaccacatgttgccggaaattccaagggaagattttcgaaagggtgcacagtggttctctatgaagcgtcagcatgctgtagtaactgtggcagataatctttactactctaaattccgggactactgtgggccaggtgtagagggcaacaagaactgcattgcggatgaacactatctgccaacattcttctatatgcttgatcctactggcattgctaactggactgtgacatatgttgattggtctgagagaaagtggcatccaagaaaatacatgcctgaagatatcacgctcgagttaattaagaacatctcgtccattgacgcagtttcacgcgtaacaagtgagaaaaacggagtagtatcctggacgcattgcatgtggaatggaatcaaaagaccttgctatctctttggaaggaaatttcatgctgatactctcgataaactgatggaactcttcccaaactacacaagcatcgtgtagggctttcgagcaattttgattgattgatgaaatgcaatgccaaggaggtattcttttgactcggattctttggccaacgttcagttatacccatgaatcaaactaaaacttttaggcaatatcatggaacccctagaagctgtatctcactgtaaagtccttttacgagcagagaaaatccgaaatcgtgtgatctttgagaaagcttaggaagtatttggggttttgtcattttggttggggacgttgggacatttttaactcatctgttgtcactacatctcattgttatttatagaattttcagagtgcttttttgtttttctctctttttgttggagcactttgttgaatatgaaatgaaaacaagatatgaggcttatacagttt

SEQ ID NO: 96142 - protein, 394 aa, Arabidopsis thaliana
  peptide (1)..(394): Ceres Seq. ID no. 12732165
MKAIKGWRLGKINYMQSLPGARHRAPTRKPIWIIAVLSLIAMFVIGAYMFPHHSKAACYMFSSKGCKGLTDWLPPSLREYSDDEIAARVVISEILSSPRVIKKSSKIAFMFLTPGTLPFEKLWDLFFQGHEGKFSVYIHASKDTPVHTSRYFLNREIRSDEVVWGRISMIDAERRLLTNALRDPENQQFVLLSDSCVPLRSFEYMYNYMMHSNVSYVDCFDDPGPHGTGRHMDHMLPEIPREDFRKGAQWFSMKRQHAVVTVADNLYYSKFRDYCGPGVEGNKNCIADEHYLPTFFYMLDPTGIANWTVTYVDWSERKWHPRKYMPEDITLELIKNISSIDAVSRVTSEKNGVVSWTHCMWNGIKRPCYLFGRKFHADTLDKLMELFPNYTSIV

SEQ ID NO: 96143 - protein, 380 aa, Arabidopsis thaliana
  peptide (1)..(380): Ceres Seq. ID no. 12732166
MQSLPGARHRAPTRKPIWIIAVLSLIAMFVIGAYMFPHHSKAACYMFSSKGCKGLTDWLPPSLREYSDDEIAARVVISEILSSPRVIKKSSKIAFMFLTPGTLPFEKLWDLFFQGHEGKFSVYIHASKDTPVHTSRYFLNREIRSDEVVWGRISMIDAERRLLTNALRDPENQQFVLLSDSCVPLRSFEYMYNYMMHSNVSYVDCFDDPGPHGTGRHMDHMLPEIPREDFRKGAQWFSMKRQHAVVTVADNLYYSKFRDYCGPGVEGNKNCIADEHYLPTFFYMLDPTGIANWTVTYVDWSERKWHPRKYMPEDITLELIKNISSIDAVSRVTSEKNGVVSWTHCMWNGIKRPCYLFGRKFHADTLDKLMELFPNYTSIV

SEQ ID NO: 96144 - protein, 353 aa, Arabidopsis thaliana
  peptide (1)..(353): Ceres Seq. ID no. 12732167
MFVIGAYMFPHHSKAACYMFSSKGCKGLTDWLPPSLREYSDDEIAARVVISEILSSPRVIKKSSKIAFMFLTPGTLPFEKLWDLFFQGHEGKFSVYIHASKDTPVHTSRYFLNREIRSDEVVWGRISMIDAERRLLTNALRDPENQQFVLLSDSCVPLRSFEYMYNYMMHSNVSYVDCFDDPGPHGTGRHMDHMLPEIPREDFRKGAQWFSMKRQHAVVTVADNLYYSKFRDYCGPGVEGNKNCIADEHYLPTFFYMLDPTGIANWTVTYVDWSERKWHPRKYMPEDITLELIKNISSIDAVSRVTSEKNGVVSWTHCMWNGIKRPCYLFGRKFHADTLDKLMELFPNYTSIV

SEQ ID NO: 96145 - DNA, 2700 bp, Arabidopsis thaliana
  misc_feature (1)..(2700): Ceres Seq. ID no. 12732168
  misc_feature (1)..(2700): Ortholog of  Ceres SEQ ID NO 13584744 as cited in SEQ ID NO 69137
taaaacagttgctcattgctctagcccagagaaagcagctcaattaagtaaatggcgatgttaaaatctctttcatcgattttattcacaagctttgctcttctgttctttcttgttcatgctcaagatcaatctggtttcataagtatagattgcgggataccggatgattctagctacaacgatgagactacaggtataaagtatgtttcggattcggcgtttgttgattcaggaacaacaaagagaattgcagctcagtttcaatcaagtggttttgatagacacttgttgaacgtgagaagtttccctcaaagcaagagaagctgttacgatgttccgacgccgagaggcaaaggttttaagtatctaatcagaactcgtttcatgtacgggaactatgatgatcttggaagagtacccgagttcgatctctatctaggagtaaacttttgggactctgttaaactcgacgatgcaacaactatactcaacaaagagataatcaccattccacttttagacaatgttcaagtgtgtgttgttgataagaacgcaggaactccatttttgtctgtcttggagatacggctcttgttgaacactacttatgagactccttacgatgcacttaccctccttcggagattagattacagcaaaacgggaaaacttccatcgaggtacaaagatgacatatatgaccgtatatggacaccgcgtatagtgagttcagaatacaagatattaaatacatctctcactgtcgatcaatttcttaacaatggctaccaaccggcttctactgtcatgagcactgcagaaacagcgcgaaacgagagcctctacctaacgcttagtttcagaccgcccgaccctaacgcaaagttttatgtatacatgcactttgctgaaattgaagtactgaaaagcaaccagacgagagaattcagcatctggctaaatgaggatgtaatctctccttcgtttaagcttcggtacttgcttaccgacacattcgttacaccggatcccgtgagcggaattaccattaacttctctcttcttcaaccacctggtgaatttgtacttccaccgatcattaacgcccttgaggtctatcaagtcaatgagttccttcagatcccaactcatccacaggatgttgatgccatgaggaagattaaagccacgtatagagtgaagaagaactggcaaggagatccttgtgttcccgtagattattcttgggaaggtattgactgtatccaaagtgataacactactaatcctagagtcgtttcactaaatatatcttttagtgaattaagaggccagatagatccagccttctccaaccttacatctataagaaaattagatttatccggtaatactttaacaggagaaatacctgctttcctcgctaacttaccaaacttgaccgaattaaacgttgaaggaaacaagttaacgggcatagttccacaaagattgcatgaaagatcaaagaatggatctctttccttaagatttggtagaaatccggacctttgtctctctgattcctgttcaaacacaaagaagaagaacaagaatggatacatcattccattagtagtcgtaggaatcatcgtcgttcttttgacggctttagctttgttccggcgtttcaagaaaaaacaacaaagaggtacacttggtgagaggaatgggccgttgaaaactgcaaagcgatactttaagtactcagaagttgtgaatatcacaaataactttgagagagttattggcaaaggaggttttggtaaagtataccatggtgtcataaatggagaacaagttgctgtcaaggtactctctgaagaatcagctcaaggctacaaagagtttcgagcagaggttgaccttctcatgagagttcatcacacgaacctgacttctcttgttggatattgcaacgaaataaaccacatggtgcttatctatgagtatatggctaatgagaacttaggagactatttggcaggtaaaaggtcatttatcttgagctgggaagagaggttgaagatatcattagatgcagcgcaaggactagagtatcttcacaatggttgtaagcctcctatagttcacagagatgtgaagccaacaaacatcttactaaacgagaagctccaagcgaagatggcggacttcgggttatctagaagcttctctgttgaaggaagcggtcagatttcaacagttgtcgctggatccatcggttaccttgaccccgagtactattcgactcgccaaatgaacgaaaagagtgatgtttatagtcttggggttgttcttcttgaagtgattacaggccaacctgctattgcaagctcaaaaacagagaaggtgcatataagtgatcatgtcaggtcaatattagccaacggagacattagaggaatcgtggatcagcgtctaagagagagatatgacgttggctcggcttggaaaatgtcagagatcgctcttgcttgtaccgagcacacttctgcgcagaggccaacgatgagtcaggtcgttatggagctgaaacagattgtttatggcatagtgactgatcaggaaaactacgatgactcgacgaaaatgcttacagtgaatctagacaccgagatggttcctcgagcaaggtagtgaatttcttcagagtag

SEQ ID NO: 96146 - protein, 876 aa, Arabidopsis thaliana
  peptide (1)..(876): Ceres Seq. ID no. 12732169
MAMLKSLSSILFTSFALLFFLVHAQDQSGFISIDCGIPDDSSYNDETTGIKYVSDSAFVDSGTTKRIAAQFQSSGFDRHLLNVRSFPQSKRSCYDVPTPRGKGFKYLIRTRFMYGNYDDLGRVPEFDLYLGVNFWDSVKLDDATTILNKEIITIPLLDNVQVCVVDKNAGTPFLSVLEIRLLLNTTYETPYDALTLLRRLDYSKTGKLPSRYKDDIYDRIWTPRIVSSEYKILNTSLTVDQFLNNGYQPASTVMSTAETARNESLYLTLSFRPPDPNAKFYVYMHFAEIEVLKSNQTREFSIWLNEDVISPSFKLRYLLTDTFVTPDPVSGITINFSLLQPPGEFVLPPIINALEVYQVNEFLQIPTHPQDVDAMRKIKATYRVKKNWQGDPCVPVDYSWEGIDCIQSDNTTNPRVVSLNISFSELRGQIDPAFSNLTSIRKLDLSGNTLTGEIPAFLANLPNLTELNVEGNKLTGIVPQRLHERSKNGSLSLRFGRNPDLCLSDSCSNTKKKNKNGYIIPLVVVGIIVVLLTALALFRRFKKKQQRGTLGERNGPLKTAKRYFKYSEVVNITNNFERVIGKGGFGKVYHGVINGEQVAVKVLSEESAQGYKEFRAEVDLLMRVHHTNLTSLVGYCNEINHMVLIYEYMANENLGDYLAGKRSFILSWEERLKISLDAAQGLEYLHNGCKPPIVHRDVKPTNILLNEKLQAKMADFGLSRSFSVEGSGQISTVVAGSIGYLDPEYYSTRQMNEKSDVYSLGVVLLEVITGQPAIASSKTEKVHISDHVRSILANGDIRGIVDQRLRERYDVGSAWKMSEIALACTEHTSAQRPTMSQVVMELKQIVYGIVTDQENYDDSTKMLTVNLDTEMVPRAR

SEQ ID NO: 96147 - protein, 874 aa, Arabidopsis thaliana
  peptide (1)..(874): Ceres Seq. ID no. 12732170
MLKSLSSILFTSFALLFFLVHAQDQSGFISIDCGIPDDSSYNDETTGIKYVSDSAFVDSGTTKRIAAQFQSSGFDRHLLNVRSFPQSKRSCYDVPTPRGKGFKYLIRTRFMYGNYDDLGRVPEFDLYLGVNFWDSVKLDDATTILNKEIITIPLLDNVQVCVVDKNAGTPFLSVLEIRLLLNTTYETPYDALTLLRRLDYSKTGKLPSRYKDDIYDRIWTPRIVSSEYKILNTSLTVDQFLNNGYQPASTVMSTAETARNESLYLTLSFRPPDPNAKFYVYMHFAEIEVLKSNQTREFSIWLNEDVISPSFKLRYLLTDTFVTPDPVSGITINFSLLQPPGEFVLPPIINALEVYQVNEFLQIPTHPQDVDAMRKIKATYRVKKNWQGDPCVPVDYSWEGIDCIQSDNTTNPRVVSLNISFSELRGQIDPAFSNLTSIRKLDLSGNTLTGEIPAFLANLPNLTELNVEGNKLTGIVPQRLHERSKNGSLSLRFGRNPDLCLSDSCSNTKKKNKNGYIIPLVVVGIIVVLLTALALFRRFKKKQQRGTLGERNGPLKTAKRYFKYSEVVNITNNFERVIGKGGFGKVYHGVINGEQVAVKVLSEESAQGYKEFRAEVDLLMRVHHTNLTSLVGYCNEINHMVLIYEYMANENLGDYLAGKRSFILSWEERLKISLDAAQGLEYLHNGCKPPIVHRDVKPTNILLNEKLQAKMADFGLSRSFSVEGSGQISTVVAGSIGYLDPEYYSTRQMNEKSDVYSLGVVLLEVITGQPAIASSKTEKVHISDHVRSILANGDIRGIVDQRLRERYDVGSAWKMSEIALACTEHTSAQRPTMSQVVMELKQIVYGIVTDQENYDDSTKMLTVNLDTEMVPRAR

SEQ ID NO: 96148 - protein, 764 aa, Arabidopsis thaliana
  peptide (1)..(764): Ceres Seq. ID no. 12732171
MYGNYDDLGRVPEFDLYLGVNFWDSVKLDDATTILNKEIITIPLLDNVQVCVVDKNAGTPFLSVLEIRLLLNTTYETPYDALTLLRRLDYSKTGKLPSRYKDDIYDRIWTPRIVSSEYKILNTSLTVDQFLNNGYQPASTVMSTAETARNESLYLTLSFRPPDPNAKFYVYMHFAEIEVLKSNQTREFSIWLNEDVISPSFKLRYLLTDTFVTPDPVSGITINFSLLQPPGEFVLPPIINALEVYQVNEFLQIPTHPQDVDAMRKIKATYRVKKNWQGDPCVPVDYSWEGIDCIQSDNTTNPRVVSLNISFSELRGQIDPAFSNLTSIRKLDLSGNTLTGEIPAFLANLPNLTELNVEGNKLTGIVPQRLHERSKNGSLSLRFGRNPDLCLSDSCSNTKKKNKNGYIIPLVVVGIIVVLLTALALFRRFKKKQQRGTLGERNGPLKTAKRYFKYSEVVNITNNFERVIGKGGFGKVYHGVINGEQVAVKVLSEESAQGYKEFRAEVDLLMRVHHTNLTSLVGYCNEINHMVLIYEYMANENLGDYLAGKRSFILSWEERLKISLDAAQGLEYLHNGCKPPIVHRDVKPTNILLNEKLQAKMADFGLSRSFSVEGSGQISTVVAGSIGYLDPEYYSTRQMNEKSDVYSLGVVLLEVITGQPAIASSKTEKVHISDHVRSILANGDIRGIVDQRLRERYDVGSAWKMSEIALACTEHTSAQRPTMSQVVMELKQIVYGIVTDQENYDDSTKMLTVNLDTEMVPRAR

SEQ ID NO: 96149 - DNA, 2646 bp, Arabidopsis thaliana
  misc_feature (1)..(2646): Ceres Seq. ID no. 12732172
  misc_feature (1)..(2646): Ortholog of  Ceres SEQ ID NO 15226720 as cited in SEQ ID NO 58707
  misc_feature (1)..(2646): Ortholog of  Ceres SEQ ID NO 13584744 as cited in SEQ ID NO 69137
atggtgcattacaactttctctcgctgattatatttgcatgcttcttcgctgtttttgttcttcttgttcgtgctcaagaccaatcaggttttgtcagtatagattgtggtatacctgaggattcaagctataatgatgaaacaacagacataaagtatgtttcagatgctgcgtttgttgagtctgggacaattcatagcatagatcctgagtttcaaacaagttctcttgagaagcagtttcaaaacgttaggagcttccctgaaggcaacagaaactgttacgatgtgaagcctccgcagggaaaaggcttcaagtatttgataagaacccgtttcatgtatggtaactacgataatctagggaaagcaccggacttcgatctttatcttgggttcaatatttgggattctgttacaatagataacgcaactacgatagttaccaaagagatcatccacactcttcgctcagaccatgttcatgtgtgtcttgttgataaaaacagaggaactccgttcctgtctgcgttagaaatcaggctcctgaagagtaatacatacgagactccttatgattcacttattctgtttaaaagatgggatcttgggggactcggtgctcttcccgtcaggtacaaagatgatgtttttgaccggatatggatacctctaaggtttccaaagtataccatcttcaatgcatcgctcacaatagattcgaataacaacgagggattccaacccgctcgctttgttatgaacactgcaacttcacctgaggatttaagccaagacataatcttttcttgggaaccaaaggatcctacttggaagtattttgtgtatatgcactttgcagaagttgtggagctgccaagtaatgagacaagagaatttaaggtgttattaaacgaaaaggaaatcaacatgagctcctttagcccgcgatacttgtatacagacacgctttttgttcagaaccccgtgagcggaccaaaactcgagtttcgtcttcaacaaactcctagatctacccttccacccatcattaacgccattgaaacatatcgtgtcaacgagtttctacagtcacctactgatcaacaagatgttgatgcaattatgagaatcaagtccaagtatggagtgaagaagagctggcttggggacccttgtgctccagtaaaatacccttggaaggatattaactgcagctatgtcgataatgagtctcccagaattatttctgtaaatttatcctcgagtggcttgactggagagattgatgcagcgttctcaaaccttacattgttacatatattagacttatcaaacaacagtttaacaggaaaaatacctgatttcctcggtaatctacataatttgacagagttaaacttggaaggaaacaagttatcgggtgctattccggttaaactattggagagatcaaacaaaaaactgattttgctaagaattgatgggaatccggacctctgcgtgtctgcttcatgtcaaatttcggatgagaagacaaaaaagaatgtatacatcattccattagtagcatctgtcgtgggagtgctaggtcttgtactagctatagctttgtttttgttgtacaagaagcgacacagaagaggcggctctggtggtgtcagggctgggccattggatacaactaagcgatactacaaatactcggaagttgtgaaagttacaaacaactttgagagagttcttggacaaggaggttttggaaaagtatatcatggtgtcttaaatgatgaccaagtcgctgtcaagattctgtctgaatcatcagctcaaggttacaaagagttcagagcagaggttgaacttctcctgagagtccatcacaagaacctaaccgctcttatcggatactgccacgaaggcaagaagatggcgcttatctatgagtttatggctaatggaaccttaggagattacttgtcaggggaaaaatcttatgtcttgagctgggaagagaggttacaaatatcactagacgcggcacaagggcttgagtatcttcacaatggctgcaagcctcccattgtacaaagagatgtgaagccggctaatattctaatcaacgagaagctccaggccaagattgctgactttggattatctagaagtgtcgcactagacggtaataaccaggatacaaccgctgttgctggaaccatcggttatctcgatcccgagtaccatttgacgcaaaaattaagcgagaagagtgatatttacagcttcggggtggttcttttagaggttgtctcaggccaaccggtgattgcacgttcaagaacaacagcagagaacatacacataactgaccgggtcgacttaatgctgtcgacaggagatatcagaggcattgtggatccaaagctaggagagaggtttgatgctggttcggcatggaagatcactgaagtagcaatggcttgtgcatcttctagttctaagaatagaccgacgatgagtcatgtagtggctgagctaaaggagagtgtaagcagagcaagagccggtggtggttctggcgccagtagtgtcacggatccagctatgacgaattttgattcgggaatgtttcctcaagcaaggtaa

SEQ ID NO: 96150 - protein, 881 aa, Arabidopsis thaliana
  peptide (1)..(881): Ceres Seq. ID no. 12732173
MVHYNFLSLIIFACFFAVFVLLVRAQDQSGFVSIDCGIPEDSSYNDETTDIKYVSDAAFVESGTIHSIDPEFQTSSLEKQFQNVRSFPEGNRNCYDVKPPQGKGFKYLIRTRFMYGNYDNLGKAPDFDLYLGFNIWDSVTIDNATTIVTKEIIHTLRSDHVHVCLVDKNRGTPFLSALEIRLLKSNTYETPYDSLILFKRWDLGGLGALPVRYKDDVFDRIWIPLRFPKYTIFNASLTIDSNNNEGFQPARFVMNTATSPEDLSQDIIFSWEPKDPTWKYFVYMHFAEVVELPSNETREFKVLLNEKEINMSSFSPRYLYTDTLFVQNPVSGPKLEFRLQQTPRSTLPPIINAIETYRVNEFLQSPTDQQDVDAIMRIKSKYGVKKSWLGDPCAPVKYPWKDINCSYVDNESPRIISVNLSSSGLTGEIDAAFSNLTLLHILDLSNNSLTGKIPDFLGNLHNLTELNLEGNKLSGAIPVKLLERSNKKLILLRIDGNPDLCVSASCQISDEKTKKNVYIIPLVASVVGVLGLVLAIALFLLYKKRHRRGGSGGVRAGPLDTTKRYYKYSEVVKVTNNFERVLGQGGFGKVYHGVLNDDQVAVKILSESSAQGYKEFRAEVELLLRVHHKNLTALIGYCHEGKKMALIYEFMANGTLGDYLSGEKSYVLSWEERLQISLDAAQGLEYLHNGCKPPIVQRDVKPANILINEKLQAKIADFGLSRSVALDGNNQDTTAVAGTIGYLDPEYHLTQKLSEKSDIYSFGVVLLEVVSGQPVIARSRTTAENIHITDRVDLMLSTGDIRGIVDPKLGERFDAGSAWKITEVAMACASSSSKNRPTMSHVVAELKESVSRARAGGGSGASSVTDPAMTNFDSGMFPQAR

SEQ ID NO: 96151 - protein, 768 aa, Arabidopsis thaliana
  peptide (1)..(768): Ceres Seq. ID no. 12732174
MYGNYDNLGKAPDFDLYLGFNIWDSVTIDNATTIVTKEIIHTLRSDHVHVCLVDKNRGTPFLSALEIRLLKSNTYETPYDSLILFKRWDLGGLGALPVRYKDDVFDRIWIPLRFPKYTIFNASLTIDSNNNEGFQPARFVMNTATSPEDLSQDIIFSWEPKDPTWKYFVYMHFAEVVELPSNETREFKVLLNEKEINMSSFSPRYLYTDTLFVQNPVSGPKLEFRLQQTPRSTLPPIINAIETYRVNEFLQSPTDQQDVDAIMRIKSKYGVKKSWLGDPCAPVKYPWKDINCSYVDNESPRIISVNLSSSGLTGEIDAAFSNLTLLHILDLSNNSLTGKIPDFLGNLHNLTELNLEGNKLSGAIPVKLLERSNKKLILLRIDGNPDLCVSASCQISDEKTKKNVYIIPLVASVVGVLGLVLAIALFLLYKKRHRRGGSGGVRAGPLDTTKRYYKYSEVVKVTNNFERVLGQGGFGKVYHGVLNDDQVAVKILSESSAQGYKEFRAEVELLLRVHHKNLTALIGYCHEGKKMALIYEFMANGTLGDYLSGEKSYVLSWEERLQISLDAAQGLEYLHNGCKPPIVQRDVKPANILINEKLQAKIADFGLSRSVALDGNNQDTTAVAGTIGYLDPEYHLTQKLSEKSDIYSFGVVLLEVVSGQPVIARSRTTAENIHITDRVDLMLSTGDIRGIVDPKLGERFDAGSAWKITEVAMACASSSSKNRPTMSHVVAELKESVSRARAGGGSGASSVTDPAMTNFDSGMFPQAR

SEQ ID NO: 96152 - protein, 628 aa, Arabidopsis thaliana
  peptide (1)..(628): Ceres Seq. ID no. 12732175
MNTATSPEDLSQDIIFSWEPKDPTWKYFVYMHFAEVVELPSNETREFKVLLNEKEINMSSFSPRYLYTDTLFVQNPVSGPKLEFRLQQTPRSTLPPIINAIETYRVNEFLQSPTDQQDVDAIMRIKSKYGVKKSWLGDPCAPVKYPWKDINCSYVDNESPRIISVNLSSSGLTGEIDAAFSNLTLLHILDLSNNSLTGKIPDFLGNLHNLTELNLEGNKLSGAIPVKLLERSNKKLILLRIDGNPDLCVSASCQISDEKTKKNVYIIPLVASVVGVLGLVLAIALFLLYKKRHRRGGSGGVRAGPLDTTKRYYKYSEVVKVTNNFERVLGQGGFGKVYHGVLNDDQVAVKILSESSAQGYKEFRAEVELLLRVHHKNLTALIGYCHEGKKMALIYEFMANGTLGDYLSGEKSYVLSWEERLQISLDAAQGLEYLHNGCKPPIVQRDVKPANILINEKLQAKIADFGLSRSVALDGNNQDTTAVAGTIGYLDPEYHLTQKLSEKSDIYSFGVVLLEVVSGQPVIARSRTTAENIHITDRVDLMLSTGDIRGIVDPKLGERFDAGSAWKITEVAMACASSSSKNRPTMSHVVAELKESVSRARAGGGSGASSVTDPAMTNFDSGMFPQAR

SEQ ID NO: 96153 - DNA, 642 bp, Arabidopsis thaliana
  misc_feature (1)..(642): Ceres Seq. ID no. 12732179
  misc_feature (1)..(642): Ortholog of  Ceres SEQ ID NO 13597334 as cited in SEQ ID NO 64244
atggttcatccaaatggacaaacaaacaggaccatagtactcaacttgaaaccattgaagctggtgtgcactgtactttataatgatactaaccctcgatactttgtctactggactaatgattcatatacacaacatggttgctataacaatctttgctccggctttgttgttgtcaaccaagcatttgctctaggcgcggccgttcctgaagtttctatccgtgatggtctacaatacgaaattttcacaagtatatggaaggatcgtagttcaggaaattggtggttgaaatttggtactcatttaattgttggatattggccttcttcattgttcaatcgcttaggagatgctgcgagccaagttcattggggaggcgaaatagtaaacgtaaaggagaacaaccaacacacgtcaacacaaatgggaagtgggtcgtttgcaataaatggatttagaaaggctagttattttaggaatattttagtacttgatgaaaacaatactacgaagcaacctgtaggtgcttctacatctgagacggaaggaagttgttatgacatcaggtatcgcactgatcaagcatggggaagtttcttttactatggtggtcctggtcgaagtcctttttgtgcttga

SEQ ID NO: 96154 - protein, 213 aa, Arabidopsis thaliana
  peptide (1)..(213): Ceres Seq. ID no. 12732180
MVHPNGQTNRTIVLNLKPLKLVCTVLYNDTNPRYFVYWTNDSYTQHGCYNNLCSGFVVVNQAFALGAAVPEVSIRDGLQYEIFTSIWKDRSSGNWWLKFGTHLIVGYWPSSLFNRLGDAASQVHWGGEIVNVKENNQHTSTQMGSGSFAINGFRKASYFRNILVLDENNTTKQPVGASTSETEGSCYDIRYRTDQAWGSFFYYGGPGRSPFCA

SEQ ID NO: 96155 - DNA, 1557 bp, Arabidopsis thaliana
  misc_feature (1)..(1557): Ceres Seq. ID no. 12732193
  misc_feature (1)..(1557): Ortholog of  Ceres SEQ ID NO 14302734 as cited in SEQ ID NO 66748
ttttagttatttatatatatattctctgtctcgtatttgtccccaaaaatctagggttttaaggtttcttatccttcctcttcctccgccagattcttttcttgcgaagatgagcaacgacaaggacagcatgaacatgtccgatctctccaccgctcttaacgaggaggatcgtgccgggcttgttaatgctcttaagaacaagttgcagaatttggctggacaacactctgatgtccttgaaaacttgactccaccagtcaggaagcgtgtcgagtttctaagagagattcagaaccaatatgatgagatggaagcaaaattctttgaggagagagcagctcttgaagctaagtatcaaaagttatatcagcctttatataccaagcgatatgagattgtgaatggtgtggtcgaagttgaaggtgcagctgaagaagtaaaatccgaacaaggagaagataaatcagctgaagagaaaggagtaccagatttctggcttattgcattgaagaacaatgaaattactgcggaagagataactgagcgagatgaaggggctctcaagtatctcaaagatatcaagtggagtagggttgaagaaccaaaagggttcaagcttgagtttttctttgatcagaatccttacttcaagaacactgtcttgaccaagacatatcacatgattgatgaagatgagcctatccttgagaaggccctcgggacggagattgagtggtatcctggaaagtgtttgacacagaagattctaaaaaagaagccaaagaaaggatccaaaaacacaaagccgatcactaagactgaggactgtgagagtttcttcaactttttcagtccacctcaagttcctgacgatgatgaggatcttgatgatgacatggctgatgaactccaaggacaaatggagcatgattatgatatcggttcaacaatcaaagagaaaatcatctcgcatgctgtgtcatggttcactggtgaagctgttgaggcagatgaccttgatattgaggacgacgatgatgagattgatgaagatgatgatgaagaggacgaggaagatgatgaggatgacgaggaggaggatgatgaggatgatgacgaggaggaagaagcagatcaaggaaagaagagcaaaaagaagtcatcagctgggcacaagaaggctggaagaagtcaacttgcggaaggtcaagcaggtgagaggccaccggaatgtaagcagcagtgaagaagtgaagaatcttggcttagttatgatgaagaagaagagtgaagagtgtctttgagccgaggttgtgtttctttaatttgcagagtcatggtccggtttattatatatcagttttgggtgattggtttgctatttaaaaaaaaaaaatgggttctttggtttggtttgtgtctcttgatttttccttttgtaatgatcttatgaatttgtttcgagttaatgtcgttctctggtcagatttcgaattcaattctatttatcctccctcgttaatgagagaatttgtgagacaatctagtttactt

SEQ ID NO: 96156 - protein, 415 aa, Arabidopsis thaliana; identical to SEQ ID NO: 22227
  peptide (1)..(415): Ceres Seq. ID no. 12732194

SEQ ID NO: 96157 - protein, 379 aa, Arabidopsis thaliana; identical to SEQ ID NO: 22228
  peptide (1)..(379): Ceres Seq. ID no. 12732195

SEQ ID NO: 96158 - protein, 372 aa, Arabidopsis thaliana; identical to SEQ ID NO: 22229
  peptide (1)..(372): Ceres Seq. ID no. 12732196

SEQ ID NO: 96159 - DNA, 999 bp, Arabidopsis thaliana
  misc_feature (1)..(999): Ceres Seq. ID no. 12732197
  misc_feature (1)..(999): Ortholog of  Ceres SEQ ID NO 14312166 as cited in SEQ ID NO 59253
atgaagccaacgaagatcgtgattccgaaccgccgcaacgagaagctcgtgggtctgcttcacgaaactggatcaaaagaagttgtggtcttatgccatggctttagatcggacaagaccaacaagattctcaaaaacgtggctacagctttggagaaagaaaaaatcagctcttttcgtttcgatttctctggtaacggagatagtgaaggaactttctattatggtaacttcaacagtgaagcagaggatgatctgcattacgttattcaacacttgtcctcctctaacatcatgaaccgtctagttcctgtcattcttggtcatagtaaaggtggtgatgtcgttcttctctatgcttccaagtttcccgattatatccgcaatgtcgtcaatatctctggacgttttgatcttaagaatgatgtgcgtctcggagatggttatatagaaaagattaaggaacaggggtttattgatgctacagagggcaaatcttgttttcgtgttactcaagagtctttaatggataggttaaacactgatatgcatcaagcttgtctcaatattgataaacaatgcaaagttttgacagttcatggttcggatgataccgtggtacctggggaagatgctaaggagtttgcaaaggttataccgaatcataagctggagattgtggaaggagctaatcatggttacaccaaacatcagaaggaattggtttccatagcggtggagtttaccaagactgcgattgttgaacaacacaatttgttagttgtctttgggagatggctcatcatcgtcatgatagttgttacattctacatgagtgttttcgatcatttaatcaaagtttatccactacttgtaattttcaaattggagaatgttatgagcagaattcaacaattaatctacttgatttttttttacttgttaaggattaaactattattaggcttgtggcttctgttactggagaggagaatgtaa

SEQ ID NO: 96160 - protein, 332 aa, Arabidopsis thaliana
  peptide (1)..(332): Ceres Seq. ID no. 12732198
MKPTKIVIPNRRNEKLVGLLHETGSKEVVVLCHGFRSDKTNKILKNVATALEKEKISSFRFDFSGNGDSEGTFYYGNFNSEAEDDLHYVIQHLSSSNIMNRLVPVILGHSKGGDVVLLYASKFPDYIRNVVNISGRFDLKNDVRLGDGYIEKIKEQGFIDATEGKSCFRVTQESLMDRLNTDMHQACLNIDKQCKVLTVHGSDDTVVPGEDAKEFAKVIPNHKLEIVEGANHGYTKHQKELVSIAVEFTKTAIVEQHNLLVVFGRWLIIVMIVVTFYMSVFDHLIKVYPLLVIFKLENVMSRIQQLIYLIFFYLLRIKLLLGLWLLLLERRM

SEQ ID NO: 96161 - protein, 234 aa, Arabidopsis thaliana
  peptide (1)..(234): Ceres Seq. ID no. 12732199
MNRLVPVILGHSKGGDVVLLYASKFPDYIRNVVNISGRFDLKNDVRLGDGYIEKIKEQGFIDATEGKSCFRVTQESLMDRLNTDMHQACLNIDKQCKVLTVHGSDDTVVPGEDAKEFAKVIPNHKLEIVEGANHGYTKHQKELVSIAVEFTKTAIVEQHNLLVVFGRWLIIVMIVVTFYMSVFDHLIKVYPLLVIFKLENVMSRIQQLIYLIFFYLLRIKLLLGLWLLLLERRM

SEQ ID NO: 96162 - DNA, 1428 bp, Arabidopsis thaliana
  misc_feature (1)..(1428): Ceres Seq. ID no. 12732204
  misc_feature (1)..(1428): Ortholog of  Ceres SEQ ID NO 13655915 as cited in SEQ ID NO 65188
gacgacggccattatgataaatgacggcggagctaaaccggagacgctgcttagggttgcagaaatcggtggaagaggaaggagtttggtggcggcacagtctcttcgtgctggacaagttatcctcagagagtctcctctccttctctactctgcttttccatttctctcctcctctgtttctccttactgcgaccattgtttccgtttgttagcttcatcggcgcatcagaaatgtcaatcttgctctctcgtctccttttgtagccctaattgcttcgcctctcatactccttggctctgcgaatctcttcgccggcttcaccaatcatcctcctctgcattctccgatcaaccttctgatcgtcaagtccaagctcgtttcctcctctctgcttacaatctcgccgctgcttctccttctgatttccagattttgctctctctccaaggtagtggcagcagcaatggagatccttcttgttctgcgggtgattctgcagctgctgggtttcttcattctcttttatcttccgtgtgtccatctcttccggtgtctatctcgccggatctcacggcggctttactgtcaaaggataaagttaacgcctttggtctgatggaaccgtgctctgtttcgaatgagaaaagatctgtgcgagcttatgggatttatccaaagacttcgtttttcaatcatgattgtcttcctaatgcttgtagattcgattatgttgactctgcttctgatggtaatactgatatcatcattaggatgattcatgatgttcctgaaggtagagaagtttgtttaagctacttccctgtgaacatgaactattcgagtagacaaaagagattgcttgaggattacggttttaagtgtgactgtgatcggtgcaaagtggaatttagttggtctgaaggtgaggaagatgagaatgagattatggaagagatggaggatcaagatgaacaagaagagatggaagattcagtagatatatgtgtgagaaggagaattgttttggcactctagctccgcttcccccgaagactcatgatgcttcgagagttcttgaatgtaatgtttgtggaagcgttaaggaggatgaagttggcgtaaatcaatgaggaaggttagcttaaagaattgatcagccgaaaatctcaagcttgtttgatgcagccagacccaaacaacaagagacttgtcttggaccacatcgttaatcaatgttgtttgttgtttgatgtttacttttttttttttactcagttttgaaaattcgataagtattctagctctagaattccatatctaggttttttgttttctcctagatagtctgaagaatcaattgtaatggtctgtggaattacacggaaacagttttgttgtaataatggagcatcagttttctttgg

SEQ ID NO: 96163 - protein, 345 aa, Arabidopsis thaliana
  peptide (1)..(345): Ceres Seq. ID no. 12732205
TTAIMINDGGAKPETLLRVAEIGGRGRSLVAAQSLRAGQVILRESPLLLYSAFPFLSSSVSPYCDHCFRLLASSAHQKCQSCSLVSFCSPNCFASHTPWLCESLRRLHQSSSSAFSDQPSDRQVQARFLLSAYNLAAASPSDFQILLSLQGSGSSNGDPSCSAGDSAAAGFLHSLLSSVCPSLPVSISPDLTAALLSKDKVNAFGLMEPCSVSNEKRSVRAYGIYPKTSFFNHDCLPNACRFDYVDSASDGNTDIIIRMIHDVPEGREVCLSYFPVNMNYSSRQKRLLEDYGFKCDCDRCKVEFSWSEGEEDENEIMEEMEDQDEQEEMEDSVDICVRRRIVLAL

SEQ ID NO: 96164 - protein, 341 aa, Arabidopsis thaliana
  peptide (1)..(341): Ceres Seq. ID no. 12732206
MINDGGAKPETLLRVAEIGGRGRSLVAAQSLRAGQVILRESPLLLYSAFPFLSSSVSPYCDHCFRLLASSAHQKCQSCSLVSFCSPNCFASHTPWLCESLRRLHQSSSSAFSDQPSDRQVQARFLLSAYNLAAASPSDFQILLSLQGSGSSNGDPSCSAGDSAAAGFLHSLLSSVCPSLPVSISPDLTAALLSKDKVNAFGLMEPCSVSNEKRSVRAYGIYPKTSFFNHDCLPNACRFDYVDSASDGNTDIIIRMIHDVPEGREVCLSYFPVNMNYSSRQKRLLEDYGFKCDCDRCKVEFSWSEGEEDENEIMEEMEDQDEQEEMEDSVDICVRRRIVLAL

SEQ ID NO: 96165 - DNA, 783 bp, Arabidopsis thaliana
  misc_feature (1)..(783): Ceres Seq. ID no. 12732215
  misc_feature (1)..(783): Ortholog of  Ceres SEQ ID NO 15176693 as cited in SEQ ID NO 1078
  misc_feature (1)..(783): Ortholog of  Ceres SEQ ID NO 12615074 as cited in SEQ ID NO 62676
  misc_feature (1)..(783): Ortholog of  Ceres SEQ ID NO 13598819 as cited in SEQ ID NO 0
  misc_feature (1)..(783): Ortholog of  Ceres SEQ ID NO 13600371 as cited in SEQ ID NO 0
atttccttgtctacacgatcataaagctcacaaagagagaattgagaagaaacaaactcgtcggagaattcagtactcgccgaagaggaagaagaagaagatgtcttggcaatcatacgtcgatgatcaccttatgtgtgatgtcgaaggcaaccatctcaccgccgccgcaattctcggccaagacggcagtgtctgggctcagagcgccaaatttcctcagttgaagcctcaagaaatcgatggaatcaagaaggactttgaggagcccgggtttcttgccccaaccggactatttctcggtggcgaaaaatacatggttatccaaggtgaacaaggagctgtgatccgagggaagaagggacctggaggtgtcactatcaagaagacaaaccaagctttggtctttggcttctacgatgaaccaatgactggaggtcaatgcaacttggttgtcgaaaggctcggggattaccttatcgagtctgaactctaaaaccaaggtttcatttcaggttcttcttaactaaagagtgtcaatgcactttttattgtgattgattgtaatgctttcaaacacaaatcatttgttactttagaaccaattgtgattgattggtctccttcgttaccgagtttgagtttgtgtgttcttgtaatgacatttgatcatcttttttctccatatgtattgagttttgatttttgtttcttcatattattactttttcttgaaatgatctgctgtttatgatttggggttcaaaatatttttggtttggc

SEQ ID NO: 96166 - protein, 164 aa, Arabidopsis thaliana
  peptide (1)..(164): Ceres Seq. ID no. 12732216
FPCLHDHKAHKERIEKKQTRRRIQYSPKRKKKKMSWQSYVDDHLMCDVEGNHLTAAAILGQDGSVWAQSAKFPQLKPQEIDGIKKDFEEPGFLAPTGLFLGGEKYMVIQGEQGAVIRGKKGPGGVTIKKTNQALVFGFYDEPMTGGQCNLVVERLGDYLIESEL

SEQ ID NO: 96167 - protein, 131 aa, Arabidopsis thaliana
  peptide (1)..(131): Ceres Seq. ID no. 12732217
MSWQSYVDDHLMCDVEGNHLTAAAILGQDGSVWAQSAKFPQLKPQEIDGIKKDFEEPGFLAPTGLFLGGEKYMVIQGEQGAVIRGKKGPGGVTIKKTNQALVFGFYDEPMTGGQCNLVVERLGDYLIESEL

SEQ ID NO: 96168 - protein, 120 aa, Arabidopsis thaliana
  peptide (1)..(120): Ceres Seq. ID no. 12732218
MCDVEGNHLTAAAILGQDGSVWAQSAKFPQLKPQEIDGIKKDFEEPGFLAPTGLFLGGEKYMVIQGEQGAVIRGKKGPGGVTIKKTNQALVFGFYDEPMTGGQCNLVVERLGDYLIESEL

SEQ ID NO: 96169 - DNA, 765 bp, Arabidopsis thaliana
  misc_feature (1)..(765): Ceres Seq. ID no. 12732252
  misc_feature (1)..(765): Ortholog of  Ceres SEQ ID NO 14304408 as cited in SEQ ID NO 58051
  misc_feature (1)..(765): Ortholog of  Ceres SEQ ID NO 14314759 as cited in SEQ ID NO 59915
  misc_feature (1)..(765): Ortholog of  Ceres SEQ ID NO 13661769 as cited in SEQ ID NO 61435
  misc_feature (1)..(765): Ortholog of  Ceres SEQ ID NO 13600585 as cited in SEQ ID NO 0
atgtctcacatccacacaaaaagaagaagtaagtatcaaacgagagtacaaaagatgacgtcactcaacagctctgcatcaccaacatcatcgtcatcagaccaatctgatgcaactactacaacaagcacccacttgtctgaagaagaagctccacccagaaacaacaacacaagaaagagaaggagagattcttcttctgcttcttcatcttcttcaatgcaacatcctgtttacagaggtgtgcggatgagaagttggggcaaatgggtctccgagatccgacaacctcgtaagaaaactcgtatttggctcggcacttttgtcaccgctgatatggctgctcgtgctcacgacgtcgctgctctcaccatcaaaggctcctccgccgtcttaaatttccctgagcttgcttctctcttccctcgtccggcgtcatcatcgccgcatgatatccagacagccgccgcagaagccgccgccatggtggtcgaagaaaaactgttagagaaggatgaggctccggaggccccaccttcgtcggaatcttcttacgtggcggcggagtcagaggatgaggagaggttggagaaaattgtggagctgcctaacattgaagaaggaagttatgacgagagtgtgacatcacgtgctgatctggcttattctgagccgttcgattgttgggtgtatcctccggttatggatttttatgaagaaatatcggagtttaatttcgtggaattgtggagctttaatcactaa

SEQ ID NO: 96170 - protein, 254 aa, Arabidopsis thaliana
  peptide (1)..(254): Ceres Seq. ID no. 12732253
MSHIHTKRRSKYQTRVQKMTSLNSSASPTSSSSDQSDATTTTSTHLSEEEAPPRNNNTRKRRRDSSSASSSSSMQHPVYRGVRMRSWGKWVSEIRQPRKKTRIWLGTFVTADMAARAHDVAALTIKGSSAVLNFPELASLFPRPASSSPHDIQTAAAEAAAMVVEEKLLEKDEAPEAPPSSESSYVAAESEDEERLEKIVELPNIEEGSYDESVTSRADLAYSEPFDCWVYPPVMDFYEEISEFNFVELWSFNH

SEQ ID NO: 96171 - protein, 236 aa, Arabidopsis thaliana; identical to SEQ ID NO: 87490
  peptide (1)..(236): Ceres Seq. ID no. 12732254

SEQ ID NO: 96172 - protein, 181 aa, Arabidopsis thaliana; identical to SEQ ID NO: 87491
  peptide (1)..(181): Ceres Seq. ID no. 12732255

SEQ ID NO: 96173 - DNA, 1380 bp, Arabidopsis thaliana
  misc_feature (1)..(1380): Ceres Seq. ID no. 12732264
  misc_feature (1)..(1380): Ortholog of  Ceres SEQ ID NO 13600220 as cited in SEQ ID NO 0
atggataatggagacatagcttgtgatggatatcacaagtataaggaagatgtgcagctcatggccgaaactggcttacatacattcagattctccatctcttggtctagactcatctctaatggaagaggttccattaacccgaaaggtctacagttctacaagaatttcattcaagaacttgtcaaacatggaattgagccacatgttacactacatcactacgattttcctcaatatctcgaggatgactatggaggctggaccaaccgcaaaatcatcaaagactttaccgcttatgcagatgtttgctttagagagtttgggaaccacgtcaaattctggaccacgatcaacgaggctaatatatttactattggaggttacaacgatgggaattcaccgcctggtcgttgctcctttccgggcagaaactgcacgttagggaactcttccactgaaacatatatcgtaggccataacttgctgcttgctcacgcctctgtttcaagactatataagcaaaagtacaaggatatacaaggaggttctgttggatttagtttatttgcaatgaattttactccttctacaaactccaaggatgatgaaatcgcaacgaaaagagccaacgatttctacctcggatggatgcttgagcctcttatatatggagactatcctgatgtgatgaaaagaaccattggatcaagactgccagttttctcgaaggaagaatcagaacaagtgaaaggctcatctgacttcataggagtcattcactatctcacggctttggtcacaaacatcgatatcaacccttcactttcaggaattccagattttaactcagacatggtgcctaatattctttataactttaagtattcccaatccatttttactagttgtggcgtttgtttttgtttggacaagtctgttgtttctccatgggctatggaaggcatcctagagtatataaagcagagctatggcaatcctccagtctacattcttgagaatggtaaaacaatgaaccaagatttggagctgcaacaaaaggacacaccaaggattgagtacttagatgcttacattggtgcggtgctcaaagctgttagaaacaaagatatgactacatgtaggaatggatcagacacgagaggctacttcgtatggtcatttatggatttgtacgaattactaaacggatacaagagtagttttggattgtactctgtcaatttcagtgatccccatcgcaagagatctcccaaactctctgctcactggtactctggttttctcaagggcaaacccacatttcttggttcccaaggcatcacacaattgcatagcaacttctcttcttccagatag

SEQ ID NO: 96174 - protein, 459 aa, Arabidopsis thaliana
  peptide (1)..(459): Ceres Seq. ID no. 12732265
MDNGDIACDGYHKYKEDVQLMAETGLHTFRFSISWSRLISNGRGSINPKGLQFYKNFIQELVKHGIEPHVTLHHYDFPQYLEDDYGGWTNRKIIKDFTAYADVCFREFGNHVKFWTTINEANIFTIGGYNDGNSPPGRCSFPGRNCTLGNSSTETYIVGHNLLLAHASVSRLYKQKYKDIQGGSVGFSLFAMNFTPSTNSKDDEIATKRANDFYLGWMLEPLIYGDYPDVMKRTIGSRLPVFSKEESEQVKGSSDFIGVIHYLTALVTNIDINPSLSGIPDFNSDMVPNILYNFKYSQSIFTSCGVCFCLDKSVVSPWAMEGILEYIKQSYGNPPVYILENGKTMNQDLELQQKDTPRIEYLDAYIGAVLKAVRNKDMTTCRNGSDTRGYFVWSFMDLYELLNGYKSSFGLYSVNFSDPHRKRSPKLSAHWYSGFLKGKPTFLGSQGITQLHSNFSSSR

SEQ ID NO: 96175 - protein, 439 aa, Arabidopsis thaliana
  peptide (1)..(439): Ceres Seq. ID no. 12732266
MAETGLHTFRFSISWSRLISNGRGSINPKGLQFYKNFIQELVKHGIEPHVTLHHYDFPQYLEDDYGGWTNRKIIKDFTAYADVCFREFGNHVKFWTTINEANIFTIGGYNDGNSPPGRCSFPGRNCTLGNSSTETYIVGHNLLLAHASVSRLYKQKYKDIQGGSVGFSLFAMNFTPSTNSKDDEIATKRANDFYLGWMLEPLIYGDYPDVMKRTIGSRLPVFSKEESEQVKGSSDFIGVIHYLTALVTNIDINPSLSGIPDFNSDMVPNILYNFKYSQSIFTSCGVCFCLDKSVVSPWAMEGILEYIKQSYGNPPVYILENGKTMNQDLELQQKDTPRIEYLDAYIGAVLKAVRNKDMTTCRNGSDTRGYFVWSFMDLYELLNGYKSSFGLYSVNFSDPHRKRSPKLSAHWYSGFLKGKPTFLGSQGITQLHSNFSSSR

SEQ ID NO: 96176 - protein, 268 aa, Arabidopsis thaliana
  peptide (1)..(268): Ceres Seq. ID no. 12732267
MNFTPSTNSKDDEIATKRANDFYLGWMLEPLIYGDYPDVMKRTIGSRLPVFSKEESEQVKGSSDFIGVIHYLTALVTNIDINPSLSGIPDFNSDMVPNILYNFKYSQSIFTSCGVCFCLDKSVVSPWAMEGILEYIKQSYGNPPVYILENGKTMNQDLELQQKDTPRIEYLDAYIGAVLKAVRNKDMTTCRNGSDTRGYFVWSFMDLYELLNGYKSSFGLYSVNFSDPHRKRSPKLSAHWYSGFLKGKPTFLGSQGITQLHSNFSSSR

SEQ ID NO: 96177 - DNA, 1648 bp, Arabidopsis thaliana
  misc_feature (1)..(1648): Ceres Seq. ID no. 12732272
  misc_feature (1)..(1648): Ortholog of  Ceres SEQ ID NO 14314643 as cited in SEQ ID NO 56903
cccaaacgaagaaccaaacattttgaaattttttgggaaaattacaaagcacacgaatttagcaaaaagatccagttattaggtggaagcagattttgtagaaaaatggatggtagtatgaatttggggaatgagccaccaggagatggtggtggaggtggagggttgactagacaaggttcgatatactcgttgacgtttgatgagtttcagagcagtgtagggaaagattttgggtcaatgaacatggatgagttgttaaagaatatatggagtgctgaagaaacacaagccatggctagtggtgtggttccagttcttggtggaggtcaagagggtttgcagctgcagaggcaaggctcgttgactctgcctcgaacgcttagtcagaagacggttgatcaagtttggaaagatctatccaaagttggaagtagtggagtagggggaagtaacttgtctcaggtggctcaggctcagagtcagagtcagagtcagaggcagcaaacattaggtgaagtaactttggaggagtttttggttcgtgctggtgttgtgagagaggaagctcaggttgctgcaagagctcagattgctgagaacaataaaggcggttactttggtaatgatgccaacacaggtttctctgtcgagtttcagcagccttctccacgagttgttgccgctggtgtaatgggaaatcttggtgcagagactgcaaattctttgcaggttcaaggttctagtttgcctctgaatgtgaatggagctagaacaacataccagcaatcgcaacagcaacagccaatcatgcctaagcagcctggttttggttatggaacacaaatgggtcagcttaatagtcctgggataagaggtggtggtcttgtgggacttggagatcagtctttaacgaacaatgtgggctttgtccaaggtgcttctgctgcaattcctggagctttaggcgttggtgctgtgtcgcctgttacgccattgtcatcagaagggatagggaagagtaatggtgattcttcatcactctctccgtctccttacatgtttaatggtggtgtgagaggtagaaagagtggcactgtggagaaagttgtagagagaaggcaaaggagaatgataaagaaccgagaatcagctgcaaggtcccgggccaggaaacaggcttacaccgtggagcttgaagctgaagttgcaaagttaaaggaagagaatgacgagttacaacgaaagcaggcaaggatcatggaaatgcaaaagaatcaggagacggagatgaggaatcttctgcaaggaggtccaaagaaaaagctgaggaggacagagtcgggaccttggtgaatcaatcaatgccatcatacttagtttctgtagataaatgacatcccacttaggtgttttagttgaattagacttaatagagaagagctttcatcgtttatattgtaagctctctccatatatgttatgttttttacatacacaggatcatcagaatctcttttgctttatttagaccaagaattttgtgtgtgtttctcgttgttgtttgtcgttgtcgctattaaacctcaaaatgtactttcttgatcttggagttaccaattttgaagaattgaagtgttgtttggtt

SEQ ID NO: 96178 - protein, 451 aa, Arabidopsis thaliana
  peptide (1)..(451): Ceres Seq. ID no. 12732273
PKRRTKHFEIFWENYKAHEFSKKIQLLGGSRFCRKMDGSMNLGNEPPGDGGGGGGLTRQGSIYSLTFDEFQSSVGKDFGSMNMDELLKNIWSAEETQAMASGVVPVLGGGQEGLQLQRQGSLTLPRTLSQKTVDQVWKDLSKVGSSGVGGSNLSQVAQAQSQSQSQRQQTLGEVTLEEFLVRAGVVREEAQVAARAQIAENNKGGYFGNDANTGFSVEFQQPSPRVVAAGVMGNLGAETANSLQVQGSSLPLNVNGARTTYQQSQQQQPIMPKQPGFGYGTQMGQLNSPGIRGGGLVGLGDQSLTNNVGFVQGASAAIPGALGVGAVSPVTPLSSEGIGKSNGDSSSLSPSPYMFNGGVRGRKSGTVEKVVERRQRRMIKNRESAARSRARKQAYTVELEAEVAKLKEENDELQRKQARIMEMQKNQETEMRNLLQGGPKKKLRRTESGPW

SEQ ID NO: 96179 - protein, 416 aa, Arabidopsis thaliana
  peptide (1)..(416): Ceres Seq. ID no. 12732274
MDGSMNLGNEPPGDGGGGGGLTRQGSIYSLTFDEFQSSVGKDFGSMNMDELLKNIWSAEETQAMASGVVPVLGGGQEGLQLQRQGSLTLPRTLSQKTVDQVWKDLSKVGSSGVGGSNLSQVAQAQSQSQSQRQQTLGEVTLEEFLVRAGVVREEAQVAARAQIAENNKGGYFGNDANTGFSVEFQQPSPRVVAAGVMGNLGAETANSLQVQGSSLPLNVNGARTTYQQSQQQQPIMPKQPGFGYGTQMGQLNSPGIRGGGLVGLGDQSLTNNVGFVQGASAAIPGALGVGAVSPVTPLSSEGIGKSNGDSSSLSPSPYMFNGGVRGRKSGTVEKVVERRQRRMIKNRESAARSRARKQAYTVELEAEVAKLKEENDELQRKQARIMEMQKNQETEMRNLLQGGPKKKLRRTESGPW

SEQ ID NO: 96180 - protein, 412 aa, Arabidopsis thaliana
  peptide (1)..(412): Ceres Seq. ID no. 12732275
MNLGNEPPGDGGGGGGLTRQGSIYSLTFDEFQSSVGKDFGSMNMDELLKNIWSAEETQAMASGVVPVLGGGQEGLQLQRQGSLTLPRTLSQKTVDQVWKDLSKVGSSGVGGSNLSQVAQAQSQSQSQRQQTLGEVTLEEFLVRAGVVREEAQVAARAQIAENNKGGYFGNDANTGFSVEFQQPSPRVVAAGVMGNLGAETANSLQVQGSSLPLNVNGARTTYQQSQQQQPIMPKQPGFGYGTQMGQLNSPGIRGGGLVGLGDQSLTNNVGFVQGASAAIPGALGVGAVSPVTPLSSEGIGKSNGDSSSLSPSPYMFNGGVRGRKSGTVEKVVERRQRRMIKNRESAARSRARKQAYTVELEAEVAKLKEENDELQRKQARIMEMQKNQETEMRNLLQGGPKKKLRRTESGPW

SEQ ID NO: 96181 - DNA, 1047 bp, Arabidopsis thaliana
  misc_feature (1)..(1047): Ceres Seq. ID no. 12732299
  misc_feature (1)..(1047): Ortholog of  Ceres SEQ ID NO 14315455 as cited in SEQ ID NO 56988
  misc_feature (1)..(1047): Ortholog of  Ceres SEQ ID NO 13596921 as cited in SEQ ID NO 62368
atggcgatgatggtcgagaatagctacggtggttacggtggtggcggcggagagaggatacaacttatggtcgaaggtcaaggcaaagctgttccggctccgtttttgacaaagacttatcaacttgttgatgatcctgcgacggatcatgtcgtttcttggggtgatgatgatactacttttgtcgtttggcgtccaccggagtttgctcgtgatcttcttcctaattactttaaacataacaacttctctagcttcgttcgtcagctcaatacttatggtttcagaaagattgtaccagatcgatgggagttcgcgaacgagtttttcaagagaggagagaaacatttactctgcgaaatccaccgccgtaaaacatctcaaatgataccacaacaacactctccgttcatgtcacaccaccacgctccgccgcagattccattctccggcggttctttcttcccattaccaccaccacgtgtcaccactccagaagaagaccattactggtgcgacgactcaccaccgtcaagaccacgagtcataccacaacaaattgacacggcggcgcaagtaacggcattgagtgaagacaacgagagattacgacgaagcaacacagtgttaatgtcggaactagctcacatgaagaaactctacaacgacattatctactttgttcaaaaccatgtcaagcctgttgctccaagtaacaactctagttatctctcttcatttctccagaagcaacaacaacaacaacctccaacacttgattattacaatactgccactgtcaatgccactaatctcaatgctttgaactcatctccaccaacttcacaaagctctattacagttcttgaagatgatcacactaatcatcatgatcagagtaatatgagaaagacaaagctttttggagtttcgttgccttcttctaagaagagatcacatcatttctcagaccaaacaagcaaaacgagacttgtgttggatcagtctgatcttgctttgaatctcatgactgcttctacacgttaa

SEQ ID NO: 96182 - protein, 348 aa, Arabidopsis thaliana
  peptide (1)..(348): Ceres Seq. ID no. 12732300
MAMMVENSYGGYGGGGGERIQLMVEGQGKAVPAPFLTKTYQLVDDPATDHVVSWGDDDTTFVVWRPPEFARDLLPNYFKHNNFSSFVRQLNTYGFRKIVPDRWEFANEFFKRGEKHLLCEIHRRKTSQMIPQQHSPFMSHHHAPPQIPFSGGSFFPLPPPRVTTPEEDHYWCDDSPPSRPRVIPQQIDTAAQVTALSEDNERLRRSNTVLMSELAHMKKLYNDIIYFVQNHVKPVAPSNNSSYLSSFLQKQQQQQPPTLDYYNTATVNATNLNALNSSPPTSQSSITVLEDDHTNHHDQSNMRKTKLFGVSLPSSKKRSHHFSDQTSKTRLVLDQSDLALNLMTASTR

SEQ ID NO: 96183 - protein, 346 aa, Arabidopsis thaliana
  peptide (1)..(346): Ceres Seq. ID no. 12732301
MMVENSYGGYGGGGGERIQLMVEGQGKAVPAPFLTKTYQLVDDPATDHVVSWGDDDTTFVVWRPPEFARDLLPNYFKHNNFSSFVRQLNTYGFRKIVPDRWEFANEFFKRGEKHLLCEIHRRKTSQMIPQQHSPFMSHHHAPPQIPFSGGSFFPLPPPRVTTPEEDHYWCDDSPPSRPRVIPQQIDTAAQVTALSEDNERLRRSNTVLMSELAHMKKLYNDIIYFVQNHVKPVAPSNNSSYLSSFLQKQQQQQPPTLDYYNTATVNATNLNALNSSPPTSQSSITVLEDDHTNHHDQSNMRKTKLFGVSLPSSKKRSHHFSDQTSKTRLVLDQSDLALNLMTASTR

SEQ ID NO: 96184 - protein, 345 aa, Arabidopsis thaliana
  peptide (1)..(345): Ceres Seq. ID no. 12732302
MVENSYGGYGGGGGERIQLMVEGQGKAVPAPFLTKTYQLVDDPATDHVVSWGDDDTTFVVWRPPEFARDLLPNYFKHNNFSSFVRQLNTYGFRKIVPDRWEFANEFFKRGEKHLLCEIHRRKTSQMIPQQHSPFMSHHHAPPQIPFSGGSFFPLPPPRVTTPEEDHYWCDDSPPSRPRVIPQQIDTAAQVTALSEDNERLRRSNTVLMSELAHMKKLYNDIIYFVQNHVKPVAPSNNSSYLSSFLQKQQQQQPPTLDYYNTATVNATNLNALNSSPPTSQSSITVLEDDHTNHHDQSNMRKTKLFGVSLPSSKKRSHHFSDQTSKTRLVLDQSDLALNLMTASTR

SEQ ID NO: 96185 - DNA, 880 bp, Arabidopsis thaliana
  misc_feature (1)..(880): Ceres Seq. ID no. 12732323
  misc_feature (1)..(880): Ortholog of  Ceres SEQ ID NO 12557432 as cited in SEQ ID NO 92
  misc_feature (1)..(880): Ortholog of  Ceres SEQ ID NO 14305097 as cited in SEQ ID NO 0
agaggaacaagaagaagaaagatgttcaggaaccagtacgacacagatgtgacaacatggagtcccacaggtcgactattccaagtcgaatacgccatggaagctgtgaaacaaggctccgcagcaataggactcagatctcgctctcatgtcgtcctcgcttgtgtcaacaaagcacaatcagagctctcttctcatcaaaggaagatctttaaagtcgatgatcatattggtgttgctattgctggtctcactgctgatggtcgtgttctctctcgatatatgagatctgagtctattaatcactcttttacttatgagtctcctcttcctgttggtcgtcttgttgttcatcttgctgataaagctcaggtatgtacccaacgatcatggaaacggccttatggtgtgggtttgctggtaggtggattggacgagtcaggagctcacctctactacaactgccctagcggaaactactttgaatatcaagcattcgctatcgggtctcgttcacaagctgcgaaaacctatctggagcgcaaattcgagagcttccaagaatcatcaaaagaagatctgataaaagatgctattatggccataagggaaactttgcaaggggaaacactgaagagctcgctctgcactgtttctgttctaggagtcgatgaaccattccatttcttggaccaggaaagcattcaaaaggtgattgatacgtttgagaaggttcctgaggaagaggaagatgctggtgagggtgaggccgaacccgaagctgctcctggtgctgctggaactggtgaacaaggtggttcaggtgatcaagatgttgcaccaatggaaatttgagcaagagggaatgagttcaaagttg

SEQ ID NO: 96186 - protein, 284 aa, Arabidopsis thaliana
  peptide (1)..(284): Ceres Seq. ID no. 12732324
RGTRRRKMFRNQYDTDVTTWSPTGRLFQVEYAMEAVKQGSAAIGLRSRSHVVLACVNKAQSELSSHQRKIFKVDDHIGVAIAGLTADGRVLSRYMRSESINHSFTYESPLPVGRLVVHLADKAQVCTQRSWKRPYGVGLLVGGLDESGAHLYYNCPSGNYFEYQAFAIGSRSQAAKTYLERKFESFQESSKEDLIKDAIMAIRETLQGETLKSSLCTVSVLGVDEPFHFLDQESIQKVIDTFEKVPEEEEDAGEGEAEPEAAPGAAGTGEQGGSGDQDVAPMEI

SEQ ID NO: 96187 - protein, 277 aa, Arabidopsis thaliana; identical to SEQ ID NO: 35615
  peptide (1)..(277): Ceres Seq. ID no. 12732325

SEQ ID NO: 96188 - protein, 252 aa, Arabidopsis thaliana; identical to SEQ ID NO: 35616
  peptide (1)..(252): Ceres Seq. ID no. 12732326

SEQ ID NO: 96189 - DNA, 1819 bp, Arabidopsis thaliana
  misc_feature (1)..(1819): Ceres Seq. ID no. 12732327
  misc_feature (1)..(1819): Ortholog of  Ceres SEQ ID NO 14307156 as cited in SEQ ID NO 54069
  misc_feature (1)..(1819): Ortholog of  Ceres SEQ ID NO 15169651 as cited in SEQ ID NO 64156
aaaacatcaaagagtcactctaaactcatctctctcgccgaattctccccaacaatttccgccggaaacaaattctcagattccggtaactctaaaactatgtcatcggatattccgtgctgcggaaccacgttctcgctctacgtcgtgataatcatagctcttgtagcgttcgctggcttgatggctggtttaactcttggtctcatgtctctcggtttagtcgacctcgaagttctcatcaaatctggccgtcctcaagatcgaatcaacgccggtaagatatttccagtagtgaagaatcagcatctgttgctatgtacacttttgatcggaaactctatggctatggaggctttaccaatatttttggataaaattgtgcctccttggttagctattcttctttcagtgactcttatactggtgtttggagagataatgccacaagcagtttgtactcgatacgggcttaaggttggagcgataatggctccttttgttcgtgttcttcttgtactgttcttcccaatttcatatccaatcagtaaggttcttgattggatgttgggtaagggacatggagttcttttacggagagcagagctaaagacatttgtgaatttccatggaaatgaggctgggaaaggtggagatctaacaaccgatgagacttcaatcatcacaggtgcacttgaattaactgaaaagacggcaaaagatgcaatgactcccatatcgaatgcattttcccttgagcttgatacacctcttaatttggaaactttaaatacaattatgtcagttggtcatagcagagttccagtttatttcagaaatcccacacatataattgggctcattctggttaaaaatctattggcagttgatgccagaaaggaagttcctctgagaaaaatgtccatgagaaaaattccacgtgtctctgagaccatgccactatatgatatcttaaacgagttccagaagggtcacagtcacatagcagttgtttacaaggatcttgacgagcaggagcaatctcccgaaacaagtgaaaatggtattgagcgcagaaaaaacaagaaaacgaaagacgaactttttaaggacagttgtaggaaaccaaaagctcagtttgaggtatcggagaaggaagtattcaaaattgaaaccggagatgcaaaatccggcaagagtgagaacggtgaggagcagcaagggtcagggaaaacaagtctattggctgctccagctaagaagcgacatagaggctgttcgttctgcattttggacattgagaatactcccatacctgattttcctaccaatgaggaggttgtaggagttatcaccatggaggatgttatcgaagagcttcttcaggaagagatccttgacgaaaccgatgagtatgtgaacatccacaacaggataagagtcaacatgcatgcttctccagagaatctaccaagcgtgataacctcaatcacgcaatcatcatcgggttccactagtcccaaccaaacatctcatatggccacaccagattcaagtcctacaacaaaaccatcaaattcaagtcctacaagaaaaccttcagtatcgagtcctacgagagagccttcagattcttcacactccatggctccaaaacatgaagagtccacccaaactttatgatgatcatatatgagtgaagatagattagctatgtatccttaaaagatgacttctttaacagaatcgtttgtgtgtttgagattaagactggttaatagtttctttgtaatgaaaaggatggatcttttaccaaaag

SEQ ID NO: 96190 - protein, 560 aa, Arabidopsis thaliana
  peptide (1)..(560): Ceres Seq. ID no. 12732328
KTSKSHSKLISLAEFSPTISAGNKFSDSGNSKTMSSDIPCCGTTFSLYVVIIIALVAFAGLMAGLTLGLMSLGLVDLEVLIKSGRPQDRINAGKIFPVVKNQHLLLCTLLIGNSMAMEALPIFLDKIVPPWLAILLSVTLILVFGEIMPQAVCTRYGLKVGAIMAPFVRVLLVLFFPISYPISKVLDWMLGKGHGVLLRRAELKTFVNFHGNEAGKGGDLTTDETSIITGALELTEKTAKDAMTPISNAFSLELDTPLNLETLNTIMSVGHSRVPVYFRNPTHIIGLILVKNLLAVDARKEVPLRKMSMRKIPRVSETMPLYDILNEFQKGHSHIAVVYKDLDEQEQSPETSENGIERRKNKKTKDELFKDSCRKPKAQFEVSEKEVFKIETGDAKSGKSENGEEQQGSGKTSLLAAPAKKRHRGCSFCILDIENTPIPDFPTNEEVVGVITMEDVIEELLQEEILDETDEYVNIHNRIRVNMHASPENLPSVITSITQSSSGSTSPNQTSHMATPDSSPTTKPSNSSPTRKPSVSSPTREPSDSSHSMAPKHEESTQTL

SEQ ID NO: 96191 - protein, 527 aa, Arabidopsis thaliana
  peptide (1)..(527): Ceres Seq. ID no. 12732329
MSSDIPCCGTTFSLYVVIIIALVAFAGLMAGLTLGLMSLGLVDLEVLIKSGRPQDRINAGKIFPVVKNQHLLLCTLLIGNSMAMEALPIFLDKIVPPWLAILLSVTLILVFGEIMPQAVCTRYGLKVGAIMAPFVRVLLVLFFPISYPISKVLDWMLGKGHGVLLRRAELKTFVNFHGNEAGKGGDLTTDETSIITGALELTEKTAKDAMTPISNAFSLELDTPLNLETLNTIMSVGHSRVPVYFRNPTHIIGLILVKNLLAVDARKEVPLRKMSMRKIPRVSETMPLYDILNEFQKGHSHIAVVYKDLDEQEQSPETSENGIERRKNKKTKDELFKDSCRKPKAQFEVSEKEVFKIETGDAKSGKSENGEEQQGSGKTSLLAAPAKKRHRGCSFCILDIENTPIPDFPTNEEVVGVITMEDVIEELLQEEILDETDEYVNIHNRIRVNMHASPENLPSVITSITQSSSGSTSPNQTSHMATPDSSPTTKPSNSSPTRKPSVSSPTREPSDSSHSMAPKHEESTQTL

SEQ ID NO: 96192 - protein, 499 aa, Arabidopsis thaliana
  peptide (1)..(499): Ceres Seq. ID no. 12732330
MAGLTLGLMSLGLVDLEVLIKSGRPQDRINAGKIFPVVKNQHLLLCTLLIGNSMAMEALPIFLDKIVPPWLAILLSVTLILVFGEIMPQAVCTRYGLKVGAIMAPFVRVLLVLFFPISYPISKVLDWMLGKGHGVLLRRAELKTFVNFHGNEAGKGGDLTTDETSIITGALELTEKTAKDAMTPISNAFSLELDTPLNLETLNTIMSVGHSRVPVYFRNPTHIIGLILVKNLLAVDARKEVPLRKMSMRKIPRVSETMPLYDILNEFQKGHSHIAVVYKDLDEQEQSPETSENGIERRKNKKTKDELFKDSCRKPKAQFEVSEKEVFKIETGDAKSGKSENGEEQQGSGKTSLLAAPAKKRHRGCSFCILDIENTPIPDFPTNEEVVGVITMEDVIEELLQEEILDETDEYVNIHNRIRVNMHASPENLPSVITSITQSSSGSTSPNQTSHMATPDSSPTTKPSNSSPTRKPSVSSPTREPSDSSHSMAPKHEESTQTL

SEQ ID NO: 96193 - DNA, 2045 bp, Arabidopsis thaliana
  misc_feature (1)..(2045): Ceres Seq. ID no. 12732335
  misc_feature (1)..(2045): Ortholog of  Ceres SEQ ID NO 14316204 as cited in SEQ ID NO 59644
aaaagagacagagagaagaaagagaacctcctcaccttcctcctctctttgcgcgttttctctcttctctctctcctacggctgttgaaaccaatggcatttctccacttcgccggaatttcgatcggaagatgaatcgtctccttcgtctctcttcgcttaatcgtcgatcttcttctgtcgccgtctaattgcaaatccaaatcgttttttgtatggtatagagatttggtgaagaactagacgcagcttagaggaagcttttatatttattgaagcttagggggaaacaatgtcaacaaagggagaacatcatacagttccactttctgtgttgcttaaacgtgaatcagctaatgaaaagatagacaatcctgaacttatacacggccagcacaaccaaagcaagaaaggagaggattttactcttgttaaaacagagtgtcaacgtgttatgggcgatggtgttaccaccttctccgtttttgggctttttgatggacacaatggttctgcagcagctatctacactaaagagaaccttttgaataatgtattagctgcaataccttctgatcttaacagagatgagtgggttgctgcacttcctagggctttggttgcaggatttgtgaaaactgataaagatttccaggaaagagcaaggacgtctggaacgactgtaacttttgtcatagtagaaggatgggtggtgagtgttgcatctgtaggtgactctcgttgcatacttgagcctgctgagggcggtgtctattatttgtctgctgatcatcggcttgaaataaacgaagaagagcgagatcgagtcactgcaagtggtggtgaagttggtcggttaaatactggtggcggtactgagattggtcctctgagatgttggcctggtggtctgtgtctctcaagatccattggagatctggatgttggcgaatacattgttccagttccttatgtaaagcaagtcaagttgtcttcagctggtggtcgactgatcatctcaagtgatggtgtgtgggatgcaatatctgcagaagaggctcttgattgttgccgggggttgccacctgaatcttctgcggagcatatcgttaaagaagctgtgggtaaaaaaggtattcgtgatgatacaacctgtattgttgttgatatattgccactagaaaaaccggctgcttccgtgccgcctccaaaaaagcaaggaaaaggaatgttaaagtccatgttcaaaaggaaaacatctgactcctcttctaatatcgagaaagagtacgcagaacctgatgtagttgaagaactctttgaagagggctctgctatgctatcagagagattagacacaaagtacccgctttgcaatatgtttaagttgttcatgtgtgctgtgtgtcaagtagaagtgaaacctggagaaggtgtctcgatccatgccgggtcggataattgccgtaagcttcgtccctgggatggtccattcctttgtgcaagttgccaagataagaaagacgcaatggaagggaaaagatcatcgggagatagacatagtagtgaaagcgactagccagcaatctgcaaattattggcaaagcaactaacaaaacagtattgtgagtaaattggagcagttcaaggatcttcgggttgtaatttttcacccatagagagatatgaagttccttgataaaccaccaacattcttaccattctccagcagactccaaggaagtttatttatttttctcccacttcacgacgtcttacatcaaacttgtttcaaagtagaggtaattcataagttcttttcatttttccttttcatttttttttgtccatttgtgatcactctgtgctttggtatttcaaaaatgagtagaactaactaccagagacagtagctttattacgtctgttgaaatgttgagtcgtttaggaagagagggtaaggaagatatgcaagtatgtgtgcaattatttcaatgtataaaccgaagacaaattcttgatagaaatcaaatcatttttcatgt

SEQ ID NO: 96194 - protein, 428 aa, Arabidopsis thaliana
  peptide (1)..(428): Ceres Seq. ID no. 12732336
MSTKGEHHTVPLSVLLKRESANEKIDNPELIHGQHNQSKKGEDFTLVKTECQRVMGDGVTTFSVFGLFDGHNGSAAAIYTKENLLNNVLAAIPSDLNRDEWVAALPRALVAGFVKTDKDFQERARTSGTTVTFVIVEGWVVSVASVGDSRCILEPAEGGVYYLSADHRLEINEEERDRVTASGGEVGRLNTGGGTEIGPLRCWPGGLCLSRSIGDLDVGEYIVPVPYVKQVKLSSAGGRLIISSDGVWDAISAEEALDCCRGLPPESSAEHIVKEAVGKKGIRDDTTCIVVDILPLEKPAASVPPPKKQGKGMLKSMFKRKTSDSSSNIEKEYAEPDVVEELFEEGSAMLSERLDTKYPLCNMFKLFMCAVCQVEVKPGEGVSIHAGSDNCRKLRPWDGPFLCASCQDKKDAMEGKRSSGDRHSSESD

SEQ ID NO: 96195 - protein, 374 aa, Arabidopsis thaliana
  peptide (1)..(374): Ceres Seq. ID no. 12732337
MGDGVTTFSVFGLFDGHNGSAAAIYTKENLLNNVLAAIPSDLNRDEWVAALPRALVAGFVKTDKDFQERARTSGTTVTFVIVEGWVVSVASVGDSRCILEPAEGGVYYLSADHRLEINEEERDRVTASGGEVGRLNTGGGTEIGPLRCWPGGLCLSRSIGDLDVGEYIVPVPYVKQVKLSSAGGRLIISSDGVWDAISAEEALDCCRGLPPESSAEHIVKEAVGKKGIRDDTTCIVVDILPLEKPAASVPPPKKQGKGMLKSMFKRKTSDSSSNIEKEYAEPDVVEELFEEGSAMLSERLDTKYPLCNMFKLFMCAVCQVEVKPGEGVSIHAGSDNCRKLRPWDGPFLCASCQDKKDAMEGKRSSGDRHSSESD

SEQ ID NO: 96196 - DNA, 1305 bp, Arabidopsis thaliana
  misc_feature (1)..(1305): Ceres Seq. ID no. 12732345
  misc_feature (1)..(1305): Ortholog of  Ceres SEQ ID NO 14302742 as cited in SEQ ID NO 66899
atggcagacgtcaaggttcaatccgaatccgaatcctcggattctcatcccttggtcgactatcaatcacttccaccttatcctccgccgcatccaccggttgaagtagaggagaatcaaccaaaaacatctccgactccgccgccgccacactggatgcgttatccaccggtgttaatgcctcagatgatgtacgcgccgccgccaccgatgccgttctcaccttatcatcaatatccgaatcaccaccactttcaccatcaatctcgtggtaataagcatcaaaacgcttttaatggtgagaataaaactatttgggttggtgatttgcaaaactggatggatgaggcttatcttaattctgcttttacttccgccgaagagagagagattgtttcgctgaaggtgattcgtaataagcacaatggttcatcggaaggatatggatttgtggagtttgagtcccatgatgtagctgataaggttttgcaggagtttaacggggcgcctatgccaaatactgaccaaccttttcgtttgaactgggctagttttagcaccggtgagaagcggttagagaacaatggacctgatctctctatatttgttggggatttggcgccagatgtttcggatgctttgttgcacgagaccttctctgagaagtatccgtcggttaaagctgccaaagttgtccttgatgctaatactggtagatcaaaggggtatgggtttgtgaggtttggagatgagaatgaaaggaccaaagcaatgactgagatgaatggtgttaaatgctctagtagagctatgcgtatcggtcctgctaccccaaggaaaactaatggttatcaacaacaaggtggatacatgccgagtggtgcctttacgcgttctgaaggggacacaatcaacacaacaatatttgttggagggcttgactctagtgtcactgatgaagacttaaagcaacctttctctgaattcggggaaatagtgtctgtcaagattcctgttggtaaaggatgcggatttgttcagtttgttaacagaccaaatgcagaggaggctttggaaaaactcaatgggactgtaattggcaaacaaacagtccggctttcttggggccgtaatccagccaataagcagcctagagataagtatggaaaccaatgggttgatccgtactatggaggacagttttacaatgggtatggatacatggtacctcaacctgacccgagaatgtatcctgctgcaccttactatccaatgtacggtggtcatcagcaacaagttagctga

SEQ ID NO: 96197 - protein, 434 aa, Arabidopsis thaliana
  peptide (1)..(434): Ceres Seq. ID no. 12732346
MADVKVQSESESSDSHPLVDYQSLPPYPPPHPPVEVEENQPKTSPTPPPPHWMRYPPVLMPQMMYAPPPPMPFSPYHQYPNHHHFHHQSRGNKHQNAFNGENKTIWVGDLQNWMDEAYLNSAFTSAEEREIVSLKVIRNKHNGSSEGYGFVEFESHDVADKVLQEFNGAPMPNTDQPFRLNWASFSTGEKRLENNGPDLSIFVGDLAPDVSDALLHETFSEKYPSVKAAKVVLDANTGRSKGYGFVRFGDENERTKAMTEMNGVKCSSRAMRIGPATPRKTNGYQQQGGYMPSGAFTRSEGDTINTTIFVGGLDSSVTDEDLKQPFSEFGEIVSVKIPVGKGCGFVQFVNRPNAEEALEKLNGTVIGKQTVRLSWGRNPANKQPRDKYGNQWVDPYYGGQFYNGYGYMVPQPDPRMYPAAPYYPMYGGHQQQVS

SEQ ID NO: 96198 - protein, 382 aa, Arabidopsis thaliana
  peptide (1)..(382): Ceres Seq. ID no. 12732347
MRYPPVLMPQMMYAPPPPMPFSPYHQYPNHHHFHHQSRGNKHQNAFNGENKTIWVGDLQNWMDEAYLNSAFTSAEEREIVSLKVIRNKHNGSSEGYGFVEFESHDVADKVLQEFNGAPMPNTDQPFRLNWASFSTGEKRLENNGPDLSIFVGDLAPDVSDALLHETFSEKYPSVKAAKVVLDANTGRSKGYGFVRFGDENERTKAMTEMNGVKCSSRAMRIGPATPRKTNGYQQQGGYMPSGAFTRSEGDTINTTIFVGGLDSSVTDEDLKQPFSEFGEIVSVKIPVGKGCGFVQFVNRPNAEEALEKLNGTVIGKQTVRLSWGRNPANKQPRDKYGNQWVDPYYGGQFYNGYGYMVPQPDPRMYPAAPYYPMYGGHQQQVS

SEQ ID NO: 96199 - protein, 375 aa, Arabidopsis thaliana
  peptide (1)..(375): Ceres Seq. ID no. 12732348
MPQMMYAPPPPMPFSPYHQYPNHHHFHHQSRGNKHQNAFNGENKTIWVGDLQNWMDEAYLNSAFTSAEEREIVSLKVIRNKHNGSSEGYGFVEFESHDVADKVLQEFNGAPMPNTDQPFRLNWASFSTGEKRLENNGPDLSIFVGDLAPDVSDALLHETFSEKYPSVKAAKVVLDANTGRSKGYGFVRFGDENERTKAMTEMNGVKCSSRAMRIGPATPRKTNGYQQQGGYMPSGAFTRSEGDTINTTIFVGGLDSSVTDEDLKQPFSEFGEIVSVKIPVGKGCGFVQFVNRPNAEEALEKLNGTVIGKQTVRLSWGRNPANKQPRDKYGNQWVDPYYGGQFYNGYGYMVPQPDPRMYPAAPYYPMYGGHQQQVS

SEQ ID NO: 96200 - DNA, 1749 bp, Arabidopsis thaliana
  misc_feature (1)..(1749): Ceres Seq. ID no. 12732353
  misc_feature (1)..(1749): Ortholog of  Ceres SEQ ID NO 15176081 as cited in SEQ ID NO 65838
  misc_feature (1)..(1749): Ortholog of  Ceres SEQ ID NO 13660287 as cited in SEQ ID NO 67316
aaagagaaagcaaagaagagaaactaaaacagagcttttttcacatgggaaaggataagactttgccgttgcttgaccctcgtgagccaccggaactcaccggaaccaagtcggcgtcaaaagtatgggccaaagagttcggcgaagagtcgaagcggctttgggagttagcaggaccagcgattttcactgccataagtcaatactctcttggtgctctcactcagactttctccggccgtctcggtgaacttgagctcgccgccgtctcagttgaaaactctgttatctccggtcttgccttcggtgtcatgttagggatggggagtgcattggagacgttgtgtggacaagcatatggcgcgggacagattaggatgatgggaatatatatgcaacgttcatgggtcattctctttactactgctttgtttttgcttcccgtctacatttgggctcctcctattctttccttcttcggcgaggctcctcacatctctaaagccgcggggaagttcgcattgtggatgatcccgcaactatttgcctatgcagccaacttcccgatacagaaattcttgcagtcacagaggaaagttcttgtgatggcttggatctctggagtggttttagttatacatgcagtttttagctggctcttcattctttactttaagtggggacttgtaggtgcagctatcactctcaatacctcgtggtggttgattgttattggtcagcttttgtatatcttaatcaccaaatcagacggtgcgtggactggattttctatgctagcgtttcgggacctctatggatttgtcaaactttccttagcctctgctcttatgctttgtttggagttttggtacttgatggttctggttgttgttaccggtctccttcctaacccgttgataccagtcgatgccatctccatttgcatgaatatagaagggtggactgccatgatttcgatcgggtttaacgctgcgattagtgtgagagtatcgaatgagctgggtgcaggaaacgcagcgttagccaaattctcagtgatagtcgtctccataacttcaactcttatcgggatagtgtgcatgattgttgtcttagccacaaaagacagcttcccttatcttttcacttcaagcgaagctgtggcagcagaaaccacgagaatagccgtcttgttgggcttcactgtcctcttgaacagcctccagcccgtcttgtcaggggttgcggttggagcggggtggcaggctctggttgcatacgtgaacattgcgtgttattacattatcggactacctgctggtcttgttcttggattcacactagacctcggcgttcagggaatatggggaggtatggtagctggaatatgcttgcagacacttatattgattggaatcatctacttcactaactggaacaaagaggctgagcaagcggagagtcgagttcagagatggggaggaacggcgcaggagtgatcaacaactcccttaggacgtggactatatcagttattgatctttttttgtcaatgttcaatgttgagaaaattgtttatcggagaacaacatcatctctttttgttttttgatatgcttaaagttaacgagtctctcagtgattgttagaggggtacggtttgttatgtgttagacttatgttagattctaggatggttgttgctaagccaaagttcttgattaattttaagtatgagatttaatcttc

SEQ ID NO: 96201 - protein, 498 aa, Arabidopsis thaliana
  peptide (1)..(498): Ceres Seq. ID no. 12732354
RESKEEKLKQSFFHMGKDKTLPLLDPREPPELTGTKSASKVWAKEFGEESKRLWELAGPAIFTAISQYSLGALTQTFSGRLGELELAAVSVENSVISGLAFGVMLGMGSALETLCGQAYGAGQIRMMGIYMQRSWVILFTTALFLLPVYIWAPPILSFFGEAPHISKAAGKFALWMIPQLFAYAANFPIQKFLQSQRKVLVMAWISGVVLVIHAVFSWLFILYFKWGLVGAAITLNTSWWLIVIGQLLYILITKSDGAWTGFSMLAFRDLYGFVKLSLASALMLCLEFWYLMVLVVVTGLLPNPLIPVDAISICMNIEGWTAMISIGFNAAISVRVSNELGAGNAALAKFSVIVVSITSTLIGIVCMIVVLATKDSFPYLFTSSEAVAAETTRIAVLLGFTVLLNSLQPVLSGVAVGAGWQALVAYVNIACYYIIGLPAGLVLGFTLDLGVQGIWGGMVAGICLQTLILIGIIYFTNWNKEAEQAESRVQRWGGTAQE

SEQ ID NO: 96202 - protein, 484 aa, Arabidopsis thaliana
  peptide (1)..(484): Ceres Seq. ID no. 12732355
MGKDKTLPLLDPREPPELTGTKSASKVWAKEFGEESKRLWELAGPAIFTAISQYSLGALTQTFSGRLGELELAAVSVENSVISGLAFGVMLGMGSALETLCGQAYGAGQIRMMGIYMQRSWVILFTTALFLLPVYIWAPPILSFFGEAPHISKAAGKFALWMIPQLFAYAANFPIQKFLQSQRKVLVMAWISGVVLVIHAVFSWLFILYFKWGLVGAAITLNTSWWLIVIGQLLYILITKSDGAWTGFSMLAFRDLYGFVKLSLASALMLCLEFWYLMVLVVVTGLLPNPLIPVDAISICMNIEGWTAMISIGFNAAISVRVSNELGAGNAALAKFSVIVVSITSTLIGIVCMIVVLATKDSFPYLFTSSEAVAAETTRIAVLLGFTVLLNSLQPVLSGVAVGAGWQALVAYVNIACYYIIGLPAGLVLGFTLDLGVQGIWGGMVAGICLQTLILIGIIYFTNWNKEAEQAESRVQRWGGTAQE

SEQ ID NO: 96203 - protein, 395 aa, Arabidopsis thaliana
  peptide (1)..(395): Ceres Seq. ID no. 12732356
MLGMGSALETLCGQAYGAGQIRMMGIYMQRSWVILFTTALFLLPVYIWAPPILSFFGEAPHISKAAGKFALWMIPQLFAYAANFPIQKFLQSQRKVLVMAWISGVVLVIHAVFSWLFILYFKWGLVGAAITLNTSWWLIVIGQLLYILITKSDGAWTGFSMLAFRDLYGFVKLSLASALMLCLEFWYLMVLVVVTGLLPNPLIPVDAISICMNIEGWTAMISIGFNAAISVRVSNELGAGNAALAKFSVIVVSITSTLIGIVCMIVVLATKDSFPYLFTSSEAVAAETTRIAVLLGFTVLLNSLQPVLSGVAVGAGWQALVAYVNIACYYIIGLPAGLVLGFTLDLGVQGIWGGMVAGICLQTLILIGIIYFTNWNKEAEQAESRVQRWGGTAQE

SEQ ID NO: 96204 - DNA, 1821 bp, Arabidopsis thaliana
  misc_feature (1)..(1821): Ceres Seq. ID no. 12732390
  misc_feature (1)..(1821): Ortholog of  Ceres SEQ ID NO 12586556 as cited in SEQ ID NO 64667
  misc_feature (1)..(1821): Ortholog of  Ceres SEQ ID NO 13660894 as cited in SEQ ID NO 67475
atgatcaaggcaccaattctacagtctctattggcttctagagacgatttaactcataacccagaagtcaacaactttggagggaaagagcaagaatgtttatacctcttgaagagatgccacaacatagacgagttcaagcaagttcacgccagattcatcaagctaagtttgttctattcttcttcattctcagccagcagcgttctcgcaaaatgcgctcactcgggatgggagaacagtatgaattacgcagcttccatattcagaggcatagatgatccttgtacctttgatttcaatacaatgattagagggtatgttaacgtaatgagtttcgaggaagcattgtgtttttacaatgagatgatgcagagagggaatgagccagataatttcacgtacccgtgtcttctcaaggcttgcactcgtttgaagtcaattcgagaagggaagcagattcatgggcaagtgtttaagctcggtcttgaagctgacgtgtttgttcagaatagtttgatcaatatgtatggaagatgtggagagatggaactttcttctgcggtttttgagaaactggaatctaaaacagctgcgtcgtggagctcgatggtctctgctcgtgcaggcatgggaatgtggagcgaatgcttgttactattccgtggaatgtgtagcgaaacgaatttgaaggcggaagaaagtggaatggttagtgctctcttagcttgtgccaacaccggtgcactcaatctaggaatgagcatccatggcttcctgttgagaaacataagcgaactcaacataatagtccaaacttcactagtagatatgtacgttaaatgcgggtgcttagacaaagcgttgcatatatttcagaagatggaaaagaggaataatttgacttacagtgcaatgatctcaggacttgcgttgcacggagaaggagaatcagctttaagaatgttctctaagatgatcaaagaaggtttagaaccagatcatgttgtgtatgtcagtgttctcaatgcatgtagtcactctggtcttgttaaagaaggtcgtcgagtcttcgcagaaatgttaaaggaaggtaaggtggagccaacggctgagcattacggctgtcttgtagatcttctgggaagagccggattgctcgaggaagcattggagactatccaaagcataccaattgagaaaaatgatgttatctggagaaccttcttaagtcaatgcagagttcgtcagaacattgagctaggccaaatagcagctcaagaactgcttaagctaagctcacacaacccaggtgactatttgctgatctctaacttgtattcacaaggtcaaatgtgggatgatgtagccagaactcgaacagaaatcgctatcaagggtttgaaacaaaccccgggttttagcatcgtcgagctaaaaggtaaaacccacaggttcgtttcacaagatcgatcgcacccaaaatgcaaagaaatctacaagatgctacaccagatggaatggcaactaaaattcgaaggatattcaccagacttgacacagatattgctaaacgtagatgaagaagaaaagaaagagagattaaaaggacacagccaaaaggtggctattgcctttggactattgtatacacctccagggtctatcattaaaatagctagaaacctgaggatgtgtagtgactgtcacacatatacaaagaaaatctccatgatctacgaaagagagattgttgtaagagacagaaacaggtttcacctgtttaaaggtggaacttgttcttgtaaagattattggtag

SEQ ID NO: 96205 - protein, 606 aa, Arabidopsis thaliana
  peptide (1)..(606): Ceres Seq. ID no. 12732391
MIKAPILQSLLASRDDLTHNPEVNNFGGKEQECLYLLKRCHNIDEFKQVHARFIKLSLFYSSSFSASSVLAKCAHSGWENSMNYAASIFRGIDDPCTFDFNTMIRGYVNVMSFEEALCFYNEMMQRGNEPDNFTYPCLLKACTRLKSIREGKQIHGQVFKLGLEADVFVQNSLINMYGRCGEMELSSAVFEKLESKTAASWSSMVSARAGMGMWSECLLLFRGMCSETNLKAEESGMVSALLACANTGALNLGMSIHGFLLRNISELNIIVQTSLVDMYVKCGCLDKALHIFQKMEKRNNLTYSAMISGLALHGEGESALRMFSKMIKEGLEPDHVVYVSVLNACSHSGLVKEGRRVFAEMLKEGKVEPTAEHYGCLVDLLGRAGLLEEALETIQSIPIEKNDVIWRTFLSQCRVRQNIELGQIAAQELLKLSSHNPGDYLLISNLYSQGQMWDDVARTRTEIAIKGLKQTPGFSIVELKGKTHRFVSQDRSHPKCKEIYKMLHQMEWQLKFEGYSPDLTQILLNVDEEEKKERLKGHSQKVAIAFGLLYTPPGSIIKIARNLRMCSDCHTYTKKISMIYEREIVVRDRNRFHLFKGGTCSCKDYW

SEQ ID NO: 96206 - protein, 525 aa, Arabidopsis thaliana
  peptide (1)..(525): Ceres Seq. ID no. 12732392
MNYAASIFRGIDDPCTFDFNTMIRGYVNVMSFEEALCFYNEMMQRGNEPDNFTYPCLLKACTRLKSIREGKQIHGQVFKLGLEADVFVQNSLINMYGRCGEMELSSAVFEKLESKTAASWSSMVSARAGMGMWSECLLLFRGMCSETNLKAEESGMVSALLACANTGALNLGMSIHGFLLRNISELNIIVQTSLVDMYVKCGCLDKALHIFQKMEKRNNLTYSAMISGLALHGEGESALRMFSKMIKEGLEPDHVVYVSVLNACSHSGLVKEGRRVFAEMLKEGKVEPTAEHYGCLVDLLGRAGLLEEALETIQSIPIEKNDVIWRTFLSQCRVRQNIELGQIAAQELLKLSSHNPGDYLLISNLYSQGQMWDDVARTRTEIAIKGLKQTPGFSIVELKGKTHRFVSQDRSHPKCKEIYKMLHQMEWQLKFEGYSPDLTQILLNVDEEEKKERLKGHSQKVAIAFGLLYTPPGSIIKIARNLRMCSDCHTYTKKISMIYEREIVVRDRNRFHLFKGGTCSCKDYW

SEQ ID NO: 96207 - protein, 504 aa, Arabidopsis thaliana
  peptide (1)..(504): Ceres Seq. ID no. 12732393
MIRGYVNVMSFEEALCFYNEMMQRGNEPDNFTYPCLLKACTRLKSIREGKQIHGQVFKLGLEADVFVQNSLINMYGRCGEMELSSAVFEKLESKTAASWSSMVSARAGMGMWSECLLLFRGMCSETNLKAEESGMVSALLACANTGALNLGMSIHGFLLRNISELNIIVQTSLVDMYVKCGCLDKALHIFQKMEKRNNLTYSAMISGLALHGEGESALRMFSKMIKEGLEPDHVVYVSVLNACSHSGLVKEGRRVFAEMLKEGKVEPTAEHYGCLVDLLGRAGLLEEALETIQSIPIEKNDVIWRTFLSQCRVRQNIELGQIAAQELLKLSSHNPGDYLLISNLYSQGQMWDDVARTRTEIAIKGLKQTPGFSIVELKGKTHRFVSQDRSHPKCKEIYKMLHQMEWQLKFEGYSPDLTQILLNVDEEEKKERLKGHSQKVAIAFGLLYTPPGSIIKIARNLRMCSDCHTYTKKISMIYEREIVVRDRNRFHLFKGGTCSCKDYW

SEQ ID NO: 96208 - DNA, 918 bp, Arabidopsis thaliana
  misc_feature (1)..(918): Ceres Seq. ID no. 12732424
  misc_feature (1)..(918): Ortholog of  Ceres SEQ ID NO 14316532 as cited in SEQ ID NO 57093
atgacacttgttagagaacgacgtcaccaagaacctctcacactctctattccaccacttatttaccacggcaccgccttctccgtggcatcttcttcatcgtcaagccctgaaacatcgccgattcaaaccttaaacgatctcgagaaactctccgttttaggacaaggaagcggtgggacagtctacaaaacccgtcaccggagaaccaaaacgctttacgccttaaaagtcctccggccaaatctcaacaccacggtcaccgtcgaagccgacatcctcaagcgaatcgaatcgagttttatcattaaatgctatgccgtttttgttagtttatacgatctctgtttcgtgatggagcttatggagaaaggatctctccatgacgcgttacttgctcaacaagttttctccgagccaatggtatcgagtctcgctaacagaatcctccaagggttacgttatctgcaaaaaatgggaatagttcatggagacataaagccttcaaatctccttattaataagaaaggagaggtcaagattgcggattttggagcaagtaggatagtagccggaggagactatggatcgaatgggacatgtgcttatatgagtcctgaacgtgtagatctagagaaatggggttttggaggagaagttggatttgcaggagatgtgtggtcattaggagttgtggttcttgagtgttacattggaagatatccattgaccaaagttggggataaaccggattgggcgacattattttgtgcaatttgctgcaatgagaaggtggatattccagtgagttgttcgttggagtttagagattttgttgggagatgtttggagaaggattggaggaagagagacactgtggaagagcttcttcgtcattcttttgtgaaaaacagatag

SEQ ID NO: 96209 - protein, 305 aa, Arabidopsis thaliana
  peptide (1)..(305): Ceres Seq. ID no. 12732425
MTLVRERRHQEPLTLSIPPLIYHGTAFSVASSSSSSPETSPIQTLNDLEKLSVLGQGSGGTVYKTRHRRTKTLYALKVLRPNLNTTVTVEADILKRIESSFIIKCYAVFVSLYDLCFVMELMEKGSLHDALLAQQVFSEPMVSSLANRILQGLRYLQKMGIVHGDIKPSNLLINKKGEVKIADFGASRIVAGGDYGSNGTCAYMSPERVDLEKWGFGGEVGFAGDVWSLGVVVLECYIGRYPLTKVGDKPDWATLFCAICCNEKVDIPVSCSLEFRDFVGRCLEKDWRKRDTVEELLRHSFVKNR

SEQ ID NO: 96210 - protein, 187 aa, Arabidopsis thaliana
  peptide (1)..(187): Ceres Seq. ID no. 12732426
MELMEKGSLHDALLAQQVFSEPMVSSLANRILQGLRYLQKMGIVHGDIKPSNLLINKKGEVKIADFGASRIVAGGDYGSNGTCAYMSPERVDLEKWGFGGEVGFAGDVWSLGVVVLECYIGRYPLTKVGDKPDWATLFCAICCNEKVDIPVSCSLEFRDFVGRCLEKDWRKRDTVEELLRHSFVKNR

SEQ ID NO: 96211 - protein, 184 aa, Arabidopsis thaliana
  peptide (1)..(184): Ceres Seq. ID no. 12732427
MEKGSLHDALLAQQVFSEPMVSSLANRILQGLRYLQKMGIVHGDIKPSNLLINKKGEVKIADFGASRIVAGGDYGSNGTCAYMSPERVDLEKWGFGGEVGFAGDVWSLGVVVLECYIGRYPLTKVGDKPDWATLFCAICCNEKVDIPVSCSLEFRDFVGRCLEKDWRKRDTVEELLRHSFVKNR

SEQ ID NO: 96212 - DNA, 1908 bp, Arabidopsis thaliana
  misc_feature (1)..(1908): Ceres Seq. ID no. 12732442
  misc_feature (1)..(1908): Ortholog of  Ceres SEQ ID NO 13584538 as cited in SEQ ID NO 64739
gtctctcctctgcatctcctctgttcctcaggtttctctgctcatggctgcttatggtcaaatctcctcgggaatgactgtagatcctcaggttctctcttcctccagaaacattggagtttccctatcacctctccggagaacactaatcggcgccggagttaggtctactagtatctctctccgtcaatgttctctctccgttagatcgattaaaatctccgaagatagccgcaaacctaaagcttatgcagagaacggtgcttttgatgtgggagttttggattcttcatcatatagattggctgattcaagaacaagtagtaatgattcaaggaggaagactaagattgtgtgtacgattggaccgtcttcgagttctagggaaatgatttggaaactcgcggaagctggaatgaatgtggctcgtttgaatatgtctcatggtgatcatgcttctcatcagataactattgatttagttaaggagtataattctttgtttgttgacaaagctattgctattatgttggatacaaagggtcctgaggttcgaagcggggatgtaccgcagccgatatttcttgaagagggtcaagagtttaactttactatcaagagaggtgtttcgcttaaagacactgttagtgtaaattatgatgattttgtgaacgatgttgaagttggggatatacttttggtggatggtggaatgatgtcgttagctgttaaatcaaagacgagtgatttggtgaagtgtgtggttattgatggtggagagcttcaatctagacgtcacttgaatgttcgaggaaagagtgcgactcttccatccattacagacaaagattgggaagacataaaatttggagtggacaaccaagtcgatttctacgccgtctcctttgttaaggatgctaaagttgtccatgagttgaagaactatctcaaaacctgcagtgcagacatatcggtgattgtgaaaattgaaagtgcagactctataaagaatcttccttctatcatatctgcttgtgatggggcaatggttgctcgtggagatcttggagctgaacttcccattgaagaggtcccgttgttacaggaagaaataatcagaaggtgtagaagcattcataaaccagtgattgttgccacaaacatgctagagagtatgattaatcatccaacgcctacaagagctgaagtctctgacattgcaattgcagtacgtgaaggcgcagatgctatcatgctttctggtgaaaccgcacatggaaagtttccgctgaaagctgttaacgtaatgcatactgtggcgttgagaaccgaggcaagtctacctgtcagaacctcggcatcccgtaccactgcttacaagggtcacatgggccaaatgtttgcttttcatgcttctataatggcaaatacactgagctcaccgctaattgtatttacgagaaccggatccatggcagtgcttctaagccactaccgcccatctgcaacaattttcgccttcacaaaccagagaagaataatgcaaaggcttgctctttatcaaggtgtcatgcctatatatatggagttctcggatgatgcagaagatacatatgcccggtctctcaaactcttacaggacgagaatatgctcaaggaaggacaacatgtaactcttgtccaaagtggctcgcaacccatttggcgtgaagaatcaacacatctcatacaagtccgtaagataaagataggtggatgatgtttttacttcttgagctacacaacatcttgcttttactcagctttctttctcttacacagttcgatccatatttttttgaatcactcacagtgaatcaaacaaccatataaaattttaagttattgaagctttttttctggttatag

SEQ ID NO: 96213 - protein, 585 aa, Arabidopsis thaliana
  peptide (1)..(585): Ceres Seq. ID no. 12732443
SLLCISSVPQVSLLMAAYGQISSGMTVDPQVLSSSRNIGVSLSPLRRTLIGAGVRSTSISLRQCSLSVRSIKISEDSRKPKAYAENGAFDVGVLDSSSYRLADSRTSSNDSRRKTKIVCTIGPSSSSREMIWKLAEAGMNVARLNMSHGDHASHQITIDLVKEYNSLFVDKAIAIMLDTKGPEVRSGDVPQPIFLEEGQEFNFTIKRGVSLKDTVSVNYDDFVNDVEVGDILLVDGGMMSLAVKSKTSDLVKCVVIDGGELQSRRHLNVRGKSATLPSITDKDWEDIKFGVDNQVDFYAVSFVKDAKVVHELKNYLKTCSADISVIVKIESADSIKNLPSIISACDGAMVARGDLGAELPIEEVPLLQEEIIRRCRSIHKPVIVATNMLESMINHPTPTRAEVSDIAIAVREGADAIMLSGETAHGKFPLKAVNVMHTVALRTEASLPVRTSASRTTAYKGHMGQMFAFHASIMANTLSSPLIVFTRTGSMAVLLSHYRPSATIFAFTNQRRIMQRLALYQGVMPIYMEFSDDAEDTYARSLKLLQDENMLKEGQHVTLVQSGSQPIWREESTHLIQVRKIKIGG

SEQ ID NO: 96214 - protein, 571 aa, Arabidopsis thaliana
  peptide (1)..(571): Ceres Seq. ID no. 12732444
MAAYGQISSGMTVDPQVLSSSRNIGVSLSPLRRTLIGAGVRSTSISLRQCSLSVRSIKISEDSRKPKAYAENGAFDVGVLDSSSYRLADSRTSSNDSRRKTKIVCTIGPSSSSREMIWKLAEAGMNVARLNMSHGDHASHQITIDLVKEYNSLFVDKAIAIMLDTKGPEVRSGDVPQPIFLEEGQEFNFTIKRGVSLKDTVSVNYDDFVNDVEVGDILLVDGGMMSLAVKSKTSDLVKCVVIDGGELQSRRHLNVRGKSATLPSITDKDWEDIKFGVDNQVDFYAVSFVKDAKVVHELKNYLKTCSADISVIVKIESADSIKNLPSIISACDGAMVARGDLGAELPIEEVPLLQEEIIRRCRSIHKPVIVATNMLESMINHPTPTRAEVSDIAIAVREGADAIMLSGETAHGKFPLKAVNVMHTVALRTEASLPVRTSASRTTAYKGHMGQMFAFHASIMANTLSSPLIVFTRTGSMAVLLSHYRPSATIFAFTNQRRIMQRLALYQGVMPIYMEFSDDAEDTYARSLKLLQDENMLKEGQHVTLVQSGSQPIWREESTHLIQVRKIKIGG

SEQ ID NO: 96215 - protein, 561 aa, Arabidopsis thaliana
  peptide (1)..(561): Ceres Seq. ID no. 12732445
MTVDPQVLSSSRNIGVSLSPLRRTLIGAGVRSTSISLRQCSLSVRSIKISEDSRKPKAYAENGAFDVGVLDSSSYRLADSRTSSNDSRRKTKIVCTIGPSSSSREMIWKLAEAGMNVARLNMSHGDHASHQITIDLVKEYNSLFVDKAIAIMLDTKGPEVRSGDVPQPIFLEEGQEFNFTIKRGVSLKDTVSVNYDDFVNDVEVGDILLVDGGMMSLAVKSKTSDLVKCVVIDGGELQSRRHLNVRGKSATLPSITDKDWEDIKFGVDNQVDFYAVSFVKDAKVVHELKNYLKTCSADISVIVKIESADSIKNLPSIISACDGAMVARGDLGAELPIEEVPLLQEEIIRRCRSIHKPVIVATNMLESMINHPTPTRAEVSDIAIAVREGADAIMLSGETAHGKFPLKAVNVMHTVALRTEASLPVRTSASRTTAYKGHMGQMFAFHASIMANTLSSPLIVFTRTGSMAVLLSHYRPSATIFAFTNQRRIMQRLALYQGVMPIYMEFSDDAEDTYARSLKLLQDENMLKEGQHVTLVQSGSQPIWREESTHLIQVRKIKIGG

SEQ ID NO: 96216 - DNA, 1821 bp, Arabidopsis thaliana
  misc_feature (1)..(1821): Ceres Seq. ID no. 12732446
  misc_feature (1)..(1821): Ortholog of  Ceres SEQ ID NO 12613725 as cited in SEQ ID NO 68196
atgcagacgatgaagaagaaagaaggagaagaagaaacaagagatgggacagtggattactatggtcgtccctctattcgttctaactcaggccaatgggttgctggcatcgtcattcttctgaaccaggggctggctacactagccttctttggagttggagtgaacttggtgctcttcctaactcgcgttttgcagcagaacaacgcagacgcagctaacaacgttagcaaatggacagggactgtttatatcttctcattggttggagcgtttctcagcgattcgtattggggtcgttacaagacttgtgctatcttccaagtcatttttgtcattggactttcatcgctatcgctatcatcatacatgttcttgattagaccaagaggttgtggggacgaagtcacgccttgtggttcacattccatgatggagatcacaatgttctacttctcgatctacttgatcgcattgggatatggcggttaccaaccaaacattgcaacgcttggagcggatcagttcgatgaggagcatcctaaagaagggtactcgaagattgcgtttttcagctacttttaccttgctttaaacctcggatcgctcttttcgaacaccatcttggggtattttgaggatgagggaatgtgggcactcgggttttgggcatccactggctctgctatcattgggttgattcttttccttgttggaacaccgagataccgatatttcaagcccacggggaatcctctttcgaggttttgccaagttttggtcgctgcaacgaagaaatcatcggtggaggcaccattaagagggagagaggagatgtatgacggagacagcgaagggaaaaatgcttcagttaacacagggagaaggatagtgcataccgatgaattcaagttcttggacaaagcagcgtacatcacagctagagatctagatgacaagaaacaagactcagtgaacccatggaggctctgtccagtgacacaagtcgaggaagtcaagtgtattcttagactgatgccaatttggctctgcactataatctactcagtcgtcttcactcaaatggcctctctctttgtggagcaaggcgctgcaatgaatacctctgtctcagatttcaaaatccccccggcaagtatgtccagcttcgacatccttagcgtcgctttgttcatattcctgtaccgcagagttctcgagccagtagccaacagattcaaaaagaatggatcaaaaggaatcaccgagcttcacaggatgggaatcggacttgtgattgctgtcatagctatgattgcagccgggattgtggaatgctataggcttaagtatgcagacaagagttgtactcactgtgatggctcaagctccttaagcatcttctggcaggctccacaatactcactcatcggggcatcagaagtgttcatgtacgtgggtcagcttgagttcttcaacgcgcaaacaccagacggactaaagagcttcgggagcgctctgtgtatgatgtcaatgtcaatggggaactttgttagtagcttgttggtaacaatggtggtgaagatctcaacagaggatcacatgcctggttggattccaaggaatctcaacaaaggtcacttagacagattctatttcctcctggctgcgttgacgagcattgacctggtggtatacattgcatgtgcaaaatggtacaaacctatacaactagaaggaaaagatgagatgcaagacatgagtgatgatgactatgacaccgagagtgaagaggaacgagagaaggattctaaagtctaa

SEQ ID NO: 96217 - protein, 606 aa, Arabidopsis thaliana
  peptide (1)..(606): Ceres Seq. ID no. 12732447
MQTMKKKEGEEETRDGTVDYYGRPSIRSNSGQWVAGIVILLNQGLATLAFFGVGVNLVLFLTRVLQQNNADAANNVSKWTGTVYIFSLVGAFLSDSYWGRYKTCAIFQVIFVIGLSSLSLSSYMFLIRPRGCGDEVTPCGSHSMMEITMFYFSIYLIALGYGGYQPNIATLGADQFDEEHPKEGYSKIAFFSYFYLALNLGSLFSNTILGYFEDEGMWALGFWASTGSAIIGLILFLVGTPRYRYFKPTGNPLSRFCQVLVAATKKSSVEAPLRGREEMYDGDSEGKNASVNTGRRIVHTDEFKFLDKAAYITARDLDDKKQDSVNPWRLCPVTQVEEVKCILRLMPIWLCTIIYSVVFTQMASLFVEQGAAMNTSVSDFKIPPASMSSFDILSVALFIFLYRRVLEPVANRFKKNGSKGITELHRMGIGLVIAVIAMIAAGIVECYRLKYADKSCTHCDGSSSLSIFWQAPQYSLIGASEVFMYVGQLEFFNAQTPDGLKSFGSALCMMSMSMGNFVSSLLVTMVVKISTEDHMPGWIPRNLNKGHLDRFYFLLAALTSIDLVVYIACAKWYKPIQLEGKDEMQDMSDDDYDTESEEEREKDSKV

SEQ ID NO: 96218 - protein, 603 aa, Arabidopsis thaliana
  peptide (1)..(603): Ceres Seq. ID no. 12732448
MKKKEGEEETRDGTVDYYGRPSIRSNSGQWVAGIVILLNQGLATLAFFGVGVNLVLFLTRVLQQNNADAANNVSKWTGTVYIFSLVGAFLSDSYWGRYKTCAIFQVIFVIGLSSLSLSSYMFLIRPRGCGDEVTPCGSHSMMEITMFYFSIYLIALGYGGYQPNIATLGADQFDEEHPKEGYSKIAFFSYFYLALNLGSLFSNTILGYFEDEGMWALGFWASTGSAIIGLILFLVGTPRYRYFKPTGNPLSRFCQVLVAATKKSSVEAPLRGREEMYDGDSEGKNASVNTGRRIVHTDEFKFLDKAAYITARDLDDKKQDSVNPWRLCPVTQVEEVKCILRLMPIWLCTIIYSVVFTQMASLFVEQGAAMNTSVSDFKIPPASMSSFDILSVALFIFLYRRVLEPVANRFKKNGSKGITELHRMGIGLVIAVIAMIAAGIVECYRLKYADKSCTHCDGSSSLSIFWQAPQYSLIGASEVFMYVGQLEFFNAQTPDGLKSFGSALCMMSMSMGNFVSSLLVTMVVKISTEDHMPGWIPRNLNKGHLDRFYFLLAALTSIDLVVYIACAKWYKPIQLEGKDEMQDMSDDDYDTESEEEREKDSKV

SEQ ID NO: 96219 - protein, 483 aa, Arabidopsis thaliana
  peptide (1)..(483): Ceres Seq. ID no. 12732449
MFLIRPRGCGDEVTPCGSHSMMEITMFYFSIYLIALGYGGYQPNIATLGADQFDEEHPKEGYSKIAFFSYFYLALNLGSLFSNTILGYFEDEGMWALGFWASTGSAIIGLILFLVGTPRYRYFKPTGNPLSRFCQVLVAATKKSSVEAPLRGREEMYDGDSEGKNASVNTGRRIVHTDEFKFLDKAAYITARDLDDKKQDSVNPWRLCPVTQVEEVKCILRLMPIWLCTIIYSVVFTQMASLFVEQGAAMNTSVSDFKIPPASMSSFDILSVALFIFLYRRVLEPVANRFKKNGSKGITELHRMGIGLVIAVIAMIAAGIVECYRLKYADKSCTHCDGSSSLSIFWQAPQYSLIGASEVFMYVGQLEFFNAQTPDGLKSFGSALCMMSMSMGNFVSSLLVTMVVKISTEDHMPGWIPRNLNKGHLDRFYFLLAALTSIDLVVYIACAKWYKPIQLEGKDEMQDMSDDDYDTESEEEREKDSKV

SEQ ID NO: 96220 - DNA, 945 bp, Arabidopsis thaliana
  misc_feature (1)..(945): Ceres Seq. ID no. 12732498
  misc_feature (1)..(945): Ortholog of  Ceres SEQ ID NO 13581701 as cited in SEQ ID NO 51151
  misc_feature (1)..(945): Ortholog of  Ceres SEQ ID NO 14315491 as cited in SEQ ID NO 57026
atgggtggttgcgtctcctccaacctccttactccgaccgatgacagcagcttctctcacctcaccagctcctccttaagccaacatttcgtcaagctaacttccaccacttacggtcttctcaatctcgactcttcttcaccttctcctccgtctccttcctcctcctcctccgccaaatccgttatcacgccaatgactccgcctgagagattcactatcaacggtaaggaggcggcgatgatgatggttaagtctgagccgacgacggaggttattaacttctgggagctaatgtcaggtttagacggcgatacttgtcgattctctccgattccggtgaaatgtaatggattttccggcggattaaagaaagagaactccgatcctaatttgaaaaaccctaacgattacgaggttttgaaaccgttagatccgaaattagcggaggaatctgagaggttatgtgacggcggagagaatcgcgttgtgatttatacgacgtcgttgcgcggtgttcgacggacgtttgaggcgtgtaacgccgtgagagctgcgattgagagttttggtgtagtggtttgtgagagagatgtgtcaatggatagaggatttagagaagagttatccaatctaatggcggtagaatcgacggcggcggtgttgccgcctcgggtttttgtgaaggggaagtacattggtggagcagaggaagtgatgagattggtggaagaaggattgcttggtgaattgcttaaagagattccgaggaagaaagatcggtgtggcggcggttgcggtggttgcggcggattagcgtttttgccgtgttcgggttgtaatggaagctgtaaagtggtggaaggatgggggaatgatgcagtggtggtgaagtgtaaggagtgtaatgagaatggtcttgttcgttgtccaatatgcagctaa

SEQ ID NO: 96221 - protein, 314 aa, Arabidopsis thaliana
  peptide (1)..(314): Ceres Seq. ID no. 12732499
MGGCVSSNLLTPTDDSSFSHLTSSSLSQHFVKLTSTTYGLLNLDSSSPSPPSPSSSSSAKSVITPMTPPERFTINGKEAAMMMVKSEPTTEVINFWELMSGLDGDTCRFSPIPVKCNGFSGGLKKENSDPNLKNPNDYEVLKPLDPKLAEESERLCDGGENRVVIYTTSLRGVRRTFEACNAVRAAIESFGVVVCERDVSMDRGFREELSNLMAVESTAAVLPPRVFVKGKYIGGAEEVMRLVEEGLLGELLKEIPRKKDRCGGGCGGCGGLAFLPCSGCNGSCKVVEGWGNDAVVVKCKECNENGLVRCPICS

SEQ ID NO: 96222 - protein, 249 aa, Arabidopsis thaliana
  peptide (1)..(249): Ceres Seq. ID no. 12732500
MTPPERFTINGKEAAMMMVKSEPTTEVINFWELMSGLDGDTCRFSPIPVKCNGFSGGLKKENSDPNLKNPNDYEVLKPLDPKLAEESERLCDGGENRVVIYTTSLRGVRRTFEACNAVRAAIESFGVVVCERDVSMDRGFREELSNLMAVESTAAVLPPRVFVKGKYIGGAEEVMRLVEEGLLGELLKEIPRKKDRCGGGCGGCGGLAFLPCSGCNGSCKVVEGWGNDAVVVKCKECNENGLVRCPICS

SEQ ID NO: 96223 - protein, 234 aa, Arabidopsis thaliana
  peptide (1)..(234): Ceres Seq. ID no. 12732501
MMMVKSEPTTEVINFWELMSGLDGDTCRFSPIPVKCNGFSGGLKKENSDPNLKNPNDYEVLKPLDPKLAEESERLCDGGENRVVIYTTSLRGVRRTFEACNAVRAAIESFGVVVCERDVSMDRGFREELSNLMAVESTAAVLPPRVFVKGKYIGGAEEVMRLVEEGLLGELLKEIPRKKDRCGGGCGGCGGLAFLPCSGCNGSCKVVEGWGNDAVVVKCKECNENGLVRCPICS

SEQ ID NO: 96224 - DNA, 1077 bp, Arabidopsis thaliana
  misc_feature (1)..(1077): Ceres Seq. ID no. 12732502
  misc_feature (1)..(1077): Ortholog of  Ceres SEQ ID NO 13582619 as cited in SEQ ID NO 56520
  misc_feature (1)..(1077): Ortholog of  Ceres SEQ ID NO 14315846 as cited in SEQ ID NO 58094
  misc_feature (1)..(1077): Ortholog of  Ceres SEQ ID NO 13660872 as cited in SEQ ID NO 60830
  misc_feature (1)..(1077): Ortholog of  Ceres SEQ ID NO 15226831 as cited in SEQ ID NO 62916
  misc_feature (1)..(1077): Ortholog of  Ceres SEQ ID NO 12616221 as cited in SEQ ID NO 63291
atggctgataataaggtcaatctttcgattaatggacaatcaaaagtgcctccaggtttcagattccatcccaccgaagaagaacttctccattactatctccgtaagaaagttaactctcaaaagatcgatcttgatgtcattcgtgaagttgatctaaacaagcttgagccttgggatattcaagaggaatgtagaatcggttcaacgccacaaaacgactggtacttcttcagccacaaggacaagaagtatccaaccgggaccaggacgaaccgggcaacagtcgctggattctggaaagctaccggacgtgacaaaatcatctgcagttgtgtccggagaattggactgaggaagacactcgtgttctacaaaggaagagctcctcacggtcagaaatccgactggatcatgcatgagtatcgcctcgacgatactccaatgtctaatggctatgctgatgttgttacagaagatccaatgagctataacgaagaaggttgggtggtatgtcgagtgttcaggaagaagaactatcaaaagattgacgattgtcctaaaatcactctatcttctttacctgatgacacggaggaagagaaggggcccacctttcacaacactcaaaacgttaccggtttagaccatgttcttctctacatggaccgtaccggttctaacatttgcatgcccgagagccaaacaacgactcaacatcaagatgatgtcttattcatgcaactcccaagtcttgagacacctaaatccgagagcccggtcgaccaaagtttcctgactccaagcaaactcgatttctctcccgttcaagagaagataaccgaaagaccggtttgcagcaactgggctagtcttgaccggctcgtagcttggcaattgaacaatggtcatcataatccgtgtcatcgtaagagttttgatgaagaagaagaaaatggtgatactatgatgcagcgatgggatcttcattggaataatgatgataatgttgatctttggagtagtttcactgagtcttcttcgtctttagacccacttcttcatttatctgtatga

SEQ ID NO: 96225 - protein, 358 aa, Arabidopsis thaliana
  peptide (1)..(358): Ceres Seq. ID no. 12732503
MADNKVNLSINGQSKVPPGFRFHPTEEELLHYYLRKKVNSQKIDLDVIREVDLNKLEPWDIQEECRIGSTPQNDWYFFSHKDKKYPTGTRTNRATVAGFWKATGRDKIICSCVRRIGLRKTLVFYKGRAPHGQKSDWIMHEYRLDDTPMSNGYADVVTEDPMSYNEEGWVVCRVFRKKNYQKIDDCPKITLSSLPDDTEEEKGPTFHNTQNVTGLDHVLLYMDRTGSNICMPESQTTTQHQDDVLFMQLPSLETPKSESPVDQSFLTPSKLDFSPVQEKITERPVCSNWASLDRLVAWQLNNGHHNPCHRKSFDEEEENGDTMMQRWDLHWNNDDNVDLWSSFTESSSSLDPLLHLSV

SEQ ID NO: 96226 - protein, 220 aa, Arabidopsis thaliana
  peptide (1)..(220): Ceres Seq. ID no. 12732504
MHEYRLDDTPMSNGYADVVTEDPMSYNEEGWVVCRVFRKKNYQKIDDCPKITLSSLPDDTEEEKGPTFHNTQNVTGLDHVLLYMDRTGSNICMPESQTTTQHQDDVLFMQLPSLETPKSESPVDQSFLTPSKLDFSPVQEKITERPVCSNWASLDRLVAWQLNNGHHNPCHRKSFDEEEENGDTMMQRWDLHWNNDDNVDLWSSFTESSSSLDPLLHLSV

SEQ ID NO: 96227 - protein, 210 aa, Arabidopsis thaliana
  peptide (1)..(210): Ceres Seq. ID no. 12732505
MSNGYADVVTEDPMSYNEEGWVVCRVFRKKNYQKIDDCPKITLSSLPDDTEEEKGPTFHNTQNVTGLDHVLLYMDRTGSNICMPESQTTTQHQDDVLFMQLPSLETPKSESPVDQSFLTPSKLDFSPVQEKITERPVCSNWASLDRLVAWQLNNGHHNPCHRKSFDEEEENGDTMMQRWDLHWNNDDNVDLWSSFTESSSSLDPLLHLSV

SEQ ID NO: 96228 - DNA, 1901 bp, Arabidopsis thaliana
  misc_feature (1)..(1901): Ceres Seq. ID no. 12732514
  misc_feature (1)..(1901): Ortholog of  Ceres SEQ ID NO 13582619 as cited in SEQ ID NO 56520
  misc_feature (1)..(1901): Ortholog of  Ceres SEQ ID NO 12611392 as cited in SEQ ID NO 56826
  misc_feature (1)..(1901): Ortholog of  Ceres SEQ ID NO 13660872 as cited in SEQ ID NO 60830
acagaaaaatcgaaactttttagggtttttttttttgtgataacgagagagaaaaaagtgatggacttgtcggttgagaacggaggtttagctccaggttttaggtttcatccgacggacgaagaacttgtcgtctattatctcaaaagaaagatccgtcggaaaaaactcagagtcgaagcaatcggcgagactgatgtctataagtttgatcctgaggaattacctgagaaagcgttgtataagactagagatcgtcaatggttctttttcagcttaagggataggaaacatggaagtaggtcaagtagagctactgaacgtggctattggaaagcaacagggaaggatagagtcattcattgtgattcgagacccgttggagagaagaagactcttgttttccatagaggcagggcacctaatggcgaacggactaattgggtgatgcatgagtatacattgcacaaagaggagctcaagaggtgtggtggtgaagatgttaaggatgcttatgttctttacaagatttataagaaaagtgggtctggtcctaagaatggtgagcaatatggagctccttttattgaagaagaatgggctgaagatgatgatgatgatgttgatgagcctgctaatcagctcgttgtttcggctagtgttgataatagtttatgggggaaagggcttaaccaatctgaattggatgataatgatattgaagagctgatgagtcaggttagagatcagtctggtccaacattgcagcagaatggggtgtctggactgaactctcatgtagacacgtataatctggagaacctggaggaagatatgtatttggaaatcaatgatcttatggaacctgaacctgaaccaacttctgtggaagtcatggagaataactggaacgaggatggttctggtctcctgaatgatgatgatttcgttggtgctgattcatatttccttgatttgggagtgacaaatcctcagttagattttgttagtggtgatttgaaaaatgggtttgcacaaagtcttcaggtgaatacttctttaatgacttaccaggccaataataaccagttccagcagcaatcagggaagaaccaagctagtaactggccactccgtaacagctataccagacagataaacaatggatcatcgtgggtgcaggagctaaacaatgacggacttaccgttacccggtttggtgaggcgcctggtacaggtgattcatctgaattcctaaaccctgttccttctggtataagtacaactaatgaagatgacccgtcaaaagacgagtctagtaagtttgcttctagtgtatggactttcctggaatccattcctgcaaagccagcatatgcatcagagaatccatttgtgaagctgaaccttgttagaatgtcaaccagtggtggtcgtttcaggtttacttctaaaagcacaggtaataatgttgttgttatggatagtgactcagcagtgaagaggaacaagtctggaggaaacaacgataagaagaagaagaagaacaaaggtttcttttgcttatcgatcattggggctttatgtgctttgttttgggtgatcataggaacaatgggaggttcagggaggcctttgttatggtgagaaccgaaaaatccaagaggttaagagacataaaggcttggttttgtgtgaaccattagagagtcaagtcattgtaattattctcttggattattagattcagaagctgtttagtatcacagtttatgcttggaagttttctctggtattgttaaaaaagtaccaatagaaataagcaaaagaattttcttatcttttaggatatttgaacaaatgatgttacttaactagattattaacttggaggttgttgt

SEQ ID NO: 96229 - protein, 548 aa, Arabidopsis thaliana
  peptide (1)..(548): Ceres Seq. ID no. 12732515
TEKSKLFRVFFFVITREKKVMDLSVENGGLAPGFRFHPTDEELVVYYLKRKIRRKKLRVEAIGETDVYKFDPEELPEKALYKTRDRQWFFFSLRDRKHGSRSSRATERGYWKATGKDRVIHCDSRPVGEKKTLVFHRGRAPNGERTNWVMHEYTLHKEELKRCGGEDVKDAYVLYKIYKKSGSGPKNGEQYGAPFIEEEWAEDDDDDVDEPANQLVVSASVDNSLWGKGLNQSELDDNDIEELMSQVRDQSGPTLQQNGVSGLNSHVDTYNLENLEEDMYLEINDLMEPEPEPTSVEVMENNWNEDGSGLLNDDDFVGADSYFLDLGVTNPQLDFVSGDLKNGFAQSLQVNTSLMTYQANNNQFQQQSGKNQASNWPLRNSYTRQINNGSSWVQELNNDGLTVTRFGEAPGTGDSSEFLNPVPSGISTTNEDDPSKDESSKFASSVWTFLESIPAKPAYASENPFVKLNLVRMSTSGGRFRFTSKSTGNNVVVMDSDSAVKRNKSGGNNDKKKKKNKGFFCLSIIGALCALFWVIIGTMGGSGRPLLW

SEQ ID NO: 96230 - protein, 528 aa, Arabidopsis thaliana
  peptide (1)..(528): Ceres Seq. ID no. 12732516
MDLSVENGGLAPGFRFHPTDEELVVYYLKRKIRRKKLRVEAIGETDVYKFDPEELPEKALYKTRDRQWFFFSLRDRKHGSRSSRATERGYWKATGKDRVIHCDSRPVGEKKTLVFHRGRAPNGERTNWVMHEYTLHKEELKRCGGEDVKDAYVLYKIYKKSGSGPKNGEQYGAPFIEEEWAEDDDDDVDEPANQLVVSASVDNSLWGKGLNQSELDDNDIEELMSQVRDQSGPTLQQNGVSGLNSHVDTYNLENLEEDMYLEINDLMEPEPEPTSVEVMENNWNEDGSGLLNDDDFVGADSYFLDLGVTNPQLDFVSGDLKNGFAQSLQVNTSLMTYQANNNQFQQQSGKNQASNWPLRNSYTRQINNGSSWVQELNNDGLTVTRFGEAPGTGDSSEFLNPVPSGISTTNEDDPSKDESSKFASSVWTFLESIPAKPAYASENPFVKLNLVRMSTSGGRFRFTSKSTGNNVVVMDSDSAVKRNKSGGNNDKKKKKNKGFFCLSIIGALCALFWVIIGTMGGSGRPLLW

SEQ ID NO: 96231 - protein, 399 aa, Arabidopsis thaliana
  peptide (1)..(399): Ceres Seq. ID no. 12732517
MHEYTLHKEELKRCGGEDVKDAYVLYKIYKKSGSGPKNGEQYGAPFIEEEWAEDDDDDVDEPANQLVVSASVDNSLWGKGLNQSELDDNDIEELMSQVRDQSGPTLQQNGVSGLNSHVDTYNLENLEEDMYLEINDLMEPEPEPTSVEVMENNWNEDGSGLLNDDDFVGADSYFLDLGVTNPQLDFVSGDLKNGFAQSLQVNTSLMTYQANNNQFQQQSGKNQASNWPLRNSYTRQINNGSSWVQELNNDGLTVTRFGEAPGTGDSSEFLNPVPSGISTTNEDDPSKDESSKFASSVWTFLESIPAKPAYASENPFVKLNLVRMSTSGGRFRFTSKSTGNNVVVMDSDSAVKRNKSGGNNDKKKKKNKGFFCLSIIGALCALFWVIIGTMGGSGRPLLW

SEQ ID NO: 96232 - DNA, 1395 bp, Arabidopsis thaliana
  misc_feature (1)..(1395): Ceres Seq. ID no. 12732522
  misc_feature (1)..(1395): Ortholog of  Ceres SEQ ID NO 15227139 as cited in SEQ ID NO 0
atggaagatgcagcggagcaagaacgtggtttccacgtgatcaccataaggaagcagatagtcacggctgctcttcccctccaagaccattggcttcctctttcaaacctcgacctcctcctccctcctgtccaaatcagcgtttgcttctgctacaagaaaccacgtcatttcttatccgtggctgaaaccctaaaagcgtctttggctgaggctctcgtctcctactatgcctttgccggtgaactcgtgaaaaactcctctggagaacccgagattctctgcaacaaccgcggcgtagacttccttgaggcggttgctgacgtggagctccgggagcttaacttgcatgatcctgatgaaagtatcgccaagcttgttccgaagaagaagcatggagttatagctattcaggtaactcaacttaaatgtgggagcatagtggtaggatgcacatttgatcatcgaattgcagatgctttctccatgaacatgttccttgtttcttgggctgagatctctagattcaatgcaccaatctcttctgtcccatcgttccggagatctatactaaacccgcgacgaccactgattatcgactcatctatagacaagatgtatatgcctgtcacgtctttgccccttccacaagaaacaacaaatgacctagataatatcctcacaagccgtatctattacatcaaagaaaatgcgttggaagatctccaaactctagcaagcggtagctcccccaagactggttatggtcagaggacgaaactagagtcgttcagcgcgtttctatggaaacttgtggcgaaacacacaggaagagatctagtttcgaacaagaactcgaaaatgggtattgttgtcgacggaaggagaagacttatggagaaagaagacaacacttactttggaaacgttctttccatcccatttggtggacagagtatcgatgacttgattgacaagccattgtcttgggtgaccaacgaagttcacagattcttggaagaagcagtgaccaaagaacatttcttaaacttgattgattgggttgagattcaccgcccgataccggcagtgtcgaggatctatagtacgggaaccgacgatggaccagcttttgtggtctcctccgggaggagttttccggtgaacaaggttgatttcggttggggcttaccggtttttgggtcataccatttcccatgggagggaagctccggatatgtgatgccgatgccgagtccggtggacgacgggaacggagattgggtggtttacttgcatcttacgaaaggacagttaaagttcattgaggaggaggcttcccatgtgcttaaacccatagacaattattatctcaagattaacaccatcaattaa

SEQ ID NO: 96233 - protein, 464 aa, Arabidopsis thaliana
  peptide (1)..(464): Ceres Seq. ID no. 12732523
MEDAAEQERGFHVITIRKQIVTAALPLQDHWLPLSNLDLLLPPVQISVCFCYKKPRHFLSVAETLKASLAEALVSYYAFAGELVKNSSGEPEILCNNRGVDFLEAVADVELRELNLHDPDESIAKLVPKKKHGVIAIQVTQLKCGSIVVGCTFDHRIADAFSMNMFLVSWAEISRFNAPISSVPSFRRSILNPRRPLIIDSSIDKMYMPVTSLPLPQETTNDLDNILTSRIYYIKENALEDLQTLASGSSPKTGYGQRTKLESFSAFLWKLVAKHTGRDLVSNKNSKMGIVVDGRRRLMEKEDNTYFGNVLSIPFGGQSIDDLIDKPLSWVTNEVHRFLEEAVTKEHFLNLIDWVEIHRPIPAVSRIYSTGTDDGPAFVVSSGRSFPVNKVDFGWGLPVFGSYHFPWEGSSGYVMPMPSPVDDGNGDWVVYLHLTKGQLKFIEEEASHVLKPIDNYYLKINTIN

SEQ ID NO: 96234 - protein, 302 aa, Arabidopsis thaliana
  peptide (1)..(302): Ceres Seq. ID no. 12732524
MNMFLVSWAEISRFNAPISSVPSFRRSILNPRRPLIIDSSIDKMYMPVTSLPLPQETTNDLDNILTSRIYYIKENALEDLQTLASGSSPKTGYGQRTKLESFSAFLWKLVAKHTGRDLVSNKNSKMGIVVDGRRRLMEKEDNTYFGNVLSIPFGGQSIDDLIDKPLSWVTNEVHRFLEEAVTKEHFLNLIDWVEIHRPIPAVSRIYSTGTDDGPAFVVSSGRSFPVNKVDFGWGLPVFGSYHFPWEGSSGYVMPMPSPVDDGNGDWVVYLHLTKGQLKFIEEEASHVLKPIDNYYLKINTIN

SEQ ID NO: 96235 - protein, 300 aa, Arabidopsis thaliana
  peptide (1)..(300): Ceres Seq. ID no. 12732525
MFLVSWAEISRFNAPISSVPSFRRSILNPRRPLIIDSSIDKMYMPVTSLPLPQETTNDLDNILTSRIYYIKENALEDLQTLASGSSPKTGYGQRTKLESFSAFLWKLVAKHTGRDLVSNKNSKMGIVVDGRRRLMEKEDNTYFGNVLSIPFGGQSIDDLIDKPLSWVTNEVHRFLEEAVTKEHFLNLIDWVEIHRPIPAVSRIYSTGTDDGPAFVVSSGRSFPVNKVDFGWGLPVFGSYHFPWEGSSGYVMPMPSPVDDGNGDWVVYLHLTKGQLKFIEEEASHVLKPIDNYYLKINTIN
